United States Patent Application Publication US 2011/0183924 A1 - sequence listing, part 52

SEQ ID NO: 150857 - DNA, 473 bp, Homo sapiens
aactcctttgcttcatcggtatggaaactgaattttaaaaaataaaaatcaatttagctgatgcctaaacaatttaaaaagagtaaaaacttactttgcttaaatgaacgacaattaaaataacttttgagacatttattgattgaaagctgaatgagaatcattggcaatgtagacattattaaaatcacaggtcaggaagagtactgcttttcttttaggcctatctggagaatgcatctagcaagtaaatgtatgtaagtcataagagtttacctgcatttctaatatgatacagttaagtgaaatgtgacgatttcagagggcagccataaatgtcatcatgagttagaatacagattaggaacaatttaaacagttagaaaagctaatgcaaaggtcatgctactcacaaaccatgaggacttcaattttcctgacatttcctctaaggatgtgaagttcacaatctc

SEQ ID NO: 150858 - DNA, 355 bp, Homo sapiens
ggactcggcggagcgggccctgctaagcgtgtaagatagtgtgccgtttctgctacgtcccctgccccagcgtgccgtgtccccaggttactctgctgtccatttgtgctggagagaataatagaaataaacagtctttctgggtccactctaagttcattttcctgttgccccttcctgaagcttggaaatacatttattcaactcgattgaactcttctactgtctgattttctggtgttagagtttgggcaaattttctggaagggaagacaccagcgtgggcaggcaactgagaagggttctcgggtaagaataaactgggctggatgcaaacacagcgatgagtgaagat

SEQ ID NO: 150859 - DNA, 268 bp, Homo sapiens
gaagatggcagaggttgcaacgaggcctctctgaggtgctctgggagcacagaggagtcaggtggaacttgtggcatgttgccaagggaagaagtgatttttagacagaataggaatttgccaagaagagaagtcagaaaagcataactggcagaggaagcagcatacgttacaagtaactgcatgtgtacagggaatcactgagtgatggacaagggcttggcacttggtgggggggggtaccatgttaacatgttagcaagaaact

SEQ ID NO: 150860 - DNA, 120 bp, Homo sapiens
gtttctctgctgggacctaggccttagtgcgggccctcaaccaggagccagggatagctcagagatgctttgtttggcagaccttctcatttcctgcctcttacccccgggactgcccca

SEQ ID NO: 150861 - DNA, 793 bp, Homo sapiens
cctccaatcatgagctaacctgtaaaccaggcgtgtcttatctgtgttgacaagtcttctgcaacccaatcccctggacagggcatgtgcagagaagtggttcatagctggctagccaaggaacacagatggctggactcaagaaacatcaggctctatttgctgcagatcccagccaggagactagaggaggtgtggcttcactaggggcaacttccaggcttttctagcctaactgtactccaggttcagctgaactcaagcctataatgggaacttgtttctctccatttttaccgagcctggtttggaaagtttattggatagggcaagtccctgaaacgtaaccagctccatgcaatgtggccaactggcagccaagagccatgctgagttggagcagagaatacaccgacactgtatggccagagcctagtgctgccatgggaagcctagagagctgagcatgactcctcagcaggctgaagaatgagcttaggacctgcctgatgcttccctggctgcataggcttggacgttcgtctctccactggcaatggcagcctcgagtataaacccactgcgaggactgactccccagagcaaaggtcaggagcttgtgtaacgtgtattttagaacagttatacttgcatatgctatttttaaaattcaaagaatataacaaaaagaacacaaattcttaattcttctcatcagctgggttctcacctctcactcccctctccagctccttaacattttctttatacaaactcaagcaaatttgaatat

SEQ ID NO: 150862 - DNA, 365 bp, Homo sapiens
caagagagtcccaggtccctgcctggagtgcatgtgacaatcatcataatacagggctatagcgcatatatgacaaagtgctgtgggagaaaagagaaagacaatccaatcccttgggctcccagaagaggtggcttgtgagctgcgccttgagcacccactcacggaggacagcataagcaaaagtggggaggaatgtgggcaggaggggcgtgaagaagcgggcagtggggtttggagtgactgaaccctaggagggtggtggtggcaagagatgatgggggagtgttggaggggcctgggcaggctatgctgaggagtttgggcttgacccaaaagtcacagtgaaccacggaaggggctga

SEQ ID NO: 150863 - DNA, 397 bp, Homo sapiens
cctcaagagcaaggtctgtgccttcctcaccctccctgctcagcgctcctgcacccggagcagcaggggccactgaatcctcaccagctcccaagccaaagactaccagtccactgacgccagtgaccgcgcccaaattcccttcctcagccaggcccgagagtcttcacagtccaaactccatgttcaggggtccgaagccccccattgcccccaagcccaggctgactgccccaaacgagtggagagccagtgtgtacctgaatgacagcttgaacaaatgcagcaacgggcggctgccctgtgtagacagggggcttgatgaggggccccggtccatcccaaagtgctctgagtcggagaccgacgaggattacatcgtggtccccagggttcc

SEQ ID NO: 150864 - DNA, 443 bp, Homo sapiens
gaaggaaagcaaaaagaaaaggcaggtaagctataagtctacctttcttcgtggttcaggatacatagtcctcctgtgcaaattactcaccatcttcctgcacccagctattaccagacacctcagctgatagaaaaatgcaagttagctcactgcaacctcagcactatcagtactgcacaaagccctcttaacacacagcccaagcaccattctgtcaaatcccgagcaaacgtttgtttcctggcagtcagctcctctcttgctgatttgcttgttgcacccttgcaacatactttcctgctttgtctaataaatctgcctttctttacctacaactgtattgatgaattctttttaccacctgcgtgacagcgggccccagagagtcgctacccacgacaggcaatggaaaagggtgctatgcttttctttgtggaagg

SEQ ID NO: 150865 - DNA, 190 bp, Homo sapiens
atacagtgaattcttggaacttgcaacgggtgtgtattatgaaatttaggatctaagctagcaagactttgctatacggctttgagaaggtatatggttgtcgcaaaaatctcaggagactctgcaagataagaaaatctcaaagcagaggcaagttcagagacttgctttcctactcctgaatcttcat

SEQ ID NO: 150866 - DNA, 551 bp, Homo sapiens
aaattgaaactctgaagttataacaaatgagcagcagattttcaaaattaacttttttgcacattttagaaatgtttacctcaaccctcaattcccaagaaaccattatatttcttcagccttttgcccagaagttcttaggatctttcctaggaactgccacaatggcaaattaacataaagttttgtattgcattgacaccaaagacctttcctttgccctggttcctggttgaaacaagcgtgaaataccatgtctgatgacatgccatggcagcatgaaggcttaggcccaagggataccaaggcaggaggattgcttgaggccaggagttcaagaccagcctgggcaatatagtgagaccctgtctctacgaaaaacacaaaaattagctgcacatggttatgcacacctgtagttctagcaactcaggtggctgaggcaagaggattccttgagcccaggaattcaaggctgcagtgagctatgatcacaccactgcacaccagtctgtgcaacagagtgagaacctgtctctaaatatataaat

SEQ ID NO: 150867 - DNA, 377 bp, Homo sapiens
atgttgtccccactgcctgagcctacggtgttggttccaccttggaatttttatatttgctctgaatttcccactcagagtatcccagaaatggccagccctaggaataaaagaagcaagctagtccatcatatctgtaattgattactttgcctctgctcgcatatccccagtgatggggagcttccttcctccccaggtagcctgttctaaggaagcttaataactaataattagcctttttcttttattttctttctttatttttatttagatgtagtctcactctgtcgcctaggctggagtgcagtgttgtgatctcagctcactgcaacctccgcctcttgggttcaagcaattctcctgcctcagcctcc

SEQ ID NO: 150868 - DNA, 783 bp, Homo sapiens
gtgtgactgaagcttagcaagtgagtgggaaattagtttagatttaggatgtagaagtcagcattttccgattcatatgagaaaatgatagtgctgagatttcaggcgtgagccactgcacccagccccaaaccaagtttttatagcagcaagaatagatactctggtatggtcagcgtctaaagattttacaaacaatatctcttcttttagtttgcagtcattattgaaataacaaacatgtcctattgtcaggccttactctcagtaactgatttcattgatctgaataggaaacttacttgattaatcagctactctttggtattacctgacatctcattaatgcatctttgaattgaattattgctcaataggagtgattgtgaaatagtggtaatgtgttacatcactattgaagttaccgtctctcatgtgagtcttgtgacagtttcagcaagtacaaagcactatggggttttacaatgatttctgtaatcttttctttttttctttttttttttttttttgagacagagtctcgctgtgttagccaggctggagtgcagtggcatgatctcacctcactgcaagctccgtctccgggactcaagtgattcttctgcctcagcctcccgagtagctgggattacaggcgtgtgccaccacgcccggctaactttgtatttttagtagagacggggtttcaccatgttggccagaccggtctcaaactcccgacctcaggtgatgcgcctgcctcggcctcccaaattgctggga

SEQ ID NO: 150869 - DNA, 685 bp, Homo sapiens
cagaagaatcacttgaacccaagaggcggaggttgcaatgagcccagatcgtgccactgcactccagcctgggcgacagagcgagactccattccccgccccctaaaaaagaaggtcataactgtttttgtgagagtgtgtaggagtgagagtttatatttggagaatatgagatgtaagatatgtataccagaagaattggggttatatatttgtgatttgggttgtgaagatgtattttccatgtgttttctcagatgaatgttggcgatttgtatttgtctaatgtttggcagatttggaagaattatcttgtgcacatgggcaataacagagaaagtgcttgtgtctattttgtggatgtacgctctgtttggtttacgtatttgggaaatgtaggaagaccatttgtatactcggggcatgttgcatggtgatgcgtgcttcttttcatgattttcagggggtgtgtatggctatttcaatgtgtgagggcagatccatgtctactgggggactggtaggatgaatgtgtgcagttatgaggtggagtttatatgattctgtgtcttggaagatggaggagttatttctgtgtgagcatttggaagtgtgattacatatgtgcaggtattgtggaactgtatgtggaggtagccacctgcgtctacccgagttccaattc

SEQ ID NO: 150870 - DNA, 955 bp, Homo sapiens
  misc_feature (235)..(235): n is a, c, g, or t
  misc_feature (237)..(237): n is a, c, g, or t
  misc_feature (902)..(902): n is a, c, g, or t
gctagcatgagacgactctcttaatcctccaccgctacacttttaagataaaattggctgcagcattggcaagatgtcgaatcaagcatgatgccctttcaatttaccacatccttccagaaacagttaggaaacaggaactaagggcctccactttaccactttatgcttggataaatacttgtaaaatcagccctgaagaagtttataataatttgaagagaagaggctatantnaagtcaaatctgtattgcatattgatgataaagtctttgctgtggatcaacattgctatgatgtcttaatttttccatctcatcttaaaaatgatcttataaatatagatcttttcaaagattacaaacttatatttcaggacaaatctcgaagtcttgctgtccattctgtaaaggctttattaaatatggatgatgatgtcttaatggtcaatacaggttcatggtacacagttgcccacatgtcaattttaacaaataataatacctcaaaagtatttgtgtgtggagtacaatcacaagctaaggatcctgacttgaagacccttttcacaaaaataggatgtaaaagtatgtaaaaatatttcttcatttggtgattattgttctgcaagattttagaaacgttaaaaagttttaatttattagtttttttgtaatgtaaaagctctatatgtgaactaatatcttaaaatccttactaatctatgtcttatcaggctgtccttgttgcttaatttggttaaacaactgtgggttaaattaatttcttggtactttgtaatactgtttgacatttagctcacataatttgaggctcaaacatttaaagtagaaatgtatcatttaataaataagaatgattatcatttaataaatactgntacgagccggccccctcctcccctcgatttgtaatatttacagatataaggat

SEQ ID NO: 150871 - DNA, 1208 bp, Homo sapiens
  misc_feature (488)..(488): n is a, c, g, or t
  misc_feature (490)..(490): n is a, c, g, or t
  misc_feature (1155)..(1155): n is a, c, g, or t
acacatgggaaaaatgaggaacagacaagttaaagcaggggtccccaaccccagggctgcagaccagtacctgtctgtggcctgttaggaactgggcagcacagcacgagcatgggacattcagaactgggaaggacttaatacagactcatgaaagttctttaatcttatcaagactatactgttgccatctgtgatactgataactagcctataatgagtgcctgctacgtgccaggcactgcgctaagaattttgcacacatgattgataatcactacattaataacaagttttaagataaaattggctgcagcattggcaagatgtcgaatcaagcatgatgccctttcaatttaccacatccttccagaaacagttaggaaacaggaactaagggcctccactttaccactttatgcttggataaatacttgtaaaatcagccctgaagaagtttataataatttgaagagaagaggctatantnaagtcaaatctgtattgcatattgatgataaagtctttgctgtggatcaacattgctatgatgtcttaatttttccatctcatcttaaaaatgatcttataaatatagatcttttcaaagattacaaacttatatttcaggacaaatctcgaagtcttgctgtccattctgtaaaggctttattaaatatggatgatgatgtcttaatggtcaatacaggttcatggtacacagttgcccacatgtcaattttaacaaataataatacctcaaaagtatttgtgtgtggagtacaatcacaagctaaggatcctgacttgaagacccttttcacaaaaataggatgtaaaagtatgtaaaaatatttcttcatttggtgattattgttctgcaagattttagaaacgttaaaaagttttaatttattagtttttttgtaatgtaaaagctctatatgtgaactaatatcttaaaatccttactaatctatgtcttatcaggctgtccttgttgcttaatttggttaaacaactgtgggttaaattaatttcttggtactttgtaatactgtttgacatttagctcacataatttgaggctcaaacatttaaagtagaaatgtatcatttaataaataagaatgattatcatttaataaatactgntacgagccggccccctcctcccctcgatttgtaatatttacagatataaggat

SEQ ID NO: 150872 - DNA, 349 bp, Homo sapiens
ggcctgtgcatcacctgacctagaagcatgtggacaactgagagtggagaggcagttcctgcaaggagcaaggcgtgcagtgtagatgaagaaccagaagcctgggttcactgcatctcatctgccttgcctggctaggctgaaagctccaggggcagactgagcctgcccaggctctccaggaacagctgatgattccttgggtgtcttgcttagtgctcctggcttgacttgacctggtcttcttggctcagaagcccctgcttattcgtgggtttctccagggggccggggaggaggtcgcacagcctgagatgatgtatgcgtgcacttgtcgtatcccagggtt

SEQ ID NO: 150873 - DNA, 341 bp, Homo sapiens
cgggaggagtcagtagtactgcagaactacagcctgagtaggggggatgtgcagctgaaaggtaacagattcatgcattcattccttcactcatgattcttttccttcatccagctaggaggtaattattcagaggctgttatgagccaggcatgggtcaaaacagaaaaatcagctcgactcagtgagagcccaatcttcccattccaggaagcctagcagatggaggattctacccccaccagcaaggtccaggcttaaagcaagtgcaagggtcacctcaaatctttctttacaaggtgaatgttaaacttcaagtgtgggtactactgaggtgtaag

SEQ ID NO: 150874 - DNA, 662 bp, Homo sapiens
cggtgaaatcttgtttgttactgtcattcccattccttttcgtttagaatcagaataaagttgtatttcaaatatctaaaaacaaaaaaaaaaaaaaaaaaaaaaaaaaaaaaaaaaaaaaacaaaacaaaaaaaaaaaaaaaaaaaaaggaaaaaaaaaaaaaaaaaaagaaaaaaaaaaaaaaaaaaaaaaaaaagaagaacacaaagagaagcggagacctaaacaacaacacaagcgacacaagagccaagccacgccacacacacacacagacgcgtcgacaacccacacggcgccaccacccgaacctcccgccacaaacacaacacacaagcaggcgcgcggcgaaaacagcgaacaaaccacgcagaagcagacacaacgaagcacgagcgacgacacaacctaacaaaagacacacccaagacaacaaagaaggagaaagaccaacaaagaacgagcaaacacacacgaccacaccacggcaccacacgagcacaccagacacaagaacaaacaaacaagcacgaaccccacccacgcacaggcaaccacaacacaacaacagaccgacgaagcgcacgcagacaaaacacaacacaacaagaacaaaagacaacaaacaaacagacaaaccgccgaacaaacaagcaagaac

SEQ ID NO: 150875 - DNA, 272 bp, Homo sapiens
aatagggtctatgtagacatcaaatatgtttgtttaaatcaacactcaaatccacactggcctgtaggtgtggattccaaactcaagtgactgccttaatattcttttaatctgccctgatttcttctgtttttgaaacgtaaaatatgaccttcaagtttcacctcactgctttgattagtcacacggtatccatgttattagcaagtatgagttgtgctggagaaaaggctgcggcctaaggactctttcagacgcatgggctgtgtctg

SEQ ID NO: 150876 - DNA, 336 bp, Homo sapiens
tcatcgagctcggtaccggagtggagagagaagggggagtggagagagaaggagaaaaggaaaacaggtagaacaaggagaaggaaacgagcatgcaggcaggcaggaagtcaagcaggtaggctgggttgtttccatatgggactctttctatgcaaagacaaatatttcaatgattctgagttttactttggctcatgatatgaaattggtgcatttcataggtatgtgagtatctgagaggtgaatgagtgttcttagacacttgggcagcagctgaagctcacctggcattcctacttgatgctctcatagttcaagtctcaactatggtga

SEQ ID NO: 150877 - DNA, 287 bp, Homo sapiens
gaacacaacgtgtagttatacagaagttggcttcgtttagcttgcttctgccggggccagtgtacccagaagaaccctgggactattttggaaaggcagacttggggttgttgttggactgggtgatttgaaggtggaattagggaaatgggaccagatctgggttggatgtggccaggaggcagaaacaattcagtgattgggtatccaacaacttttatctaggaggtaggagattaaagtagagttagagtggccatgcagtaaagaatttgcaatcatacatg

SEQ ID NO: 150878 - DNA, 505 bp, Homo sapiens
acagtgtgttctatctctccttaggataagatacagaggggaaggacttcggctgtctatttgcaatacgtgtgcaacctctggaacatccatccctaatctccttgaagcccttcattcattattaattgaagataacgaaataaaaaatctccaccagaagcaaaatctataaatgcaataatagtaacctattttatatgatagatgactttatatttttcatatttaactgtaaattgtgaaacaaaactaaaaagtgaagatgagaaaatagtagaaataaaatagaaatctacacttaaaagtaaatgtacaaaaagaggctatcaatgaattcttctctatatgttctttgcatgtctttcactcctgggagatttgggcactccggtaaaatttctcttacgtttatgtttcacaagacaattaattctactctaatctcagtgtaatgatttcactcttctgttaaataaaaggaaactctactttttgatatttt

SEQ ID NO: 150879 - DNA, 498 bp, Homo sapiens
ctgtaagtttgtgaaaaagtacaaaaatggtgatctcttttatcatacaaataatttctttttaatagaatgttttttctaattaatgtattaatgtacttttcattcaacacattcgcttacatttgaactattttatgaatgaatgtttaattgcataggtgaagattactagtcacgggcattttactaactgattctcattaggcataggttcatgtgatgtcaaggagctgtgttttgtttggtaaaagtaataaaatagcacaagaatgaatgcaagcactgaagcacgatggaggcgcctatcatgacttgtctatgatttacatcactcgttgtctttccaggttgcttatcatcctgataattgtcatcagcattgtttgggtccttctagcacagtttcacaaaatgggcaactcttccgttaggtagagataattccatttgagcctttaattgcatctgtcttccagcttcttcttttggaagagt

SEQ ID NO: 150880 - DNA, 847 bp, Homo sapiens
cagatgttcagatgggtccggagtttcttccttctggtgggttcgtggctgacatcaggagtgaagctgcatccctttgtgctagacacaaaagttctccaagtccccacccatcccagaagcccagcaggcttcacctttcactggcactggcttgactttgcggcacctatcctggacactccggcaacccagaaggagctcgtcccagacaaccaagaggaaaaggggaagccagaaagagacagagacccgccatcgttgccaacaactcggtgaagagggaatggcgatccaagcaggggacccagcctctgatcaagcccagcaggcaccagcctgctgcccggagtgcggggccctccgagcccgtgcccacccagaacccatgccggactgcaagcaccgcgcagccccagctctcgtctgcgcctctccctccacacctccctggagcagagggagccggctccagcctccgccagccccagaaaggggaccccacagcgcagtggtgggctgaagggctcttcaagcacggccagagcggacgccgaggccgaggaggccccgagagctagcaagggctgctagcacattgtcacctctcagaagtccaattctcttaccatctgcttagagtttttcacttctttgtggccctgggaactctttttcatatatgagttctggaatatttctggtgataatcttgacattgtacatttggttttggtttattgtggagggagtgaagtcagcatgcttctatgctgccattttggaactggaagtcctcctgacccacagaaacagaaataataaatgtgtattccttaaaaaaaaa

SEQ ID NO: 150881 - DNA, 420 bp, Homo sapiens
ctgcctcagcctcccgagtagctgggattacaggcacctgccaccacgcccggctaatttttgtatttttagtagagacggggtttccctgtgttggccaggctggtctctaactcctgaccttagttgatccacccaccttggcctcccaaagtgctgggattacagctgtgagccaccgcgcccagctgtaactcattttcaatgtgtattctgcccgtttcatccacaaaggtggccaccaccctgcacatgggatttagtattcttttttttttaatcagctaatgaaatgaccatttaacagacatgtactgtttaaaaaaagaaaacaaaaaaagaaatgaccagaaagcacttttttaaaacatacgttatgctgtttatataaaattcaaaagcattgcattgtcatttatt

SEQ ID NO: 150882 - DNA, 351 bp, Homo sapiens
agtcttaatggtgaaagtaaatttaaaatttttattttggccaggtgtgttggttcacacctctaatcccaggtacttgggaggctgaggcaggaggcaggagaatcacttgaacccagaaggcggaggttgcagtgagctgaaattgtaccactgcactccagcccaggtgacagagcaagattccatctaaaaagaaagaacatttcaaatctttaatatgcggctatgcatgaagacatgagctcttatcaggtggtatttaataggactttgatttcctttagggcactaagcaaaagcactagtagttctttgaatttgggacttaaaggcaagaaggtgagttag

SEQ ID NO: 150883 - DNA, 516 bp, Homo sapiens
atttttttgctttttaatagccgttctcactggcatgagattgtatctcgtggtttttctttgcatttctccaataattattgataggcattttattatatgtgtgttagccacatgtttgtcttcttttgaaaagcatctttttcaagttttttgtctgctttttagtgaggtcttttttttcttgtaaacttaagatttttatgaattctggacattagacctttgttagaagcatagtttgcaaatatttcctattattctgttggttctctgttttctgtgttgatagtttcctttgctgtgaagaagctctttagtttaattaggtccaatttgtcaatttttggtttttttgcagttgctttttgtatcttcaattatgaattctctgctagattctatgtctagaatgacatttcctaagttatcttccagggttttttataatgttaaaataaacatttcagtctttaatcttgagttgatttttgtatatggtgtaataaaggggtc

SEQ ID NO: 150884 - DNA, 178 bp, Homo sapiens
agaggatccccttctttgctcatcctatctcactgttctcccttctgctttgtgtggtcatctcattaaatcaattttagaaattattagaaataaaataattttgtttcccaagttttcctgtgaaagcaattctaatatttggggtctccttttaaacaggttcgtctcaatttgg

SEQ ID NO: 150885 - DNA, 843 bp, Homo sapiens
  misc_feature (64)..(64): n is a, c, g, or t
  misc_feature (75)..(75): n is a, c, g, or t
  misc_feature (111)..(111): n is a, c, g, or t
taaaaggagagcaggatcaattaaaaaaaaaaaaaaaaagctagcggcactgatctcttaattncaccgctacanctactgtggcctagaagtaacatgcaccacttcttnaactgggcattgaggtattactgtccaagaatcccttcaactaagatatcacatagaaattgaaccactcttgggaacagatagtgaggacgagaaaagaaaaaaaaagaagaaggaaattgaagcactgacatatgagggaatagttttgtaatgatttaataattactacaagcaccacttgaggttatgctggaactattggcgtaagaatcttattaccagggattccccggccagatggccaaataggaacagctccagtctgcagctcccagtgagaccaaggcagaagtagtgcctggaactccagcaagacagaactgttcactccaatggaaagacggctgaagccagggagccaagaggtcttctcagtggatcccaccaccatggagcccagcaagctaaaatccactggcttgaaattcttgctgccagcagagcagtctgaagtcaacctgggatactcgagcttcgtagagggaggggtgtctgctattactgaggcttgagtaggcagtttgcccctcacaatgtaaacaaagcctccaggaagttcagactaggtggagcccactgcagcgacaaaaatcctctgtttccacactgcctctctagattcctcctctctgagcagggcatccctaaaagaaaggcagcagccgtagtcaggggcttatagatgaaacttccatcttcctgagacagagcccttggggaaagggacgg

SEQ ID NO: 150886 - DNA, 363 bp, Homo sapiens
aacgggtgatgaagaagccatggaagcaagtagtggtgatggttttacaaacacggtgaacgtagtaaatgccatcgaattacacactttaaaatggttataatgatatattttgtatgtattttaccacaagaaaaaaaatgtttttaaaaaattgcgaggactttgggaaggacacaatacctggtaacaaacacctgagggcctatccgacgagggtccaaggacaggacctgtcctgcaagttcccagagtatggaacctcccggaagccaagctccagcatcacagcacacatcacagccagcattccctgcacacctgccacggtcaggccagaagctttcatcagcattagaggat

SEQ ID NO: 150887 - DNA, 802 bp, Homo sapiens
  misc_feature (802)..(802): n is a, c, g, or t
atttgaagctggcttgcatgaaatgtatagtgcttatgcacagattagaacctcttcccagaacctgagggtggagatgtatatcctcatttaaaggaaatgaaggttgttatagcatttctttgcagtttgtccccaaatttggcgtaattttgatttgggaaggatgaccttgacatgaagtcctgtctttcttttttttgtttttttttttcgggtgggggacggagtctctctccgtcgcccaggctggagtgtagtggcgcgatcttggctcactgcaacctctgcctcccgggttcaagcgattctcctgcctcaccctctctactaaaatacaaaaaattagccggaaaaaaaaaaaaaaaaaaaaaaaaaaaaaaaaaaaaaaaaaaaaaaaaaaaaaaaaaaaaaggggggaaaaaaaaaaacgccaccagtggggggacaaaacaatataaacacaaacagagccgtcgttgtaacacacaggcggcgccaccacataaatcggacaactattacttcacgcatccatgaagacgaggacacgtgtataaacacacggccgcggcgagggttaaaaccgacgctcggtcaaacacatcgacgacgacaccaactaatctcgggcggagcacaccacatcggcggcaaccacaccacagacagaatatagaacgccccaggcgggcataaacaaacaagtcaccgcgaggagaatgcgtaaaacacgaatgggatatacagtagcgcgcagcaatgacgcgtcgccggcagctatcgagacaatcaccaacgn

SEQ ID NO: 150888 - DNA, 122 bp, Homo sapiens
ttgagggacatcagttctctgaagatttctgccactcacctgttcctgaatatgtcaaatgacataagacatttaacatttactgagcacatatatatacaccagacccccctccacacaca

SEQ ID NO: 150889 - DNA, 403 bp, Homo sapiens
atcacgtaatgagtgcttactcgggcaggtactagttcacacatttttctcctttactactcctgtctaccctatgcataggggctctacccccacctaagaggtaaggaaataggctcaggggcattagggaatatagattcagatcctgactataatacattctagccaagtgtgtgtaactcttccaagcccaactgctgtgctctagaccctgtttattggcacacttactattggcttacagctctttgctgttttcttccctttctccattcctacccatgattctgggattgtggcatattcagtctttcctggcttcaagacagagactattaccaaaaccatagtgtattcaataaatgttgaaagactcaatggatgaatccaaagtcagcag

SEQ ID NO: 150890 - DNA, 413 bp, Homo sapiens
tattcctggagctcctactatgtgtgaagcactgccccaccctggaaatacaatgagtatgaggaggatctgcctgctaggaactcccaggccacccccttttcttcctactttatgagccttggatttatgtccaccctaccagatccttggaaaagaaaatgtttacattgcaagacactgtagggctatggacaagggcaggcccctgggggggacacatttacccacacctgccacaggaaagaacacaagcctatctgttttttccacacttcagatgaaaccatctccacctcatatggcctaagcaaggtagtagtgtgggtttgtggtgagtggggatgcacaaaggaatgctctagtcgatataggctgaagccaagctccgttcctacttggtctcagaaaaa

SEQ ID NO: 150891 - DNA, 340 bp, Homo sapiens
gaccacttgatctgctgctgactcacggcgcactctccctgccttgcttgggtcctgggccatgtaggggattgggttccagaaggggagctagggaccctggttctaggtggcctggacttcagaagctgcccctgaagttcggggatggatccgcagcctctgtgtgtgggtggggattttagcatgcactgggccatgctcaggacctcgcacaggtctggaggggaaccagggcctcggcatggcgtctgtggcctgaaaggaataaatccatccttgcttcaaaggctcccagagtgttcaggtcttccacgtcaacccacatactttggcaggg

SEQ ID NO: 150892 - DNA, 588 bp, Homo sapiens
gaaccgaggtcatgcgtacaagatggaatggtttgtaaccatgctcgggtagaaactgacatagtaagttaagcacatttgttggtgcctttagtccccgcctccaaatacatactctctgcaacaactgcgatttcctaagaagaatgtttctcctacttttcaatctttggttcaacattgccttgagaattcaatatgaaacaaaatctgcatttataacatattcacccatttaaacagacatttcaagtgacttttctggtagtaaaactagtgatggttaaatcgcaagcaccacattttcaggtttagtagaaaatttcaatgtgcaaatttaaaaactttaacctggctgggcgcggtggctcatgcctataatcccagcactttgggaggctgaggcgggcagatcacaaggtcagatcaagaccatcctggctgacacggtgaaaccccgtctctactaaaaatacaaaaaattagccaggcgtggtggcgggcgcctgtagtcccagctactcggaaggctgaagtgattctgatggtgggactacccggatctgggaagacccagtggggcctgga

SEQ ID NO: 150893 - DNA, 553 bp, Homo sapiens
ggccaagaagacgatgggagatctggcccataatgcttcactgataggttttgtttatttccccatgaactcactgtaaagcagtaaaatgctgggattgttctgctaacttacggccaacaaaaaattcatcctcatggagagccctcgtcctttgggggtggtgctggctcctgccactgccctgcaagtgtctctaatgtgaggtcatcagggtttagggccaatcagtatgaattcctccgaagctattttgaaggcagatttgagaccacaagagactttttgtccttccctcagtagcattcttgatacctggttttatagcatacataataactagggccattacctcttttttttctttttttgagacggagttttgcttttgttacccaggctggagtgcaatggcatgatctcggctcaccctaccctccacctccaggaggctgaggcaggagaatcgcttgaacttgggaggtggaggttgcagtgagctgagatcatgccactgcactctagcccaggcgacagtgcgagactctcccaa

SEQ ID NO: 150894 - DNA, 6281 bp, Homo sapiens
cttgcgaggtgagcatttccaaggctgtgtgctcgtggggtggggggacacacgatgaccttctcctcctcaggaagacctaagagggaagagcaaaccccagcgagatcccccctgtgctgatgattttcagggacttgttggcaactcagcgagggttgccatagcttttttatgtagggtgaccagaaccggctgaaactggtttgaggcagatcagctcctgaacacaatgcagtcactgagctactacagtaggatagcagcttcctcccttcatggcagccaaaagcagaggagcttgcaggaaggtaccatccctacacagtatgtgaatgcacacttagacaccacacagcactggtacgtgactaatggagccctaaaagattctgggtagagaagatggaaaaaaaggtgcaggtttgcagggtctgagattacttgggcttttcctgcctttttcttttgcttaagggatggacaaggagctgagatttatgacccttattagagaaaaaaatgtgccttgctagggtggggacacttggttgatgcagtctctctctctctttctcggtgtttataacaaaacaaaaccaaaatgaactgaggggtttgtaatggtagtttgtttgttgctggagaatgctactttgcatgctttttttctcttgcagggtatgttctgtcttgtgctttttcttttagaagctactaaagggtgttggggatgcttctgactattatgaaggccaaaaggcctgttgactggggctgcttttaaccctttcctatttgctgagaatgcagccgtgtgacagtaactg[450 bp omitted]cgatctccagtgctgaagagtttgatgacgacgagaagattgaggtggatgacccccctgacaaggaggacatgcgatcaagcttcaggtcgaatgtgttgacggggtcggctccccagcaggactacgataagctgaaggcactcggaggggaaaactccagcaaaactggactctctacgtcaggcaatgtggagaaaaacaaagctgttaagagagaaacagaagccagttctataaacctgagtgtttatgaaccttttaaagtcagaaaagcagaggataaattgaaggaaagctctgacaaggtgctggaaaacagagtcctagatgggaagctgagctccgagaagaatgacaccagcctccccagcgttgcgccatcaaagacaaagtcgtcctccaagctctcgtcctgcatcgctgccatcgcggctctcagcgctaaaaaggcggcttcagactcctgcaaagaaccagtggccaattcgagggaatcctccccgttaccaaaagaagtaaatgacagtccgagagccgctgacaagtctcctgaatcccagaatctcatcgacgggaccaaaaaaccatccctgaagcaaccggatagtcccagaagcatctcaagtgagaacagcagcaaaggatccccgtcctctcccgcagggtccacaccagcaatccccaaagtccgcataaaaaccattaagacatcttctggggaaatcaagagaacagtgaccagggtattgccagaagtggatcttgactctggaaagaaaccttccgagcagacagcgtccgtgatggcctctgtgacatcccttctgtcgtctccagcatcagccgccgtcctttcctctccccccagggcgcctctccagtctgcggtcgtgaccaatgcagtttcccctgcagagctcacccccaaacaggtcacaatcaagcctgtggctactgctttcctcccagtgtctgctgtgaagacggcaggatcccaagtcattaatttgaagctcgctaacaacaccacggtgaaagccacggtcatatctgctgcctctgtccagagtgccagcagcgccatcattaaagctgccaacgccatccagcagcaaactgtcgtggtgccggcatccagcctggccaatgccaaactcgtgccaaagactgtgcaccttgccaaccttaaccttttgcctcagggtgcccaggccacctctgaactccgccaagtgctaaccaaacctcagcaacaaataaagcaggcaataatcaatgcagcagcctcgcaaccccccaaaaaggtgtctcgagtccaggtggtgtcgtccttgcagagttctgtggtggaagctttcaacaaggtgctgagcagtgtcaatccagtccctgtttacatcccaaacctcagtcctcccgccaatgcagggatcacgttaccgacgcgtgggtacaagtgcttggagtgtggggactcctttgcacttgaaaagagtctgacccagcactacgacagacggagcgtgcgcatcgaagtaacgtgcaaccattgtacaaagaacctcgttttttacaacaaatgcagcctcctttcccatgcccgtgggcataaggagaaaggggtggtaatgcaatgctcccacttaattttaaagccagtcccagcagatcaaatgatagtttctccgtcaagcaatacttccacttcaacttccactcttcagagccctgtgggagctggcacacacactgtcacaaaaattcagtctggcataactgggacagtcatatcggctccttcaagcactcccatcaccccagccatgcccctagatgaagacccctccaaactgtgtagacatagtctaaaatgtttggagtgtaatgaagtcttccaggacgagacatcactggctacacatttccagcaggctgcagatacgagtggacaaaagacttgcactatctgccagatgctgcttcctaaccagtgcagttatgcatcacaccagagaatccatcagcacaaatctccctacacctgccctgagtgtggggccatctgcaggtcggtgcacttccagacccacgtcaccaagaactgtctgcactacacgaggagagttggttttcgatgtgtgcattgcaatgttgtgtactctgatgtggctgctctgaagtctcacattcaaggttctcactgtgaagtcttctacaagtgtcctatttgtccaatggcgtttaagtctgccccaagcacacattcccacgcctacacacagcatcctggcatcaagataggagaaccaaaaataatatataagtgttccatgtgcgacactgtgttcaccctgcaaaccttgctgtatcgccactttgaccaacacattgaaaaccagaaggtgtctgttttcaagtgtccagactgttctcttttatatgcacagaagcaacttatgatggaccatatcaagtctatgcatggaacattgaaaagtattgaagggcctccaaacttgggtataaacttgcctttgagcattaagcctgcaactcaaaattcagcaaatcagaacaaagaggacaccaaatccatgaatgggaaagagaaattggaaaagaaatctccatctcctgtgaaaaaatcaatggaaaccaagaaagtggccagtcctgggtggacgtgttgggagtgtgactgcctgttcatgcagagagatgtgtacatatcccacgtgaggaaggagcacgggaagcaaatgaagaaacacccctgccgccagtgtgacaagtctttcagctcgtcccacagcctgtgccggcacaaccggatcaagcacaaaggcatcaggaaagtgtacgcctgctcgcactgcccagactccagacgtacctttaccaaacgtttgatgctggagaagcacgtccagctgatgcatggcatcaaggaccctgacctgaaagaaatgacagatgccaccaatgaggaggaaacagaaataaaagaagacactaaggtccccagtcccaagcggaagttggaagaaccagttctggagttcaggcctccccgaggagcaatcactcaaccactgaaaaagctgaaaatcaatgtttttaaggttcacaagtgtgccgtgtgtggcttcaccaccgaaaacctgctgcaattccacgaacacatccctcagcacaaatcggatggttcttcctaccagtgccgggagtgtggcctctgctacacgtctcacgtctctctgtccaggcacctcttcatcgtacacaagttaaaggaacctcagccagtgtccaagcaaaatggggctggggaagataaccaacaggagaacaaacccagccacgaggatgaatcccctgatggcgccgtgtcagacagaaagtgcaaagtgtgcgcaaaaacttttgaaactgaagctgccttaaatactcacatgcggacacacggcatggccttcatcaaatccaaaaggatgagctcagccgagaaatagccacagatgctccatgaggaaaatccctgtccacattggaataaaaaagacatttttgttacaaagtttgcagtataatagagttaacagtactgtctaggctgttgcaatatattctctttcaatgtaccttccttcacctcgtcgtatatatcctcgataagtattaaaacagtatttgagtttaaaagagtttgtatatatttaaatgaataactttttatactctttgttacatgtttgtatcagtatttagtggaaaaccatttgagttgttttgggttagaatttttctttttgtactgtttctttaaaacagagttcttagtaacaggggcagttcctgaattcaaataaaccattttgtatgtttggattttgaatgggttaactaattacaggctaaaataatgccttttttagtgtttttaatttttagaattcactacataaattgtaagtaattgtgggtctcaaaaacactaggaacttttaagtgtcttagcacttcctcgatgtgcctgccctgagggagtgagttcacatttgagacaactgcactccagtgtggacgtgcctttgtcttcaggccatgccgaagggtgtttaaagcagtcttgcaggtcgctcctttcccagccgtggataaaaactgaagctaggaatctaataaggaatgctgatttcctcagttccattttgaggaatggggaaggctattctaaagaaaaaaatgggatttgttttctcggcagatctgcaaggctggctttaagagcacaaggagggaaagtaacgaaagggctggactactataaaagttacaaatacgtagttagaccaatagatttatatagtcaggtttttgtcatgtaatttattaactaactattacagaaacacagctaagaatatcaagtatttctctggctcttgacagaaaaaaatcagttgacttaaccctttgctgtcaaaagagttggcgtttcctgttctgggtgctactgccaaacgttatggtacttagagtcgggatgcacaacttcaaccaccgacttatcaatgcagccgcctgtgtattgcaattggccgttaccttaagcactgagccacccgggtttagttcagccatttcaagaagtatatttaacgtcggtagttctgctttattaaaatgcagcagaggtactcttctgtcccttccgtttatagttctctgagagagttctattttttggttttgttttgtgttttcttttgcattttgtatcttgtatttatccctgaacatgttttgtaccttttttttttttttttttaagaaaaggaattcttttgtgtatatatagatacttgcatgatatactgtagtcaatgttcggttcctcaaaaggtcttgctgctgtcaggtgttatgcactccatccatcataactgtatgaaacacatttcatatgtaaataaacgtgggacatttggcccttgt

SEQ ID NO: 150895 - DNA, 209 bp, Homo sapiens
ttctcaattgtattattgttttggcatagagtttttggattgggttgtcacacttaaatatgaaaataaaaaaaaaaggagcattttcttgcatatcccaccaggaggctgaggcaggagaatcgcttgaacttgggaggtggaggttgcagtgagctgagatcatgccactgcactctagcccaggcgacagtgcgagactctcccaa

SEQ ID NO: 150896 - DNA, 5950 bp, Homo sapiens
  misc_feature (1)..(1): n is a, c, g, or t
  misc_feature (3)..(4): n is a, c, g, or t
  misc_feature (9)..(11): n is a, c, g, or t
  misc_feature (16)..(16): n is a, c, g, or t
ngnncgaannngccangtttcaatctggccccagtggctttttctctgaaagcaaacgtgtgtcttttacaccagggctttctccccaccccagggggtgtcttccatccttttgtggctcagttgaaggcgaaaagggctccaaaccactaactaaccagaggagagccccttcttccacctccagggagaatttcagatttaatttgtccgaagatagcgtgctctcttcttactcatttgccatcattacgaggaaaacaaaccaccaccttggcttcaagatcctgggtagaggctcacggtcttttcaaccatctttggcgaggccttgcttccttccactcgaggtatgttctgtcttgtgctttttcttttagaagctactaaagggtgttggggatgcttctgactattatgaaggccaaaaggcctgttgactggggctgcttttaaccctttcctatttgctgagaatgcagccgtgtgacagtaactg[450 bp omitted]cgatctccagtgctgaagagtttgatgacgacgagaagattgaggtggatgacccccctgacaaggaggacatgcgatcaagcttcaggtcgaatgtgttgacggggtcggctccccagcaggactacgataagctgaaggcactcggaggggaaaactccagcaaaactggactctctacgtcaggcaatgtggagaaaaacaaagctgttaagagagaaacagaagccagttctataaacctgagtgtttatgaaccttttaaagtcagaaaagcagaggataaattgaaggaaagctctgacaaggtgctggaaaacagagtcctagatgggaagctgagctccgagaagaatgacaccagcctccccagcgttgcgccatcaaagacaaagtcgtcctccaagctctcgtcctgcatcgctgccatcgcggctctcagcgctaaaaaggcggcttcagactcctgcaaagaaccagtggccaattcgagggaatcctccccgttaccaaaagaagtaaatgacagtccgagagccgctgacaagtctcctgaatcccagaatctcatcgacgggaccaaaaaaccatccctgaagcaaccggatagtcccagaagcatctcaagtgagaacagcagcaaaggatccccgtcctctcccgcagggtccacaccagcaatccccaaagtccgcataaaaaccattaagacatcttctggggaaatcaagagaacagtgaccagggtattgccagaagtggatcttgactctggaaagaaaccttccgagcagacagcgtccgtgatggcctctgtgacatcccttctgtcgtctccagcatcagccgccgtcctttcctctccccccagggcgcctctccagtctgcggtcgtgaccaatgcagtttcccctgcagagctcacccccaaacaggtcacaatcaagcctgtggctactgctttcctcccagtgtctgctgtgaagacggcaggatcccaagtcattaatttgaagctcgctaacaacaccacggtgaaagccacggtcatatctgctgcctctgtccagagtgccagcagcgccatcattaaagctgccaacgccatccagcagcaaactgtcgtggtgccggcatccagcctggccaatgccaaactcgtgccaaagactgtgcaccttgccaaccttaaccttttgcctcagggtgcccaggccacctctgaactccgccaagtgctaaccaaacctcagcaacaaataaagcaggcaataatcaatgcagcagcctcgcaaccccccaaaaaggtgtctcgagtccaggtggtgtcgtccttgcagagttctgtggtggaagctttcaacaaggtgctgagcagtgtcaatccagtccctgtttacatcccaaacctcagtcctcccgccaatgcagggatcacgttaccgacgcgtgggtacaagtgcttggagtgtggggactcctttgcacttgaaaagagtctgacccagcactacgacagacggagcgtgcgcatcgaagtaacgtgcaaccattgtacaaagaacctcgttttttacaacaaatgcagcctcctttcccatgcccgtgggcataaggagaaaggggtggtaatgcaatgctcccacttaattttaaagccagtcccagcagatcaaatgatagtttctccgtcaagcaatacttccacttcaacttccactcttcagagccctgtgggagctggcacacacactgtcacaaaaattcagtctggcataactgggacagtcatatcggctccttcaagcactcccatcaccccagccatgcccctagatgaagacccctccaaactgtgtagacatagtctaaaatgtttggagtgtaatgaagtcttccaggacgagacatcactggctacacatttccagcaggctgcagatacgagtggacaaaagacttgcactatctgccagatgctgcttcctaaccagtgcagttatgcatcacaccagagaatccatcagcacaaatctccctacacctgccctgagtgtggggccatctgcaggtcggtgcacttccagacccacgtcaccaagaactgtctgcactacacgaggagagttggttttcgatgtgtgcattgcaatgttgtgtactctgatgtggctgctctgaagtctcacattcaaggttctcactgtgaagtcttctacaagtgtcctatttgtccaatggcgtttaagtctgccccaagcacacattcccacgcctacacacagcatcctggcatcaagataggagaaccaaaaataatatataagtgttccatgtgcgacactgtgttcaccctgcaaaccttgctgtatcgccactttgaccaacacattgaaaaccagaaggtgtctgttttcaagtgtccagactgttctcttttatatgcacagaagcaacttatgatggaccatatcaagtctatgcatggaacattgaaaagtattgaagggcctccaaacttgggtataaacttgcctttgagcattaagcctgcaactcaaaattcagcaaatcagaacaaagaggacaccaaatccatgaatgggaaagagaaattggaaaagaaatctccatctcctgtgaaaaaatcaatggaaaccaagaaagtggccagtcctgggtggacgtgttgggagtgtgactgcctgttcatgcagagagatgtgtacatatcccacgtgaggaaggagcacgggaagcaaatgaagaaacacccctgccgccagtgtgacaagtctttcagctcgtcccacagcctgtgccggcacaaccggatcaagcacaaaggcatcaggaaagtgtacgcctgctcgcactgcccagactccagacgtacctttaccaaacgtttgatgctggagaagcacgtccagctgatgcatggcatcaaggaccctgacctgaaagaaatgacagatgccaccaatgaggaggaaacagaaataaaagaagacactaaggtccccagtcccaagcggaagttggaagaaccagttctggagttcaggcctccccgaggagcaatcactcaaccactgaaaaagctgaaaatcaatgtttttaaggttcacaagtgtgccgtgtgtggcttcaccaccgaaaacctgctgcaattccacgaacacatccctcagcacaaatcggatggttcttcctaccagtgccgggagtgtggcctctgctacacgtctcacgtctctctgtccaggcacctcttcatcgtacacaagttaaaggaacctcagccagtgtccaagcaaaatggggctggggaagataaccaacaggagaacaaacccagccacgaggatgaatcccctgatggcgccgtgtcagacagaaagtgcaaagtgtgcgcaaaaacttttgaaactgaagctgccttaaatactcacatgcggacacacggcatggccttcatcaaatccaaaaggatgagctcagccgagaaatagccacagatgctccatgaggaaaatccctgtccacattggaataaaaaagacatttttgttacaaagtttgcagtataatagagttaacagtactgtctaggctgttgcaatatattctctttcaatgtaccttccttcacctcgtcgtatatatcctcgataagtattaaaacagtatttgagtttaaaagagtttgtatatatttaaatgaataactttttatactctttgttacatgtttgtatcagtatttagtggaaaaccatttgagttgttttgggttagaatttttctttttgtactgtttctttaaaacagagttcttagtaacaggggcagttcctgaattcaaataaaccattttgtatgtttggattttgaatgggttaactaattacaggctaaaataatgccttttttagtgtttttaatttttagaattcactacataaattgtaagtaattgtgggtctcaaaaacactaggaacttttaagtgtcttagcacttcctcgatgtgcctgccctgagggagtgagttcacatttgagacaactgcactccagtgtggacgtgcctttgtcttcaggccatgccgaagggtgtttaaagcagtcttgcaggtcgctcctttcccagccgtggataaaaactgaagctaggaatctaataaggaatgctgatttcctcagttccattttgaggaatggggaaggctattctaaagaaaaaaatgggatttgttttctcggcagatctgcaaggctggctttaagagcacaaggagggaaagtaacgaaagggctggactactataaaagttacaaatacgtagttagaccaatagatttatatagtcaggtttttgtcatgtaatttattaactaactattacagaaacacagctaagaatatcaagtatttctctggctcttgacagaaaaaaatcagttgacttaaccctttgctgtcaaaagagttggcgtttcctgttctgggtgctactgccaaacgttatggtacttagagtcgggatgcacaacttcaaccaccgacttatcaatgcagccgcctgtgtattgcaattggccgttaccttaagcactgagccacccgggtttagttcagccatttcaagaagtatatttaacgtcggtagttctgctttattaaaatgcagcagaggtactcttctgtcccttccgtttatagttctctgagagagttctattttttggttttgttttgtgttttcttttgcattttgtatcttgtatttatccctgaacatgttttgtaccttttttttttttttttttaagaaaaggaattcttttgtgtatatatagatacttgcatgatatactgtagtcaatgttcggttcctcaaaaggtcttgctgctgtcaggtgttatgcactccatccatcataactgtatgaaacacatttcatatgtaaataaacgtgggacatttggcccttgt

SEQ ID NO: 150897 - DNA, 5868 bp, Homo sapiens
  misc_feature (1)..(1): n is a, c, g, or t
  misc_feature (3)..(4): n is a, c, g, or t
  misc_feature (9)..(11): n is a, c, g, or t
  misc_feature (16)..(16): n is a, c, g, or t
ngnncgaannngccangtttcaatctggccccagtggctttttctctgaaagcaaacgtgtgtcttttacaccagggctttctccccaccccagggggtgtcttccatccttttgtggctcagttgaaggcgaaaagggctccaaaccactaactaaccagaggagagccccttcttccacctccagggagaatttcagatttaatttgtccgaagatagcgtgctctcttcttactcatttgccatcattacgaggaaaacaaaccaccaccttggcttcaagatcctgggtagaggctcacggtcttttcaaccatctttggcgaggccttgcttccttccactcgagcctgttgactggggctgcttttaaccctttcctatttgctgagaatgcagccgtgtgacagtaactg[450 bp omitted]cgatctccagtgctgaagagtttgatgacgacgagaagattgaggtggatgacccccctgacaaggaggacatgcgatcaagcttcaggtcgaatgtgttgacggggtcggctccccagcaggactacgataagctgaaggcactcggaggggaaaactccagcaaaactggactctctacgtcaggcaatgtggagaaaaacaaagctgttaagagagaaacagaagccagttctataaacctgagtgtttatgaaccttttaaagtcagaaaagcagaggataaattgaaggaaagctctgacaaggtgctggaaaacagagtcctagatgggaagctgagctccgagaagaatgacaccagcctccccagcgttgcgccatcaaagacaaagtcgtcctccaagctctcgtcctgcatcgctgccatcgcggctctcagcgctaaaaaggcggcttcagactcctgcaaagaaccagtggccaattcgagggaatcctccccgttaccaaaagaagtaaatgacagtccgagagccgctgacaagtctcctgaatcccagaatctcatcgacgggaccaaaaaaccatccctgaagcaaccggatagtcccagaagcatctcaagtgagaacagcagcaaaggatccccgtcctctcccgcagggtccacaccagcaatccccaaagtccgcataaaaaccattaagacatcttctggggaaatcaagagaacagtgaccagggtattgccagaagtggatcttgactctggaaagaaaccttccgagcagacagcgtccgtgatggcctctgtgacatcccttctgtcgtctccagcatcagccgccgtcctttcctctccccccagggcgcctctccagtctgcggtcgtgaccaatgcagtttcccctgcagagctcacccccaaacaggtcacaatcaagcctgtggctactgctttcctcccagtgtctgctgtgaagacggcaggatcccaagtcattaatttgaagctcgctaacaacaccacggtgaaagccacggtcatatctgctgcctctgtccagagtgccagcagcgccatcattaaagctgccaacgccatccagcagcaaactgtcgtggtgccggcatccagcctggccaatgccaaactcgtgccaaagactgtgcaccttgccaaccttaaccttttgcctcagggtgcccaggccacctctgaactccgccaagtgctaaccaaacctcagcaacaaataaagcaggcaataatcaatgcagcagcctcgcaaccccccaaaaaggtgtctcgagtccaggtggtgtcgtccttgcagagttctgtggtggaagctttcaacaaggtgctgagcagtgtcaatccagtccctgtttacatcccaaacctcagtcctcccgccaatgcagggatcacgttaccgacgcgtgggtacaagtgcttggagtgtggggactcctttgcacttgaaaagagtctgacccagcactacgacagacggagcgtgcgcatcgaagtaacgtgcaaccattgtacaaagaacctcgttttttacaacaaatgcagcctcctttcccatgcccgtgggcataaggagaaaggggtggtaatgcaatgctcccacttaattttaaagccagtcccagcagatcaaatgatagtttctccgtcaagcaatacttccacttcaacttccactcttcagagccctgtgggagctggcacacacactgtcacaaaaattcagtctggcataactgggacagtcatatcggctccttcaagcactcccatcaccccagccatgcccctagatgaagacccctccaaactgtgtagacatagtctaaaatgtttggagtgtaatgaagtcttccaggacgagacatcactggctacacatttccagcaggctgcagatacgagtggacaaaagacttgcactatctgccagatgctgcttcctaaccagtgcagttatgcatcacaccagagaatccatcagcacaaatctccctacacctgccctgagtgtggggccatctgcaggtcggtgcacttccagacccacgtcaccaagaactgtctgcactacacgaggagagttggttttcgatgtgtgcattgcaatgttgtgtactctgatgtggctgctctgaagtctcacattcaaggttctcactgtgaagtcttctacaagtgtcctatttgtccaatggcgtttaagtctgccccaagcacacattcccacgcctacacacagcatcctggcatcaagataggagaaccaaaaataatatataagtgttccatgtgcgacactgtgttcaccctgcaaaccttgctgtatcgccactttgaccaacacattgaaaaccagaaggtgtctgttttcaagtgtccagactgttctcttttatatgcacagaagcaacttatgatggaccatatcaagtctatgcatggaacattgaaaagtattgaagggcctccaaacttgggtataaacttgcctttgagcattaagcctgcaactcaaaattcagcaaatcagaacaaagaggacaccaaatccatgaatgggaaagagaaattggaaaagaaatctccatctcctgtgaaaaaatcaatggaaaccaagaaagtggccagtcctgggtggacgtgttgggagtgtgactgcctgttcatgcagagagatgtgtacatatcccacgtgaggaaggagcacgggaagcaaatgaagaaacacccctgccgccagtgtgacaagtctttcagctcgtcccacagcctgtgccggcacaaccggatcaagcacaaaggcatcaggaaagtgtacgcctgctcgcactgcccagactccagacgtacctttaccaaacgtttgatgctggagaagcacgtccagctgatgcatggcatcaaggaccctgacctgaaagaaatgacagatgccaccaatgaggaggaaacagaaataaaagaagacactaaggtccccagtcccaagcggaagttggaagaaccagttctggagttcaggcctccccgaggagcaatcactcaaccactgaaaaagctgaaaatcaatgtttttaaggttcacaagtgtgccgtgtgtggcttcaccaccgaaaacctgctgcaattccacgaacacatccctcagcacaaatcggatggttcttcctaccagtgccgggagtgtggcctctgctacacgtctcacgtctctctgtccaggcacctcttcatcgtacacaagttaaaggaacctcagccagtgtccaagcaaaatggggctggggaagataaccaacaggagaacaaacccagccacgaggatgaatcccctgatggcgccgtgtcagacagaaagtgcaaagtgtgcgcaaaaacttttgaaactgaagctgccttaaatactcacatgcggacacacggcatggccttcatcaaatccaaaaggatgagctcagccgagaaatagccacagatgctccatgaggaaaatccctgtccacattggaataaaaaagacatttttgttacaaagtttgcagtataatagagttaacagtactgtctaggctgttgcaatatattctctttcaatgtaccttccttcacctcgtcgtatatatcctcgataagtattaaaacagtatttgagtttaaaagagtttgtatatatttaaatgaataactttttatactctttgttacatgtttgtatcagtatttagtggaaaaccatttgagttgttttgggttagaatttttctttttgtactgtttctttaaaacagagttcttagtaacaggggcagttcctgaattcaaataaaccattttgtatgtttggattttgaatgggttaactaattacaggctaaaataatgccttttttagtgtttttaatttttagaattcactacataaattgtaagtaattgtgggtctcaaaaacactaggaacttttaagtgtcttagcacttcctcgatgtgcctgccctgagggagtgagttcacatttgagacaactgcactccagtgtggacgtgcctttgtcttcaggccatgccgaagggtgtttaaagcagtcttgcaggtcgctcctttcccagccgtggataaaaactgaagctaggaatctaataaggaatgctgatttcctcagttccattttgaggaatggggaaggctattctaaagaaaaaaatgggatttgttttctcggcagatctgcaaggctggctttaagagcacaaggagggaaagtaacgaaagggctggactactataaaagttacaaatacgtagttagaccaatagatttatatagtcaggtttttgtcatgtaatttattaactaactattacagaaacacagctaagaatatcaagtatttctctggctcttgacagaaaaaaatcagttgacttaaccctttgctgtcaaaagagttggcgtttcctgttctgggtgctactgccaaacgttatggtacttagagtcgggatgcacaacttcaaccaccgacttatcaatgcagccgcctgtgtattgcaattggccgttaccttaagcactgagccacccgggtttagttcagccatttcaagaagtatatttaacgtcggtagttctgctttattaaaatgcagcagaggtactcttctgtcccttccgtttatagttctctgagagagttctattttttggttttgttttgtgttttcttttgcattttgtatcttgtatttatccctgaacatgttttgtaccttttttttttttttttttaagaaaaggaattcttttgtgtatatatagatacttgcatgatatactgtagtcaatgttcggttcctcaaaaggtcttgctgctgtcaggtgttatgcactccatccatcataactgtatgaaacacatttcatatgtaaataaacgtgggacatttggcccttgt

SEQ ID NO: 150898 - DNA, 6787 bp, Homo sapiens
  misc_feature (1)..(1): n is a, c, g, or t
  misc_feature (3)..(4): n is a, c, g, or t
  misc_feature (9)..(11): n is a, c, g, or t
  misc_feature (16)..(16): n is a, c, g, or t
ngnncgaannngccangtttcaatctggccccagtggctttttctctgaaagcaaacgtgtgtcttttacaccagggctttctccccaccccagggggtgtcttccatccttttgtggctcagttgaaggcgaaaagggctccaaaccactaactaaccagaggagagccccttcttccacctccagggagaatttcagatttaatttgtccgaagatagcgtgctctcttcttactcatttgccatcattacgaggaaaacaaaccaccaccttggcttcaagatcctgggtagaggctcacggtcttttcaaccatctttggcgaggccttgcttccttccactcgaggtatgttctgtcttgtgctttttcttttagaagctactaaagggtgttggggatgcttctgactattatgaaggccaaaaggcctgttgactggggctgcttttaaccctttcctatttgctgagaatgcagccgtgtgacagtaactg[450 bp omitted]cgatctccagtgctgaagagtttgatgacgacgagaagattgaggtggatgacccccctgacaaggaggacatgcgatcaagcttcaggtcgaatgtgttgacggggtcggctccccagcaggactacgataagctgaaggcactcggaggggaaaactccagcaaaactggactctctacgtcaggcaatgtggagaaaaacaaagctgttaagagagaaacagaagccagttctataaacctgagtgtttatgaaccttttaaagtcagaaaagcagaggataaattgaaggaaagctctgacaaggtgctggaaaacagagtcctagatgggaagctgagctccgagaagaatgacaccagcctccccagcgttgcgccatcaaagacaaagtcgtcctccaagctctcgtcctgcatcgctgccatcgcggctctcagcgctaaaaaggcggcttcagactcctgcaaagaaccagtggccaattcgagggaatcctccccgttaccaaaagaagtaaatgacagtccgagagccgctgacaagtctcctgaatcccagaatctcatcgacgggaccaaaaaaccatccctgaagcaaccggatagtcccagaagcatctcaagtgagaacagcagcaaaggatccccgtcctctcccgcagggtccacaccagcaatccccaaagtccgcataaaaaccattaagacatcttctggggaaatcaagagaacagtgaccagggtattgccagaagtggatcttgactctggaaagaaaccttccgagcagacagcgtccgtgatggcctctgtgacatcccttctgtcgtctccagcatcagccgccgtcctttcctctccccccagggcgcctctccagtctgcggtcgtgaccaatgcagtttcccctgcagagctcacccccaaacaggtcacaatcaagcctgtggctactgctttcctcccagtgtctgctgtgaagacggcaggatcccaagtcattaatttgaagctcgctaacaacaccacggtgaaagccacggtcatatctgctgcctctgtccagagtgccagcagcgccatcattaaagctgccaacgccatccagcagcaaactgtcgtggtgccggcatccagcctggccaatgccaaactcgtgccaaagactgtgcaccttgccaaccttaaccttttgcctcagggtgcccaggccacctctgaactccgccaagtgctaaccaaacctcagcaacaaataaagcaggcaataatcaatgcagcagcctcgcaaccccccaaaaaggtgtctcgagtccaggtggtgtcgtccttgcagagttctgtggtggaagctttcaacaaggtgctgagcagtgtcaatccagtccctgtttacatcccaaacctcagtcctcccgccaatgcagggatcacgttaccgacgcgtgggtacaagtgcttggagtgtggggactcctttgcacttgaaaagagtctgacccagcactacgacagacggagcgtgcgcatcgaagtaacgtgcaaccattgtacaaagaacctcgttttttacaacaaatgcagcctcctttcccatgcccgtgggcataaggagaaaggggtggtaatgcaatgctcccacttaattttaaagccagtcccagcagatcaaatgatagtttctccgtcaagcaatacttccacttcaacttccactcttcagagccctgtgggagctggcacacacactgtcacaaaaattcagtctggcataactgggacagtcatatcggctccttcaagcactcccatcaccccagccatgcccctagatgaagacccctccaaactgtgtagacatagtctaaaatgtttggagtgtaatgaagtcttccaggacgagacatcactggctacacatttccagcaggctgcagatacgagtggacaaaagacttgcactatctgccagatgctgcttcctaaccagtgcagttatgcatcacaccagagaatccatcagcacaaatctccctacacctgccctgagtgtggggccatctgcaggtcggtgcacttccagacccacgtcaccaagaactgtctgcactacacgaggagagttggttttcgatgtgtgcattgcaatgttgtgtactctgatgtggctgctctgaagtctcacattcaaggttctcactgtgaagtcttctacaagtgtcctatttgtccaatggcgtttaagtctgccccaagcacacattcccacgcctacacacagcatcctggcatcaagataggagaaccaaaaataatatataagtgttccatgtgcgacactgtgttcaccctgcaaaccttgctgtatcgccactttgaccaacacattgaaaaccagaaggtgtctgttttcaagtgtccagactgttctcttttatatgcacagaagcaacttatgatggaccatatcaagtctatgcatggaacattgaaaagtattgaagggcctccaaacttgggtataaacttgcctttgagcattaagcctgcaactcaaaattcagcaaatcagaacaaagaggacaccaaatccatgaatgggaaagagaaattggaaaagaaatctccatctcctgtgaaaaaatcaatggaaaccaagaaagtggccagtcctgggtggacgtgttgggagtgtgactgcctgttcatgcagagagatgtgtacatatcccacgtgaggaaggagcacgggaagcaaatgaagaaacacccctgccgccagtgtgacaagtctttcagctcgtcccacagcctgtgccggcacaaccggatcaagcacaaaggcatcaggaaagtgtacgcctgctcgcactgcccagactccagacgtacctttaccaaacgtttgatgctggagaagcacgtccagctgatgcatggcatcaaggaccctgacctgaaagaaatgacagatgccaccaatgaggaggaaacagaaataaaagaagacactaaggtccccagtcccaagcggaagttggaagaaccagttctggagttcaggcctccccgaggagcaatcactcaaccactgaaaaagctgaaaatcaatgtttttaaggttcacaagtgtgccgtgtgtggcttcaccaccgaaaacctgctgcaattccacgaacacatccctcagcacaaatcggatggttcttcctaccagtgccgggagtgtggcctctgctacacgtctcacgtctctctgtccaggcacctcttcatcgtacacaagttaaaggaacctcagccagtgtccaagcaaaatggggctggggaagataaccaacaggagaacaaacccagccacgaggatgaatcccctgatggcgccgtgtcagacagaaagtgcaaagtgtgcgcaaaaacttttgaaactgaagctgccttaaatactcacatgcggacacacggcatggccttcatcaaatccaaaaggatgagctcagccgagaaatagccacagatgctccatgaggaaaatccctgtccacattggaataaaaaagacatttttgttacaaagtttgcagtataatagagttaacagtactgtctaggctgttgcaatatattctctttcaatgtaccttccttcacctcgtcgtatatatcctcgataagtattaaaacagtatttgagtttaaaagagtttgtatatatttaaatgaataactttttatactctttgttacatgtttgtatcagtatttagtggaaaaccatttgagttgttttgggttagaatttttctttttgtactgtttctttaaaacagagttcttagtaacaggggcagttcctgaattcaaataaaccattttgtatgtttggattttgaatgggttaactaattacaggctaaaataatgccttttttagtgtttttaatttttagaattcactacataaattgtaagtaattgtgggtctcaaaaacactaggaacttttaagtgtcttagcacttcctcgatgtgcctgccctgagggagtgagttcacatttgagacaactgcactccagtgtggacgtgcctttgtcttcaggccatgccgaagggtgtttaaagcagtcttgcaggtcgctcctttcccagccgtggataaaaactgaagctaggaatctaataaggaatgctgatttcctcagttccattttgaggaatggggaaggctattctaaagaaaaaaatgggatttgttttctcggcagatctgcaaggctggctttaagagcacaaggagggaaagtaacgaaagggctggactactataaaagttacaaatacgtagttagaccaatagatttatatagtcaggtttttgtcatgtaatttattaactaactattacagaaacacagctaagaatatcaagtatttctctggctcttgacagaaaaaaatcagttgacttaaccctttgctgtcaaaagagttggcgtttcctgttctgggtgctactgccaaacgttatggtacttagagtcgggatgcacaacttcaaccaccgacttatcaatgcagccgcctgtgtattgcaattggccgttaccttaagcactgagccacccgggtttagttcagccatttcaagaagtatatttaacgtcggtagttctgctttattaaaatgcagcagaggtactcttctgtcccttccgtttatagttctctgagagagttctattttttggttttgttttgtgttttcttttgcattttgtatcttgtatttatccctgaacatgttttgtaccttttttttttttttttttaagaaaaggaattcttttgtgtatatatagatacttgcatgatatactgtagtcaatgttcggttcctcaaaaggtcttgctgctgtcaggtgttatgcactccatccatcataactgtatgaaacacatttcatatgtaaataaacgtgggacatttggcccttgtgcttctgtgagagaattattgatggtgggtctctgacatctttgtgaagtttgggaagtaattaattgcagcgacaagctacagggtgttgcagaattcttcccactcagaagaatggcatattcgttctcattagtaatcagctattttgtcactttcttgttgactccatcagtacatgggtacaatccgagggtgtgaatttcagcttgaaattccattgctgttccttgttttgtttgtattgctctaagttgtattcataatagcactttcatatgtttctgcatttgaaccttgcaataagcctgtgtggtaggccacataggtccgaataacctagttttacagttgagggagctgagctcagattcagttctttgccgaagccctcatagctggtaagtggctttgcatattagaacccaaatattttgctctctaaatctaatgctcgctctatgtggttatgtacatattgacaaatattcatttattcaacaaataaaaagtatgtacaaaacatgaaaaaaaaaaaaaaaaaaaaaaaaaaaaaaaaaaaaaaaaaaaaaaaaaaaaagaagacaacaaaaaaagaaaaaaaatcccaacacacatacaaagcggcccggccaaacagtaatgatgaatagaaacaaccgtgcggcaacaacagaataacacatcaaagggcagcactacgtgggcgcacagaaaagacgtgcggagggtcactcgccgcatcacgaaaagcgtgcgcgcgggaaacacaaacagagatagtcgctcaagtacgccgtatcgcgagagcgcaacaagcaagccgaatagcggagc

SEQ ID NO: 150899 - DNA, 4852 bp, Homo sapiens
cccccgaggtgaagggatttggacttctccccccaggtgcttgaaagaagagaagggtatgttctgtcttgtgctttttcttttagaagctactaaagggtgttggggatgcttctgactattatgaaggccaaaaggcctgttgactggggctgcttttaaccctttcctatttgctgagaatgcagccgtgtgacagtaactg[450 bp omitted]cgatctccagtgctgaagagtttgatgacgacgagaagattgaggtggatgacccccctgacaaggaggacatgcgatcaagcttcaggtcgaatgtgttgacggggtcggctccccagcaggactacgataagctgaaggcactcggaggggaaaactccagcaaaactggactctctacgtcaggcaatgtggagaaaaacaaagctgttaagagagaaacagaagccagttctataaacctgagtgtttatgaaccttttaaagtcagaaaagcagaggataaattgaaggaaagctctgacaaggtgctggaaaacagagtcctagatgggaagctgagctccgagaagaatgacaccagcctccccagcgttgcgccatcaaagacaaagtcgtcctccaagctctcgtcctgcatcgctgccatcgcggctctcagcgctaaaaaggcggcttcagactcctgcaaagaaccagtggccaattcgagggaatcctccccgttaccaaaagaagtaaatgacagtccgagagccgctgacaagtctcctgaatcccagaatctcatcgacgggaccaaaaaaccatccctgaagcaaccggatagtcccagaagcatctcaagtgagaacagcagcaaaggatccccgtcctctcccgcagggtccacaccagcaatccccaaagtccgcataaaaaccattaagacatcttctggggaaatcaagagaacagtgaccagggtattgccagaagtggatcttgactctggaaagaaaccttccgagcagacagcgtccgtgatggcctctgtgacatcccttctgtcgtctccagcatcagccgccgtcctttcctctccccccagggcgcctctccagtctgcggtcgtgaccaatgcagtttcccctgcagagctcacccccaaacaggtcacaatcaagcctgtggctactgctttcctcccagtgtctgctgtgaagacggcaggatcccaagtcattaatttgaagctcgctaacaacaccacggtgaaagccacggtcatatctgctgcctctgtccagagtgccagcagcgccatcattaaagctgccaacgccatccagcagcaaactgtcgtggtgccggcatccagcctggccaatgccaaactcgtgccaaagactgtgcaccttgccaaccttaaccttttgcctcagggtgcccaggccacctctgaactccgccaagtgctaaccaaacctcagcaacaaataaagcaggcaataatcaatgcagcagcctcgcaaccccccaaaaaggtgtctcgagtccaggtggtgtcgtccttgcagagttctgtggtggaagctttcaacaaggtgctgagcagtgtcaatccagtccctgtttacatcccaaacctcagtcctcccgccaatgcagggatcacgttaccgacgcgtgggtacaagtgcttggagtgtggggactcctttgcacttgaaaagagtctgacccagcactacgacagacggagcgtgcgcatcgaagtaacgtgcaaccattgtacaaagaacctcgttttttacaacaaatgcagcctcctttcccatgcccgtgggcataaggagaaaggggtggtaatgcaatgctcccacttaattttaaagccagtcccagcagatcaaatgatagtttctccgtcaagcaatacttccacttcaacttccactcttcagagccctgtgggagctggcacacacactgtcacaaaaattcagtctggcataactgggacagtcatatcggctccttcaagcactcccatcaccccagccatgcccctagatgaagacccctccaaactgtgtagacatagtctaaaatgtttggagtgtaatgaagtcttccaggacgagacatcactggctacacatttccagcaggctgcagatacgagtggacaacaaatgaagaaacacccctgccgccagtgtgacaagtctttcagctcgtcccacagcctgtgccggcacaaccggatcaagcacaaaggcatcaggaaagtgtacgcctgctcgcactgcccagactccagacgtacctttaccaaacgtttgatgctggagaagcacgtccagctgatgcatggcatcaaggaccctgacctgaaagaaatgacagatgccaccaatgaggaggaaacagaaataaaagaagacactaaggtccccagtcccaagcggaagttggaagaaccagttctggagttcaggcctccccgaggagcaatcactcaaccactgaaaaagctgaaaatcaatgtttttaaggttcacaagtgtgccgtgtgtggcttcaccaccgaaaacctgctgcaattccacgaacacatccctcagcacaaatcggatggttcttcctaccagtgccgggagtgtggcctctgctacacgtctcacgtctctctgtccaggcacctcttcatcgtacacaagttaaaggaacctcagccagtgtccaagcaaaatggggctggggaagataaccaacaggagaacaaacccagccacgaggatgaatcccctgatggcgccgtgtcagacagaaagtgcaaagtgtgcgcaaaaacttttgaaactgaagctgccttaaatactcacatgcggacacacggcatggccttcatcaaatccaaaaggatgagctcagccgagaaatagccacagatgctccatgaggaaaatccctgtccacattggaataaaaaagacatttttgttacaaagtttgcagtataatagagttaacagtactgtctaggctgttgcaatatattctctttcaatgtaccttccttcacctcgtcgtatatatcctcgataagtattaaaacagtatttgagtttaaaagagtttgtatatatttaaatgaataactttttatactctttgttacatgtttgtatcagtatttagtggaaaaccatttgagttgttttgggttagaatttttctttttgtactgtttctttaaaacagagttcttagtaacaggggcagttcctgaattcaaataaaccattttgtatgtttggattttgaatgggttaactaattacaggctaaaataatgccttttttagtgtttttaatttttagaattcactacataaattgtaagtaattgtgggtctcaaaaacactaggaacttttaagtgtcttagcacttcctcgatgtgcctgccctgagggagtgagttcacatttgagacaactgcactccagtgtggacgtgcctttgtcttcaggccatgccgaagggtgtttaaagcagtcttgcaggtcgctcctttcccagccgtggataaaaactgaagctaggaatctaataaggaatgctgatttcctcagttccattttgaggaatggggaaggctattctaaagaaaaaaatgggatttgttttctcggcagatctgcaaggctggctttaagagcacaaggagggaaagtaacgaaagggctggactactataaaagttacaaatacgtagttagaccaatagatttatatagtcaggtttttgtcatgtaatttattaactaactattacagaaacacagctaagaatatcaagtatttctctggctcttgacagaaaaaaatcagttgacttaaccctttgctgtcaaaagagttggcgtttcctgttctgggtgctactgccaaacgttatggtacttagagtcgggatgcacaacttcaaccaccgacttatcaatgcagccgcctgtgtattgcaattggccgttaccttaagcactgagccacccgggtttagttcagccatttcaagaagtatatttaacgtcggtagttctgctttattaaaatgcagcagaggtactcttctgtcccttccgtttatagttctctgagagagttctattttttggttttgttttgtgttttcttttgcattttgtatcttgtatttatccctgaacatgttttgtaccttttttttttttttttttaagaaaaggaattcttttgtgtatatatagatacttgcatgatatactgtagtcaatgttcggttcctcaaaaggtcttgctgctgtcaggtgttatgcactccatccatcataactgtatgaaacacatttcatatgtaaataaacgtgggacatttggcccttgt

SEQ ID NO: 150900 - DNA, 994 bp, Homo sapiens
catctcgacaagttgggccaaagtaaatgcggttttgggccgtgaattttaaattattataactaggatcaaatatatctttattaatccaaataggtactattaccatccacatgtttttgcccaccagaaataagtttattcctgtggagtaaaaatccgtgcttcgggattctaccaactcctggaaagcatgttcttcatcctgctaatcaaggaagcgttttccctgcacaacttgtcgagattcgaatctcgacaagatctgcaaggctggctttaagagcacaaggagggaaagtaacgaaagggctggactactataaaagttacaaatacgtagttagaccaatagatttatatagtcaggtttttgtcatgtaatttattaactaactattacagaaacacagctaagaatatcaagtatttctctggctcttgacagaaaaaaatcagttgacttaaccctttgctgtcaaaagagttggcgtttcctgttctgggtgctactgccaaacgttatggtacttagagtcgggatgcacaacttcaaccaccgacttatcaatgcagccgcctgtgtattgcaattggccgttaccttaagcactgagccacccgggtttagttcagccatttcaagaagtatatttaacgtcggtagttctgctttattaaaatgcagcagaggtactcttctgtcccttccgtttatagttctctgagagagttctattttttggttttgttttgtgttttcttttgcattttgtatcttgtatttatccctgaacatgttttgtaccttttttttttttttttttaagaaaaggaattcttttgtgtatatatagatacttgcatgatatactgtagtcaatgttcggttcctcaaaaggtcttgctgctgtcaggtgttatgcactccatccatcataactgtatgaaacacatttcatatgtaaataaacgtgggacatttggcccttgt

SEQ ID NO: 150901 - DNA, 4061 bp, Homo sapiens
cccccgaggtgaagggatttggacttctccccccaggtgcttgaaagaagagaagggtatgttctgtcttgtgctttttcttttagaagctactaaagggtgttggggatgcttctgactattatgaaggccaaaaggcctgttgactggggctgcttttaaccctttcctatttgctgagaatgcagccgtgtgacagtaactg[450 bp omitted]cgatctccagtgctgaagagtttgatgacgacgagaagattgaggtggatgacccccctgacaaggaggacatgcgatcaagcttcaggtcgaatgtgttgacggggtcggctccccagcaggactacgataagctgaaggcactcggaggggaaaactccagcaaaactggactctctacgtcaggcaatgtggagaaaaacaaagctgttaagagagaaacagaagccagttctataaacctgagtgtttatgaaccttttaaagtcagaaaagcagaggataaattgaaggaaagctctgacaaggtgctggaaaacagagtcctagatgggaagctgagctccgagaagaatgacaccagcctccccagcgttgcgccatcaaagacaaagtcgtcctccaagctctcgtcctgcatcgctgccatcgcggctctcagcgctaaaaaggcggcttcagactcctgcaaagaaccagtggccaattcgagggaatcctccccgttaccaaaagaagtaaatgacagtccgagagccgctgacaagtctcctgaatcccagaatctcatcgacgggaccaaaaaaccatccctgaagcaaccggatagtcccagaagcatctcaagtgagaacagcagcaaaggatccccgtcctctcccgcagggtccacaccagcaatccccaaagtccgcataaaaaccattaagacatcttctggggaaatcaagagaacagtgaccagggtattgccagaagtggatcttgactctggaaagaaaccttccgagcagacagcgtccgtgatggcctctgtgacatcccttctgtcgtctccagcatcagccgccgtcctttcctctccccccagggcgcctctccagtctgcggtcgtgaccaatgcagtttcccctgcagagctcacccccaaacaggtcacaatcaagcctgtggctactgctttcctcccagtgtctgctgtgaagacggcaggatcccaagtcattaatttgaagctcgctaacaacaccacggtgaaagccacggtcatatctgctgcctctgtccagagtgccagcagcgccatcattaaagctgccaacgccatccagcagcaaactgtcgtggtgccggcatccagcctggccaatgccaaactcgtgccaaagactgtgcaccttgccaaccttaaccttttgcctcagggtgcccaggccacctctgaactccgccaagtgctaaccaaacctcagcaacaaataaagcaggcaataatcaatgcagcagcctcgcaaccccccaaaaaggtgtctcgagtccaggtggtgtcgtccttgcagagttctgtggtggaagctttcaacaaggtgctgagcagtgtcaatccagtccctgtttacatcccaaacctcagtcctcccgccaatgcagggatcacgttaccgacgcgtgggtacaagtgcttggagtgtggggactcctttgcacttgaaaagagtctgacccagcactacgacagacggagcgtgcgcatcgaagtaacgtgcaaccattgtacaaagaacctcgttttttacaacaaatgcagcctcctttcccatgcccgtgggcataaggagaaaggggtggtaatgcaatgctcccacttaattttaaagccagtcccagcagatcaaatgatagtttctccgtcaagcaatacttccacttcaacttccactcttcagagccctgtgggagctggcacacacactgtcacaaaaattcagtctggcataactgggacagtcatatcggctccttcaagcactcccatcaccccagccatgcccctagatgaagacccctccaaactgtgtagacatagtctaaaatgtttggagtgtaatgaagtcttccaggacgagacatcactggctacacatttccagcaggctgcagatacgagtggacaaaagacttgcactatctgccagatgctgcttcctaaccagtgcagttatgcatcacaccagagaatccatcagcacaaatctccctacacctgccctgagtgtggggccatctgcaggtcggtgcacttccagacccacgtcaccaagaactgtctgcactacacgaggagagttggttttcgatgtgtgcattgcaatgttgtgtactctgatgtggctgctctgaagtctcacattcaaggttctcactgtgaagtcttctacaagtgtcctatttgtccaatggcgtttaagtctgccccaagcacacattcccacgcctacacacagcatcctggcatcaagataggagaaccaaaaataatatataagtgttccatgtgcgacactgtgttcaccctgcaaaccttgctgtatcgccactttgaccaacacattgaaaaccagaaggtgtctgttttcaagtgtccagactgttctcttttatatgcacagaagcaacttatgatggaccatatcaagtctatgcatggaacattgaaaagtattgaagggcctccaaacttgggtataaacttgcctttgagcattaagcctgcaactcaaaattcagcaaatcagaacaaagaggacaccaaatccatgaatgggaaagagaaattggaaaagaaatctccatctcctgtgaaaaaatcaatggaaaccaagaaagtggccagtcctgggtggacgtgttgggagtgtgactgcctgttcatgcagagagatgtgtacatatcccacgtgaggaaggagcacgggaagcaaatgaagaaacacccctgccgccagtgtgacaagtctttcagctcgtcccacagcctgtgccggcacaaccggatcaagcacaaaggcatcaggaaagtgtacgcctgctcgcactgcccagactccagacgtacctttaccaaacgtttgatgctggagaagcacgtccagctgatgcatggcatcaaggaccctgacctgaaagaaatgacagatgccaccaatgaggaggaaacagaaataaaagaagacactaaggtctaacattgcagatgtttgctttacagtgaaattgtgttgacttgcttttcccattcatttttttcctttcaagtttttgttgcatagttacagttttaaaaattcagactggctgggtgcggtggctcatgcccaccactttgggaggccgaggcgggtaaatcacgagttcaggagttcaagaccagcctggccgacatggtgtaacctcatctctactaaaaatataaaaaattagcttggcgtggtggcgggctcctgtaatcccagctactcaggaggctgaggcaggagaatcgcttgaacttgggaggtggaggttgcagtgagctgagatcatgccactgcactctagcccaggcgacagtgcgagactctcccaa

SEQ ID NO: 150902 - DNA, 401 bp, Homo sapiens
ggtttgcagggtctgagattacttgggcttttcctgcctttttcttttgcttaagggatggacaaggagctgagatttatgacccttattagagaaaaaaatgtgccttgctagggtggggacacttggttgatgcagtctctctctctctttctcggtgtttataacaaaacaaaaccaaaatgaactgaggggtttgtaatggtagtttgtttgttgctggagaatgctactttgcatgctttttttctcttgcagggtatgttctgtcttgtgctttttcttttagaagctactaaagggtgttggggatgcttctgactattatgaaggccaaaaggtaacaatatcgttctaggaaatgaacataaatgcattccagtgatgctgttagccataca

SEQ ID NO: 150903 - DNA, 5170 bp, Homo sapiens
cttgcgaggtgagcatttccaaggctgtgtgctcgtggggtggggggacacacgatgaccttctcctcctcaggaagacctaagagggaagagcaaaccccagcgagatcccccctgtgctgatgattttcagggacttgttggcaactcagcgagggttgccatagcttttttatgtagggtgaccagaaccggctgaaactggtttgaggcagatcagctcctgaacacaatgcagtcactgagctactacagtaggatagcagcttcctcccttcatggcagccaaaagcagaggagcttgcaggaaggtaccatccctacacagtatgtgaatgcacacttagacaccacacagcactggtacgtgactaatggagccctaaaagattctgggtagagaagatggaaaaaaaggtgcaggtttgcagggtctgagattacttgggcttttcctgcctttttcttttgcttaagggatggacaaggagctgagatttatgacccttattagagaaaaaaatgtgccttgctagggtggggacacttggttgatgcagtctctctctctctttctcggtgtttataacaaaacaaaaccaaaatgaactgaggggtttgtaatggtagtttgtttgttgctggagaatgctactttgcatgctttttttctcttgcagggtatgttctgtcttgtgctttttcttttagaagctactaaagggtgttggggatgcttctgactattatgaaggccaaaaggcctgttgactggggctgcttttaaccctttcctatttgctgagaatgcagccgtgtgacagtaactg[450 bp omitted]cgatctccagtgctgaagagtttgatgacgacgagaagattgaggtggatgacccccctgacaaggaggacatgcgatcaagcttcaggtcgaatgtgttgacggggtcggctccccagcaggactacgataagctgaaggcactcggaggggaaaactccagcaaaactggactctctacgtcaggcaatgtggagaaaaacaaagctgttaagagagaaacagaagccagttctataaacctgagtgtttatgaaccttttaaagtcagaaaagcagaggataaattgaaggaaagctctgacaaggtgctggaaaacagagtcctagatgggaagctgagctccgagaagaatgacaccagcctccccagcgttgcgccatcaaagacaaagtcgtcctccaagctctcgtcctgcatcgctgccatcgcggctctcagcgctaaaaaggcggcttcagactcctgcaaagaaccagtggccaattcgagggaatcctccccgttaccaaaagaagtaaatgacagtccgagagccgctgacaagtctcctgaatcccagaatctcatcgacgggaccaaaaaaccatccctgaagcaaccggatagtcccagaagcatctcaagtgagaacagcagcaaaggatccccgtcctctcccgcagggtccacaccagcaatccccaaagtccgcataaaaaccattaagacatcttctggggaaatcaagagaacagtgaccagggtattgccagaagtggatcttgactctggaaagaaaccttccgagcagacagcgtccgtgatggcctctgtgacatcccttctgtcgtctccagcatcagccgccgtcctttcctctccccccagggcgcctctccagtctgcggtcgtgaccaatgcagtttcccctgcagagctcacccccaaacaggtcacaatcaagcctgtggctactgctttcctcccagtgtctgctgtgaagacggcaggatcccaagtcattaatttgaagctcgctaacaacaccacggtgaaagccacggtcatatctgctgcctctgtccagagtgccagcagcgccatcattaaagctgccaacgccatccagcagcaaactgtcgtggtgccggcatccagcctggccaatgccaaactcgtgccaaagactgtgcaccttgccaaccttaaccttttgcctcagggtgcccaggccacctctgaactccgccaagtgctaaccaaacctcagcaacaaataaagcaggcaataatcaatgcagcagcctcgcaaccccccaaaaaggtgtctcgagtccaggtggtgtcgtccttgcagagttctgtggtggaagctttcaacaaggtgctgagcagtgtcaatccagtccctgtttacatcccaaacctcagtcctcccgccaatgcagggatcacgttaccgacgcgtgggtacaagtgcttggagtgtggggactcctttgcacttgaaaagagtctgacccagcactacgacagacggagcgtgcgcatcgaagtaacgtgcaaccattgtacaaagaacctcgttttttacaacaaatgcagcctcctttcccatgcccgtgggcataaggagaaaggggtggtaatgcaatgctcccacttaattttaaagccagtcccagcagatcaaatgatagtttctccgtcaagcaatacttccacttcaacttccactcttcagagccctgtgggagctggcacacacactgtcacaaaaattcagtctggcataactgggacagtcatatcggctccttcaagcactcccatcaccccagccatgcccctagatgaagacccctccaaactgtgtagacatagtctaaaatgtttggagtgtaatgaagtcttccaggacgagacatcactggctacacatttccagcaggctgcagatacgagtggacaaaagacttgcactatctgccagatgctgcttcctaaccagtgcagttatgcatcacaccagagaatccatcagcacaaatctccctacacctgccctgagtgtggggccatctgcaggtcggtgcacttccagacccacgtcaccaagaactgtctgcactacacgaggagagttggttttcgatgtgtgcattgcaatgttgtgtactctgatgtggctgctctgaagtctcacattcaaggttctcactgtgaagtcttctacaagtgtcctatttgtccaatggcgtttaagtctgccccaagcacacattcccacgcctacacacagcatcctggcatcaagataggagaaccaaaaataatatataagtgttccatgtgcgacactgtgttcaccctgcaaaccttgctgtatcgccactttgaccaacacattgaaaaccagaaggtgtctgttttcaagtgtccagactgttctcttttatatgcacagaagcaacttatgatggaccatatcaagtctatgcatggaacattgaaaagtattgaagggcctccaaacttgggtataaacttgcctttgagcattaagcctgcaactcaaaattcagcaaatcagaacaaagaggacaccaaatccatgaatgggaaagagaaattggaaaagaaatctccatctcctgtgaaaaaatcaatggaaaccaagaaagtggccagtcctgggtggacgtgttgggagtgtgactgcctgttcatgcagagagatgtgtacatatcccacgtgaggaaggagcacgggaagcaaatgaagaaacacccctgccgccagtgtgacaagtctttcagctcgtcccacagcctgtgccggcacaaccggatcaagcacaaaggcatcaggaaagtgtacgcctgctcgcactgcccagactccagacgtacctttaccaaacgtttgatgctggagaagcacgtccagctgatgcatggcatcaaggaccctgacctgaaagaaatgacagatgccaccaatgaggaggaaacagaaataaaagaagacactaaggtccccagtcccaagcggaagttggaagaaccagttctggagttcaggcctccccgaggagcaatcactcaaccactgaaaaagctgaaaatcaatgtttttaaggttcacaagtgtgccgtgtgtggcttcaccaccgaaaacctgctgcaattccacgaacacatccctcagcacaaatcggatggttcttcctaccagtgccgggagtgtggcctctgctacacgtctcacgtctctctgtccaggcacctcttcatcgtacacaagttaaaggaacctcagccagtgtccaagcaaaatggggctggggaagataaccaacaggagaacaaacccagccacgaggatgaatcccctgatggcgccgtgtcagacagaaagtgcaaagtgtgcgcaaaaacttttgaaactgaagctgccttaaatactcacatgcggacacacggcatggccttcatcaaatccaaaaggatgagctcagccgagaaatagccacagatgctccatgaggaaaatccctgtccacattggaataaaaaagacatttttgttacaaagtttgcagtataatagagttaacagtactgtctaggctgttgcaatatattctctttcaatgtaccttccttcacctcgtcgtatatatcctcgataagtattaaaacagtatttgagtttaaaagagtttgtatatatttaaatgaataactttttatactctttgttacatgtttgtatcagtatttagtggaaaaccatttgagttgttttgggttagaatttttctttttgtactgtttctttaaaacagagttcttagtaacaggggcagttcctgaattcaaataaaccattttgtatgtttgg

SEQ ID NO: 150904 - DNA, 5656 bp, Homo sapiens
cccccgaggtgaagggatttggacttctccccccaggtgcttgaaagaagagaagggtatgttctgtcttgtgctttttcttttagaagctactaaagggtgttggggatgcttctgactattatgaaggccaaaaggcctgttgactggggctgcttttaaccctttcctatttgctgagaatgcagccgtgtgacagtaactg[450 bp omitted]cgatctccagtgctgaagagtttgatgacgacgagaagattgaggtggatgacccccctgacaaggaggacatgcgatcaagcttcaggtcgaatgtgttgacggggtcggctccccagcaggactacgataagctgaaggcactcggaggggaaaactccagcaaaactggactctctacgtcaggcaatgtggagaaaaacaaagctgttaagagagaaacagaagccagttctataaacctgagtgtttatgaaccttttaaagtcagaaaagcagaggataaattgaaggaaagctctgacaaggtgctggaaaacagagtcctagatgggaagctgagctccgagaagaatgacaccagcctccccagcgttgcgccatcaaagacaaagtcgtcctccaagctctcgtcctgcatcgctgccatcgcggctctcagcgctaaaaaggcggcttcagactcctgcaaagaaccagtggccaattcgagggaatcctccccgttaccaaaagaagtaaatgacagtccgagagccgctgacaagtctcctgaatcccagaatctcatcgacgggaccaaaaaaccatccctgaagcaaccggatagtcccagaagcatctcaagtgagaacagcagcaaaggatccccgtcctctcccgcagggtccacaccagcaatccccaaagtccgcataaaaaccattaagacatcttctggggaaatcaagagaacagtgaccagggtattgccagaagtggatcttgactctggaaagaaaccttccgagcagacagcgtccgtgatggcctctgtgacatcccttctgtcgtctccagcatcagccgccgtcctttcctctccccccagggcgcctctccagtctgcggtcgtgaccaatgcagtttcccctgcagagctcacccccaaacaggtcacaatcaagcctgtggctactgctttcctcccagtgtctgctgtgaagacggcaggatcccaagtcattaatttgaagctcgctaacaacaccacggtgaaagccacggtcatatctgctgcctctgtccagagtgccagcagcgccatcattaaagctgccaacgccatccagcagcaaactgtcgtggtgccggcatccagcctggccaatgccaaactcgtgccaaagactgtgcaccttgccaaccttaaccttttgcctcagggtgcccaggccacctctgaactccgccaagtgctaaccaaacctcagcaacaaataaagcaggcaataatcaatgcagcagcctcgcaaccccccaaaaaggtgtctcgagtccaggtggtgtcgtccttgcagagttctgtggtggaagctttcaacaaggtgctgagcagtgtcaatccagtccctgtttacatcccaaacctcagtcctcccgccaatgcagggatcacgttaccgacgcgtgggtacaagtgcttggagtgtggggactcctttgcacttgaaaagagtctgacccagcactacgacagacggagcgtgcgcatcgaagtaacgtgcaaccattgtacaaagaacctcgttttttacaacaaatgcagcctcctttcccatgcccgtgggcataaggagaaaggggtggtaatgcaatgctcccacttaattttaaagccagtcccagcagatcaaatgatagtttctccgtcaagcaatacttccacttcaacttccactcttcagagccctgtgggagctggcacacacactgtcacaaaaattcagtctggcataactgggacagtcatatcggctccttcaagcactcccatcaccccagccatgcccctagatgaagacccctccaaactgtgtagacatagtctaaaatgtttggagtgtaatgaagtcttccaggacgagacatcactggctacacatttccagcaggctgcagatacgagtggacaaaagacttgcactatctgccagatgctgcttcctaaccagtgcagttatgcatcacaccagagaatccatcagcacaaatctccctacacctgccctgagtgtggggccatctgcaggtcggtgcacttccagacccacgtcaccaagaactgtctgcactacacgaggagagttggttttcgatgtgtgcattgcaatgttgtgtactctgatgtggctgctctgaagtctcacattcaaggttctcactgtgaagtcttctacaagtgtcctatttgtccaatggcgtttaagtctgccccaagcacacattcccacgcctacacacagcatcctggcatcaagataggagaaccaaaaataatatataagtgttccatgtgcgacactgtgttcaccctgcaaaccttgctgtatcgccactttgaccaacacattgaaaaccagaaggtgtctgttttcaagtgtccagactgttctcttttatatgcacagaagcaacttatgatggaccatatcaagtctatgcatggaacattgaaaagtattgaagggcctccaaacttgggtataaacttgcctttgagcattaagcctgcaactcaaaattcagcaaatcagaacaaagaggacaccaaatccatgaatgggaaagagaaattggaaaagaaatctccatctcctgtgaaaaaatcaatggaaaccaagaaagtggccagtcctgggtggacgtgttgggagtgtgactgcctgttcatgcagagagatgtgtacatatcccacgtgaggaaggagcacgggaagcaaatgaagaaacacccctgccgccagtgtgacaagtctttcagctcgtcccacagcctgtgccggcacaaccggatcaagcacaaaggcatcaggaaagtgtacgcctgctcgcactgcccagactccagacgtacctttaccaaacgtttgatgctggagaagcacgtccagctgatgcatggcatcaaggaccctgacctgaaagaaatgacagatgccaccaatgaggaggaaacagaaataaaagaagacactaaggtccccagtcccaagcggaagttggaagaaccagttctggagttcaggcctccccgaggagcaatcactcaaccactgaaaaagctgaaaatcaatgtttttaaggttcacaagtgtgccgtgtgtggcttcaccaccgaaaacctgctgcaattccacgaacacatccctcagcacaaatcggatggttcttcctaccagtgccgggagtgtggcctctgctacacgtctcacgtctctctgtccaggcacctcttcatcgtacacaagttaaaggaacctcagccagtgtccaagcaaaatggggctggggaagataaccaacaggagaacaaacccagccacgaggatgaatcccctgatggcgccgtgtcagacagaaagtgcaaagtgtgcgcaaaaacttttgaaactgaagctgccttaaatactcacatgcggacacacggcatggccttcatcaaatccaaaaggatgagctcagccgagaaatagccacagatgctccatgaggaaaatccctgtccacattggaataaaaaagacatttttgttacaaagtttgcagtataatagagttaacagtactgtctaggctgttgcaatatattctctttcaatgtaccttccttcacctcgtcgtatatatcctcgataagtattaaaacagtatttgagtttaaaagagtttgtatatatttaaatgaataactttttatactctttgttacatgtttgtatcagtatttagtggaaaaccatttgagttgttttgggttagaatttttctttttgtactgtttctttaaaacagagttcttagtaacaggggcagttcctgaattcaaataaaccattttgtatgtttggattttgaatgggttaactaattacaggctaaaataatgccttttttagtgtttttaatttttagaattcactacataaattgtaagtaattgtgggtctcaaaaacactaggaacttttaagtgtcttagcacttcctcgatgtgcctgccctgagggagtgagttcacatttgagacaactgcactccagtgtggacgtgcctttgtcttcaggccatgccgaagggtgtttaaagcagtcttgcaggtcgctcctttcccagccgtggataaaaactgaagctaggaatctaataaggaatgctgatttcctcagttccattttgaggaatggggaaggctattctaaagaaaaaaatgggatttgttttctcggcagatctgcaaggctggctttaagagcacaaggagggaaagtaacgaaagggctggactactataaaagttacaaatacgtagttagaccaatagatttatatagtcaggtttttgtcatgtaatttattaactaactattacagaaacacagctaagaatatcaagtatttctctggctcttgacagaaaaaaatcagttgacttaaccctttgctgtcaaaagagttggcgtttcctgttctgggtgctactgccaaacgttatggtacttagagtcgggatgcacaacttcaaccaccgacttatcaatgcagccgcctgtgtattgcaattggccgttaccttaagcactgagccacccgggtttagttcagccatttcaagaagtatatttaacgtcggtagttctgctttattaaaatgcagcagaggtactcttctgtcccttccgtttatagttctctgagagagttctattttttggttttgttttgtgttttcttttgcattttgtatcttgtatttatccctgaacatgttttgtaccttttttttttttttttttaagaaaaggaattcttttgtgtatatatagatacttgcatgatatactgtagtcaatgttcggttcctcaaaaggtcttgctgctgtcaggtgttatgcactccatccatcataactgtatgaaacacatttcatatgtaaataaacgtgggacatttggcccttgt

SEQ ID NO: 150905 - DNA, 6478 bp, Homo sapiens
  misc_feature (1)..(1): n is a, c, g, or t
  misc_feature (3)..(4): n is a, c, g, or t
  misc_feature (9)..(11): n is a, c, g, or t
  misc_feature (16)..(16): n is a, c, g, or t
ngnncgaannngccangtttcaatctggccccagtggctttttctctgaaagcaaacgtgtgtcttttacaccagggctttctccccaccccagggggtgtcttccatccttttgtggctcagttgaaggcgaaaagggctccaaaccactaactaaccagaggagagccccttcttccacctccagggagaatttcagatttaatttgtccgaagatagcgtgctctcttcttactcatttgccatcattacgaggaaaacaaaccaccaccttggcttcaagatcctgggtagaggctcacggtcttttcaaccatctttggcgaggccttgcttccttccactcgaggtatgttctgtcttgtgctttttcttttagaagctactaaagggtgttggggatgcttctgactattatgaaggccaaaaggcctgttgactggggctgcttttaaccctttcctatttgctgagaatgcagccgtgtgacagtaactg[450 bp omitted]cgatctccagtgctgaagagtttgatgacgacgagaagattgaggtggatgacccccctgacaaggaggacatgcgatcaagcttcaggtcgaatgtgttgacggggtcggctccccagcaggactacgataagctgaaggcactcggaggggaaaactccagcaaaactggactctctacgtcaggcaatgtggagaaaaacaaagctgttaagagagaaacagaagccagttctataaacctgagtgtttatgaaccttttaaagtcagaaaagcagaggataaattgaaggaaagctctgacaaggtgctggaaaacagagtcctagatgggaagctgagctccgagaagaatgacaccagcctccccagcgttgcgccatcaaagacaaagtcgtcctccaagctctcgtcctgcatcgctgccatcgcggctctcagcgctaaaaaggcggcttcagactcctgcaaagaaccagtggccaattcgagggaatcctccccgttaccaaaagaagtaaatgacagtccgagagccgctgacaagtctcctgaatcccagaatctcatcgacgggaccaaaaaaccatccctgaagcaaccggatagtcccagaagcatctcaagtgagaacagcagcaaaggatccccgtcctctcccgcagggtccacaccagcaatccccaaagtccgcataaaaaccattaagacatcttctggggaaatcaagagaacagtgaccagggtattgccagaagtggatcttgactctggaaagaaaccttccgagcagacagcgtccgtgatggcctctgtgacatcccttctgtcgtctccagcatcagccgccgtcctttcctctccccccagggcgcctctccagtctgcggtcgtgaccaatgcagtttcccctgcagagctcacccccaaacaggtcacaatcaagcctgtggctactgctttcctcccagtgtctgctgtgaagacggcaggatcccaagtcattaatttgaagctcgctaacaacaccacggtgaaagccacggtcatatctgctgcctctgtccagagtgccagcagcgccatcattaaagctgccaacgccatccagcagcaaactgtcgtggtgccggcatccagcctggccaatgccaaactcgtgccaaagactgtgcaccttgccaaccttaaccttttgcctcagggtgcccaggccacctctgaactccgccaagtgctaaccaaacctcagcaacaaataaagcaggcaataatcaatgcagcagcctcgcaaccccccaaaaaggtgtctcgagtccaggtggtgtcgtccttgcagagttctgtggtggaagctttcaacaaggtgctgagcagtgtcaatccagtccctgtttacatcccaaacctcagtcctcccgccaatgcagggatcacgttaccgacgcgtgggtacaagtgcttggagtgtggggactcctttgcacttgaaaagagtctgacccagcactacgacagacggagcgtgcgcatcgaagtaacgtgcaaccattgtacaaagaacctcgttttttacaacaaatgcagcctcctttcccatgcccgtgggcataaggagaaaggggtggtaatgcaatgctcccacttaattttaaagccagtcccagcagatcaaatgatagtttctccgtcaagcaatacttccacttcaacttccactcttcagagccctgtgggagctggcacacacactgtcacaaaaattcagtctggcataactgggacagtcatatcggctccttcaagcactcccatcaccccagccatgcccctagatgaagacccctccaaactgtgtagacatagtctaaaatgtttggagtgtaatgaagtcttccaggacgagacatcactggctacacatttccagcaggctgcagatacgagtggacaaaagacttgcactatctgccagatgctgcttcctaaccagtgcagttatgcatcacaccagagaatccatcagcacaaatctccctacacctgccctgagtgtggggccatctgcaggtcggtgcacttccagacccacgtcaccaagaactgtctgcactacacgaggagagttggttttcgatgtgtgcattgcaatgttgtgtactctgatgtggctgctctgaagtctcacattcaaggttctcactgtgaagtcttctacaagtgtcctatttgtccaatggcgtttaagtctgccccaagcacacattcccacgcctacacacagcatcctggcatcaagataggagaaccaaaaataatatataagtgttccatgtgcgacactgtgttcaccctgcaaaccttgctgtatcgccactttgaccaacacattgaaaaccagaaggtgtctgttttcaagtgtccagactgttctcttttatatgcacagaagcaacttatgatggaccatatcaagtctatgcatggaacattgaaaagtattgaagggcctccaaacttgggtataaacttgcctttgagcattaagcctgcaactcaaaattcagcaaatcagaacaaagaggacaccaaatccatgaatgggaaagagaaattggaaaagaaatctccatctcctgtgaaaaaatcaatggaaaccaagaaagtggccagtcctgggtggacgtgttgggagtgtgactgcctgttcatgcagagagatgtgtacatatcccacgtgaggaaggagcacgggaagcaaatgaagaaacacccctgccgccagtgtgacaagtctttcagctcgtcccacagcctgtgccggcacaaccggatcaagcacaaaggcatcaggaaagtgtacgcctgctcgcactgcccagactccagacgtacctttaccaaacgtttgatgctggagaagcacgtccagctgatgcatggcatcaaggaccctgacctgaaagaaatgacagatgccaccaatgaggaggaaacagaaataaaagaagacactaaggtccccagtcccaagcggaagttggaagaaccagttctggagttcaggcctccccgaggagcaatcactcaaccactgaaaaagctgaaaatcaatgtttttaaggttcacaagtgtgccgtgtgtggcttcaccaccgaaaacctgctgcaattccacgaacacatccctcagcacaaatcggatggttcttcctaccagtgccgggagtgtggcctctgctacacgtctcacgtctctctgtccaggcacctcttcatcgtacacaagttaaaggaacctcagccagtgtccaagcaaaatggggctggggaagataaccaacaggagaacaaacccagccacgaggatgaatcccctgatggcgccgtgtcagacagaaagtgcaaagtgtgcgcaaaaacttttgaaactgaagctgccttaaatactcacatgcggacacacggcatggccttcatcaaatccaaaaggatgagctcagccgagaaatagccacagatgctccatgaggaaaatccctgtccacattggaataaaaaagacatttttgttacaaagtttgcagtataatagagttaacagtactgtctaggctgttgcaatatattctctttcaatgtaccttccttcacctcgtcgtatatatcctcgataagtattaaaacagtatttgagtttaaaagagtttgtatatatttaaatgaataactttttatactctttgttacatgtttgtatcagtatttagtggaaaaccatttgagttgttttgggttagaatttttctttttgtactgtttctttaaaacagagttcttagtaacaggggcagttcctgaattcaaataaaccattttgtatgtttggattttgaatgggttaactaattacaggctaaaataatgccttttttagtgtttttaatttttagaattcactacataaattgtaagtaattgtgggtctcaaaaacactaggaacttttaagtgtcttagcacttcctcgatgtgcctgccctgagggagtgagttcacatttgagacaactgcactccagtgtggacgtgcctttgtcttcaggccatgccgaagggtgtttaaagcagtcttgcaggtcgctcctttcccagccgtggataaaaactgaagctaggaatctaataaggaatgctgatttcctcagttccattttgaggaatggggaaggctattctaaagaaaaaaatgggatttgttttctcggcagatctgcaaggctggctttaagagcacaaggagggaaagtaacgaaagggctggactactataaaagttacaaatacgtagttagaccaatagatttatatagtcaggtttttgtcatgtaatttattaactaactattacagaaacacagctaagaatatcaagtatttctctggctcttgacagaaaaaaatcagttgacttaaccctttgctgtcaaaagagttggcgtttcctgttctgggtgctactgccaaacgttatggtacttagagtcgggatgcacaacttcaaccaccgacttatcaatgcagccgcctgtgtattgcaattggccgttaccttaagcactgagccacccgggtttagttcagccatttcaagaagtatatttaacgtcggtagttctgctttattaaaatgcagcagaggtactcttctgtcccttccgtttatagttctctgagagagttctattttttggttttgttttgtgttttcttttgcattttgtatcttgtatttatccctgaacatgttttgtaccttttttttttttttttttaagaaaaggaattcttttgtgtatatatagatacttgcatgatatactgtagtcaatgttcggttcctcaaaaggtcttgctgctgtcaggtgttatgcactccatccatcataactgtatgaaacacatttcatatgtaaataaacgtgggacatttggcccttgtgcttctgtgagagaattattgatggtgggtctctgacatctttgtgaagtttgggaagtaattaattgcagcgacaagctacagggtgttgcagaattcttcccactcagaagaatggcatattcgttctcattagtaatcagctattttgtcactttcttgttgactccatcagtacatgggtacaatccgagggtgtgaatttcagcttgaaattccattgctgttccttgttttgtttgtattgctctaagttgtattcataatagcactttcatatgtttctgcatttgaaccttgcaataagcctgtgtggtaggccacataggtccgaataacctagttttacagttgagggagctgagctcagattcagttctttgccgaagccctcatagctggtaagtggctttgcatattagaacccaaatattttgctctctaaatctaatgctcgctctatgtggttatgtacatattgacaaatattcatttattcaacaaataaaaagtatgtacaaaacatga

SEQ ID NO: 150906 - DNA, 3410 bp, Homo sapiens
gatgtgtatgcctataaacttgttactatatattaaagtcttttgctcacataaatttgtaagaatacctctttgccctaagcaaaatgcaaaagtaatggaattggaactctgctgaaacaggtgtttttagctcatactttgagacgagcctgactagatagcacatactgtgattttacaggatagagaattgtacgctggacatgtaactttcaagttggcttttcccttgggcttagaatcaattactgtagtgtttgaaatgaaggatgtataattatctggaggtttaaccaaggttctttgcatattagaaagtacttagtaggaccaaccctgtttccccctttggtttgtttagaagacttgcactatctgccagatgctgcttcctaaccagtgcagttatgcatcacaccagagaatccatcagcacaaatctccctacacctgccctgagtgtggggccatctgcaggtcggtgcacttccagacccacgtcaccaagaactgtctgcactacacgaggagagttggttttcgatgtgtgcattgcaatgttgtgtactctgatgtggctgctctgaagtctcacattcaaggttctcactgtgaagtcttctacaagtgtcctatttgtccaatggcgtttaagtctgccccaagcacacattcccacgcctacacacagcatcctggcatcaagataggagaaccaaaaataatatataagtgttccatgtgcgacactgtgttcaccctgcaaaccttgctgtatcgccactttgaccaacacattgaaaaccagaaggtgtctgttttcaagtgtccagactgttctcttttatatgcacagaagcaacttatgatggaccatatcaagtctatgcatggaacattgaaaagtattgaagggcctccaaacttgggtataaacttgcctttgagcattaagcctgcaactcaaaattcagcaaatcagaacaaagaggacaccaaatccatgaatgggaaagagaaattggaaaagaaatctccatctcctgtgaaaaaatcaatggaaaccaagaaagtggccagtcctgggtggacgtgttgggagtgtgactgcctgttcatgcagagagatgtgtacatatcccacgtgaggaaggagcacgggaagcaaatgaagaaacacccctgccgccagtgtgacaagtctttcagctcgtcccacagcctgtgccggcacaaccggatcaagcacaaaggcatcaggaaagtgtacgcctgctcgcactgcccagactccagacgtacctttaccaaacgtttgatgctggagaagcacgtccagctgatgcatggcatcaaggaccctgacctgaaagaaatgacagatgccaccaatgaggaggaaacagaaataaaagaagacactaaggtccccagtcccaagcggaagttggaagaaccagttctggagttcaggcctccccgaggagcaatcactcaaccactgaaaaagctgaaaatcaatgtttttaaggttcacaagtgtgccgtgtgtggcttcaccaccgaaaacctgctgcaattccacgaacacatccctcagcacaaatcggatggttcttcctaccagtgccgggagtgtggcctctgctacacgtctcacgtctctctgtccaggcacctcttcatcgtacacaagttaaaggaacctcagccagtgtccaagcaaaatggggctggggaagataaccaacaggagaacaaacccagccacgaggatgaatcccctgatggcgccgtgtcagacagaaagtgcaaagtgtgcgcaaaaacttttgaaactgaagctgccttaaatactcacatgcggacacacggcatggccttcatcaaatccaaaaggatgagctcagccgagaaatagccacagatgctccatgaggaaaatccctgtccacattggaataaaaaagacatttttgttacaaagtttgcagtataatagagttaacagtactgtctaggctgttgcaatatattctctttcaatgtaccttccttcacctcgtcgtatatatcctcgataagtattaaaacagtatttgagtttaaaagagtttgtatatatttaaatgaataactttttatactctttgttacatgtttgtatcagtatttagtggaaaaccatttgagttgttttgggttagaatttttctttttgtactgtttctttaaaacagagttcttagtaacaggggcagttcctgaattcaaataaaccattttgtatgtttggattttgaatgggttaactaattacaggctaaaataatgccttttttagtgtttttaatttttagaattcactacataaattgtaagtaattgtgggtctcaaaaacactaggaacttttaagtgtcttagcacttcctcgatgtgcctgccctgagggagtgagttcacatttgagacaactgcactccagtgtggacgtgcctttgtcttcaggccatgccgaagggtgtttaaagcagtcttgcaggtcgctcctttcccagccgtggataaaaactgaagctaggaatctaataaggaatgctgatttcctcagttccattttgaggaatggggaaggctattctaaagaaaaaaatgggatttgttttctcggcagatctgcaaggctggctttaagagcacaaggagggaaagtaacgaaagggctggactactataaaagttacaaatacgtagttagaccaatagatttatatagtcaggtttttgtcatgtaatttattaactaactattacagaaacacagctaagaatatcaagtatttctctggctcttgacagaaaaaaatcagttgacttaaccctttgctgtcaaaagagttggcgtttcctgttctgggtgctactgccaaacgttatggtacttagagtcgggatgcacaacttcaaccaccgacttatcaatgcagccgcctgtgtattgcaattggccgttaccttaagcactgagccacccgggtttagttcagccatttcaagaagtatatttaacgtcggtagttctgctttattaaaatgcagcagaggtactcttctgtcccttccgtttatagttctctgagagagttctattttttggttttgttttgtgttttcttttgcattttgtatcttgtatttatccctgaacatgttttgtaccttttttttttttttttttaagaaaaggaattcttttgtgtatatatagatacttgcatgatatactgtagtcaatgttcggttcctcaaaaggtcttgctgctgtcaggtgttatgcactccatccatcataactgtatgaaacacatttcatatgtaaataaacgtgggacatttggcccttgt

SEQ ID NO: 150907 - DNA, 417 bp, Homo sapiens
cagtaacacagactgggttgtttaaagtaaagaaggcactagtccagtgagtaatcccttcattttccacacacatacccttctgttttctccctctcctccccccacaccctccactgcagttaaaacgtaattcgaagaagcctaaggtaaaagcccctgccgcataatgaccctagagcttcacctcacctactctgattcttagtaacctacctctaaggatgagagacagggtgctacgagcggggcgaactttggtccaggagttaagaaacctgaaccctggagtcctcaaaaaaaatgaatgaaaataacagaggcgccctgaggatccaagctggggcggtgccaagggctggcaagtgaggttgggacaacagaagtcaaacgtgccgtccttccagatcccggcgc

SEQ ID NO: 150908 - DNA, 540 bp, Homo sapiens
tgaaggttaatctacactgtagacctgtgcagattcagacaccacctcatgatgtcaaaattgctgccagaggagaaaggtcttctctctacaacagttgaatagaagccctagtcctctcattgcctggatttgcatcctgtgcccaatactgaatcaattgctgcagtccctggaatcctaaaccttctctgttcacagcaatctggtgtctcaaaagtctttttcatgatatcctacgtcaaaataaatacacaacagttctgtttattaagtaattaggtccaaacaacttgataagtatccataccctaacaacatagtagctgcttgaatatataatacacatatatatttttaaaagcacttttatttttaaataaacataattacttagtaatgggatgtgtgggctacggcaaaatttctcaaatgttagaatcagattagacacttccactcttatttcttgtcccatattaattttttcatgcagcacttgtttttatcataataataactgaaaaaccagcttcataa

SEQ ID NO: 150909 - DNA, 359 bp, Homo sapiens
gtgatcacaggattaagtgctactccacaaacagctgggatgtaggagtgaaccaccatgcccagccaagtattaattctttaactggtataattcagcagcgaaaccatctagtcccaggcttctctttgctaagagactttttattatggccttaatctcattactctttgtctattcaggttttagatttttttcattgttcaatctttgtttttatattcatgtctggtacagcagattccagcagaaaaaccaaaaagattttcttttacattttgttctctgttggcaaaacatgtttttcttcctttgagcaacagtaaacttccatagttcctgtttgtggaggtatcact

SEQ ID NO: 150910 - DNA, 519 bp, Homo sapiens
gtgaacaaatgggtttaagagagacaaatcattagaaatctctcctgggtatttcaatatctttaatgtccaaagcttattttctgttcactcatcctttaactcaggttgccagtaagtaatgtttcatcagaaagtcctgactatacagaaatatgaaaatatttgttgttttccaacagagaaaccccatcctcccttaatgcctaccttggcagactgaagtcagatggagaagtagccctaattctaagttgctggttatgtcccatcttcctgttgttggttattactggatggtgatactgccttgggatttcagccacaagcaatttggaggtttagaattcatctcttacctctaactactccacaacgtaactactctttcatactccatacctactctttcagcctctactctgtcatgatggtaacagaggtagaagtagggctgtctcccctacattttagaagtgtcagtcctttcaccactctacttccatttacaccattttc

SEQ ID NO: 150911 - DNA, 542 bp, Homo sapiens
tctaggaataattctgttatatgaattttaagaaactctgctataggaaatggggagccactgaaaaattgtgttaggaagtaacacggttagatgtttgtaggaaaataactctgattgcagttatagcagatggattgcaagaggcataggctgaacgtagggagaccgcttaaggtatcacagtcccactgaaaaatgaagacctgaacttaggcaaagcaatgagattaggggacggggaatggtgaaggctgatttgagacagctttaagagataaaagcaagtattgatgattaactagatgtgggaggagatgaaagatgaggaagataactcaggtttctggcttgcctaagtggagtcccaagcaaaatgggaataacaatagctaacctatgttgagctatatagtaggcgctaccttatgtgcatttttctcatctatcctcagaggaacactaagcagtaggtacaaattattatctctgttttatacatggaagtacagagaggttaaatgacttgctgaagtttagta

SEQ ID NO: 150912 - DNA, 589 bp, Homo sapiens
ccaaaacgacccgaaggacatctttgggcagctctgattctttctaagccagtgcccctgaccatgcatctgttggtgcagttttattctttggagctgttgagataaaccatgagttcagattattcatgaaaagtgatgggatcttaacagataccttgtgaaactacttgatcaaatccctctttcccatgtccaaaggccctgaatcttcagccctccaagtcacgtaccctcacatgcctggaggccagatggagtggtcgtgggtccgttcaccagcctgtggtgtgcatgtcactgtctgtcttcgggtcgtttaaacgacccgaagacctttgtcatgatgtcctctttaaatccctcccccacattgaaacatgcaatgaggactgagctttaactagtcatctgtagttactggcccatcctttgatagagtggagatgagagattttaaggacccaggacaactagaaaggtcagggtagaacccagagtcagtaagagtggtagtaacagtatgcaggatttaggtttggctccagagacctggacttcacacatcaactgtcatcacattacgctg

SEQ ID NO: 150913 - DNA, 921 bp, Homo sapiens
aatttcttactttttccaggcagagtgtcttcactatttagctgtagaagtataactatttttgtctgtgtcacaattttgtactcaggaaccctggccatgtcactagccaaacggacataacttatggaatacatggacagcatccggttgatatgctctagagaaaaatagcagctaccatagacttcaggaaagacacatcgagccaatgacaaaaatgtgggtttcctaccttcagggagtctaagaatgcagtagaaagtgatgtggagcaaacatctttcaaatggaaggaagggatagggaaaggaagactgttagaggctcttttgaatgttagaggcaacataaaacatatttggatgtgtattctaaataaaatgcaaatgtcaagaaggatgtcagctgtgagtgggactcagagaaagagaaacgttttggactacagaggcctgcagtacaagtggatctacaattttgtttagggaatccaatgcctcaggtatctatgtgaggcagaattttcctatggagccagcggcaaggctccagaggagaaatacagtacaagccactttattttggagtaaaagcctgttgtacaaaaattacccgccccctccttttttgagaaacaatttcacattgggatactaataagaaggaatgctcagtcatgaataagggtgaccccgttgtgatctgagcattataggatcatagtaactacaaccagtcttccatcattccatggaaattgcatgtatgccacgttgccttctcagtttccaagggaccaattaatgaacaggctactcacattttcaacatcctactcctgacacactcccacccttctttctatttatctgtgattcatagagatttgcctatgactggattcctgaggagaaaaaa

SEQ ID NO: 150914 - DNA, 604 bp, Homo sapiens
aatttcttactttttccaggcagagtgtcttcactatttagctgtagaagtataactatttttgtctgtgtcacaattttgtactcaggaaccctggccatgtcactagccaaacggacataacttatggaatacatggacagcatccggttgatatgctctagagaaaaatagcagctaccatagacttcaggaaagacacatcgagccaatgacaaaaatgtgggtttcctaccttcagggagtctaagaatgcagtagaaagtgatgtggagcaaacatctttcaaatggaaggaagggatagggaaaggaagactgttagaggctcttttgaatgttagaggcaacataaaacatatttggatgtgtattctaaataaaatgcaaatgtcaagaaggatgtcagctgtgagtgggactcagagaaagagaaacgttttggactacagaggcctgcagtacaagtggatctacaattttgtttagggaatccaatgcctcaggtatctatgtgaggcagaattttcctatggagccagcggcaaggctccagaggagaaatacagtacaagccactttattttggagtaaaagcctgttgt

SEQ ID NO: 150915 - DNA, 776 bp, Homo sapiens
cagagagtggggagtgggaaaggttggtgatcaactattttgatgtctgtcttggaagcagcaagggctgtagttgcccacacctccctccaatgctgacctagactggtgacaatgagattggggtgagaattagctgagtgcccatgagagagggaattagggcaggatcccgctgggctatggacacagaggcttcctggcaatcactgcagacaccggtgaaaaacactctgattacagaatccaaaggaagccgctggcatcatagggtgacagccacaggcacagcctccctgggggggtccctcagctcctctcctctggggagaaatcctaggcagggggcaggaaagggcaagagattatccttgagcatggacacgccaacccagatgatccccagtggggaaaagtgggcttctcagtttggcatttccaaccacacatttttaccaggaagacagactaataattgggctagtaatggacacgacaatcaacatccacagccttagccttaagcctccccttgaagcctccaggagcctcccaagctgtgttgttctgtgacccagcacagcccaacacacttctgacctcctgaggctgggtcagtctattttcccctcctctgccatgcccaggtcctctccctgcccggcccagctgccctggcctccttgacccacttcctctgcccggtatggttcatagtcacaatggtggcctccaagaggcagcaagacactctcatgccctgttccgagctctcc

SEQ ID NO: 150916 - DNA, 443 bp, Homo sapiens
cggaggttgcagtgagctgagatcgtgccactgcgctccagcctgggcgacagagcgagactccgtctcaaaaaaaaaaaaaagaaattcttacatctgtcaaagtttgaaaggcactgtgctaaataaagaggccacttcataaggaattaatcaagtaaaggctccagaagacaggatcaggaggaacctaaccctgagcaagtcacctctctcctggtttcatttcctcctctccatagagtgagagagaactatgtgactcgcaaggcccttgctggccccaaatctagaaaaagtacactttttaaaaagctaaaacaagaaagcaagcatgtttataggatatgcgtgtcatcatctttcagggtccaccaggctcttacagcaaatcccatcgttcccaaagagagaatcagttaagaacatgtccaaagagaaga

SEQ ID NO: 150917 - DNA, 514 bp, Homo sapiens
aatcatacacacaccccccacgaagaaaggggggctccggatctcaatcatagcattccttcctctctgaagggaccaggtaacacacggagtgccttggcagcctcatcattgcatgcaatcttcacagacaatatctcactgcagccacctttctacaggagtacagactgtggtgctggatgtcacccctctgcgaggcccttgggatcgactgagagaccagcagtgaagttcgtccaccttctgaatggatgccatgatcggacgtgatggagctcagtgggatgctgctgctttccctcccttagctaggatgtccctgataaaggatgacacccaagcctcagcacaactggccaaacttgaggtggtcatcatagcactgatgctgggccaacaattagccccacttgtacctttttacaaactttttgacaattgccaagaattgtccaccttccctccccattgaattaaataaacttcttgtctcatggatactcagaatacc

SEQ ID NO: 150918 - DNA, 575 bp, Homo sapiens
aatcatacacacaccccccacgaagaaaggggggctccggatctcaatcatagcattccttcctctctgaagggaccaggtaacacacggagtgccttggcagcctcatcattgcatgcaatcttcacagacaatatctcactgcagccacctttctacaggagtacaggaagcactggcctccttcatccttaggctataatgctgacactggcctccttcatcctcagactgtggtgctggatgtcacccctctgcgaggcccttgggatcgactgagagaccagcagtgaagttcgtccaccttctgaatggatgccatgatcggacgtgatggagctcagtgggatgctgctgctttccctcccttagctaggatgtccctgataaaggatgacacccaagcctcagcacaactggccaaacttgaggtggtcatcatagcactgatgctgggccaacaattagccccacttgtacctttttacaaactttttgacaattgccaagaattgtccaccttccctccccattgaattaaataaacttcttgtctcatggatactcagaatacc

SEQ ID NO: 150919 - DNA, 448 bp, Homo sapiens
aaaaaagaaaaatgagccaggaaatgttcccatctcttctgttttctggaagacattatgtagagttgtttttttgtttgtttgttttgttttttagatatttaatagaatttgtcaataaaaccgtttggtcctgcaaatttcctttcttggtaggttttgaactataaatttaagttacaaatagttataggactattcaggatatctatttcatcttggatgagttagataactttttctttcaaggattagttcatagtaagttgtcaaatttgtgtgtgtagagttattcctagtattctattatctccatgtctgtgaagcctgtagcagcatttattatttctttcctgatattgaacattttcatcttccatctttttctttgtcaaattctttagaagtttgtcaatattattgatcttttcagagaaccagcttttgg

SEQ ID NO: 150920 - DNA, 341 bp, Homo sapiens
gtctagaggatccgtaaaacgacatagaggcaggtcaggtcacggtcttgtgtctaaggtgttgtctgagctgtggtctcatgaccaagaaaattaaggaacgtggccacaaaggccgaggttggagcaaaagtttaataaaagaaagctctccacagcagagagaggattccaggtggattaccgttttaacagttgaatccaaaagcttcttttttttttttttttgggagaacagtgtctcgctcggtcgcccaggggggagtgcaggggggtgactctcagctcagggcaacctcggcctcccgagggggaacggagcctcgaaatcgaaactcagg

SEQ ID NO: 150921 - DNA, 190 bp, Homo sapiens
atttttatctagatgctggtaactctgaaatttacctcttaaacttctctcctgaactccattttttctctccaactcttccctggatagttctgctggaacttaaacactccaaactgtcatcatctgtaccccatcctactgcaaacttatgttctttatccattaagctagttggacatccctataa

SEQ ID NO: 150922 - DNA, 579 bp, Homo sapiens
tttcccattcttgacacatgagaacaattattttatattggggacagaggcagaattgttttgtgagaattcctgggactatgttaggtaaacctatatttgaatctgttgcttcctcactattgcctggtaggagacttgctcacttcccaaatgggagtgacagcacagtggctgctacctgaccacccaccatgtgcaggctccattcccacactgccctgcaccctcacgtcagtcccactgtagacctgggaggtgggtgctgtcattgtccccatcttacagagggagagcttggggacacagagagggtgagatgcacgattagagccatctgactctaaagcctggcttctctccctgactccatacagccccttcaatacaatagcttactcccaggtctgtagggagtttcagacgattacccacagttaagtggataggaatgcttagcacagggccaagctccaccggccagcttccttccggtcccaccttcctttccactagaccctgatttcttcaggagaaaggactataatttcacttttattccccgcactaggacagtcc

SEQ ID NO: 150923 - DNA, 144 bp, Homo sapiens
ggtgcgtgtccacaacacgaagtgacttgtgcagctctcagcggaggactggcattaatgcattgctagcaaaaggtgggggagaaaggaagcatctcctgcgctcccaggcaggctctgattaccatcatgttttctgagccc

SEQ ID NO: 150924 - DNA, 285 bp, Homo sapiens
catcatcatcaccatagtttacattagagttcgttcttggtgttgaacgtacattctgtgagttctgacaaatgtataaggacatgtatctaccatactgccatacagaatgatttcactgctgtaaaaattatctgtgctctgcctgtttattcttcccttcccactgtgtataacatttgtacttaccaagtttgaactttactacagatgatttggaatattagttatttgaagaaatagaattaaaagagataaaataggactacatctaatgacacaaag

SEQ ID NO: 150925 - DNA, 370 bp, Homo sapiens
ggggcaaggagtcctgctcccctgccaaattactgcttttgactgccatggaattgaatttgatcaggaacctcttctactcagagaagtaaataccaaataaggatgttttaaatgttagttttgcagtttctgatcaactacattcccctgtcctgacaggcctgggagcctgggtgtggtgtgagaacgtgaacttgcagggttactaatcagaactgcgtctcctgcggggctgagaagcctgggcctgggctcatggaaacaagccaaaaattgagatcatcagggttaggattttgcggggagcacaatggaagggcaatgaatcatggagtttggagactttggcccgagagtggctgaaatg

SEQ ID NO: 150926 - DNA, 457 bp, Homo sapiens
ctcagaactcccaaaatcactaagccaaagggaagtcaaactgggaactgtgtgaggcaaacctgcctcccattttattcctacgtaagctagctacaaagataaaaaagctacatacctccctcacaatttgcccactaggaaattccttgtggacaaaggacagacagaattcagtcattcttttgctcatgtgagaccaatgcatatctgattgcttcttctgccctattatttcactaagccagactaaggaataagtgactattcctctaccctcctctcacatgtaaattgtgtattcagtaaaaggctaaccagagacaaaaaaatgcaacagtttgtcttgtatctacctatgatctggaagcccccacccctgcttctagttgtcccagctctccagactgaaccaatgtacatcttacatatactgattgatgtctcatgtttccct

SEQ ID NO: 150927 - DNA, 403 bp, Homo sapiens
aacttcatgtagcatacacaaacatctccttgattcttgcaaattagactgagaaaatcgtggaaattgctaagcaacgtttggtgtagtgcaaactctagggatttgctggctggcaacattcccttcatcctgtaatgaacatattttgttcagtagtagccatatgagtatgactaaagcaaagagacccattcagagatatttgcattttcttaacacagaaagaaaactttagtgcaaaattatcagatagtatgataaaacatagtgaaacattttggggagggtggaaaagatgtttctagcccactaaatcatacctcatatgcaaaactttctgcttttcaagagagacctacatttgtctccagagaagaggactgggaaataaatctccatt

SEQ ID NO: 150928 - DNA, 353 bp, Homo sapiens
cttccatgtgttatataattcaatcttctattaatattaggcattaatatctaatactttagacattaagtaggatataggttaagtctgtgacaaaaatatatcaaaatacagtctattagacaaagtgtgagattctttctttctaaaataatgatccacattacagcccagcaaacaaatccagagcgtgtttgctggttcaactctcctcaacatgtgacttccatccttgggttcgacaaggccactttagccaatgggtagaggaaaaagccagagacacacaacccagaagggccagaaaacctttctgttcacatcctattggccagaatttagttacatgatta

SEQ ID NO: 150929 - DNA, 285 bp, Homo sapiens
aactttaagtattttaatgtccaggccttaccacttaacacttccataaaacagttcctgtggatgggacccaggtatcaatattgagtaaagccctcctggtgattctaggatacagccgagaatgagaattactgggctgcagaagatgagccttatcaccagatgtctcttagtataacattaatttaacaagagaccaggaattgacagaatttaaaggctaagcatggaccatttactattaaaactattatctagtcatggtggcttcaaggatagttt

SEQ ID NO: 150930 - DNA, 338 bp, Homo sapiens
ttgttgtatgattggttcggggcagggtggaggatatcacaaatggtagtgccttgatggaaactcagatggctcagatcctagcctgatgctttttccaccacatcatgctgccacctttcttagaggcttatttggaagcaggataaggaagatacgacgttttgtcaatccactttaagtgcatcctctgccaatccaccttgctcttctctcagtagtgcgggcttgaaaggtcaagaatccacttctgtgatatcacatactctcagtccagctgaggctaaatattcctgctttacactcccaccgttgccttctaatttaaattcttgcct

SEQ ID NO: 150931 - DNA, 124 bp, Homo sapiens
tcagatttgggatttggaaggtcctggtattccaggccccagacaggatttgggcgtgggttgtgttgtttccctgggacatcctattaatatgcaaccaatgcaacccgctgctcatcgatga

SEQ ID NO: 150932 - DNA, 673 bp, Homo sapiens
ggagttccagactagcctggccaacatggtgaaactccatctctactaaaaatacaaaaattagctgggtgtggtggcaggcgcctgtaatcccagctactcagaaggctgaggcaggagaatcacttgaacccaagaggcggaggttgccgtgagccaagattgcaccactgcactccagcctgagcaacagagcaagactctgtctcaaaaataaaacaaaataaaataaaatgagagagacaaaaataagagaaaaaaaaggaaaaagttatcacctcagagcacagaggaatagaaaacattggggaaactgtgatttaggaaacagccatctccatgtgggccttccgaatagctttccgtatttgacagttccccaaagtaatcattcctttgctgagtccttaatagggcagctgcccactcaccggccgtgtgccctggcatgggactgaatcagcctgcaggaagttaggaatcatatccttctgcaatttgctaaaaagaaaaaaaatgctatttgtagagcagaggttctgcctcagcacttggttcagttctgctccttcctgagaggtttcttacacatagacccccccgcaaagattattactttccttcacttttgtacttcttactataatagctaagataaattttatacaacgtg

SEQ ID NO: 150933 - DNA, 414 bp, Homo sapiens
ttcgcatgtgctgggatcggggaagctgggtggctgggaacacagatgcagcaggagaagggaaacatgttggggctagaaagggaagggcttaggaggctagactttaactggtgggcagcagggagccaagcgaggcactcatttgctaggtggctcagggcatgacacttttcactggagcccgagtttcccccaaggcaaaatgaataagctgggggtggaaaaggccctaagttgatagaattttactttccctgtttatgcggctgccacagagtgcacagcagctcctgaaagacgtggctcagcaccgccgctagcagcttgggcaagagttagctgcagcccagggctggtctgggcctctcttggggggcagggacagcggagggctacaagaaggccagccct

SEQ ID NO: 150934 - DNA, 369 bp, Homo sapiens
ccccacaaataagggctcatacaccaaaagtcacctactagctcgtatctttactttcactcataaactagagttccccaagtcactgaagggaagccttccacagatctggtttattttcttcactaaaagtaattgagcctggtgcatgtatgcctttgccattagggtactatgcaagagaagagaatttgccttctgtgcagagatgttgtaaacggatggaggtctccctcctcttctcccaaggggtcttaaacatgcctggaggtttagagtaacaggctgaaactctgcagggcattccttctctccacatcctcagagacctcatggggagaacttgctggcgccaggcctggatcctcc

SEQ ID NO: 150935 - DNA, 437 bp, Homo sapiens
agtgctactgaccagctatgtgaccttgggcacacaatttaacttctctatgactcagtttacctataggcaaaaggtcagcacctaccccttagaggagttgaaaaggacaaatgaaacagagtatataaagcatttgttgggctgggcatggtagctcatgcctgtaatctcaacactttgggaggccaaggcaggaagatcgcttgaggacaggagttcaacaccagcctgagcaagagagtgagatccctgcccatcccccctgtattagtccattttcacactgctatcaagaactacctgaggctgggtaatttataaagaaaagaggtttaactcactcacagttccacatgggctggggaggcctcaggaaacttacaatcgtggcagaagaggaagaggggcaaggcacatcttatacggcagcagga

SEQ ID NO: 150936 - DNA, 337 bp, Homo sapiens
caaaaaactacaggaacagcatgttttcaaaagtacaacaatttccaaactatttgaaataaatctatgaataattcaatggccgacattttccatacaaaccaataaaatgcagagtgtgcatgaagctatctgttacaatctgtggcactgatatttcacaaaagaattctgtcccaatctgagcccctgcattgtgccttcaaatcctcctggactgcaagtccgtaagaaacgctcctggtttcttacttttctccaaggactcctagaaggaccccacccccctccccccacccctgctcctaggaggacaacgtgatcactgtattcagct

SEQ ID NO: 150937 - DNA, 260 bp, Homo sapiens
caaaaaactacaggaacagcatgttttcaaaagtacaacaatttccaaactatttgaaataaatctatgaataattcaatggccgacattttccatacaaaccaataaaatgcagagtgtgcatgaagctatctgttacaatctgtggcactgatatttcacaaaagaattctgtcccaatctgagcccctgcattgtgccttcaaatcctcctggactgcaagtccgtaagaaacaggacctccaggttccgccccagg

SEQ ID NO: 150938 - DNA, 460 bp, Homo sapiens
acaagaataacctggaagcatccaccttgcaaaaatatttagctgcagagaacaaaggggaaggaataggtcatccaggtggccaacaagtattacaaccacacttgcactgaaagcaaaagcaaaaatcagatggggaagaaaagtttgcccataatgtggcttctactaacctcttccttcaccattacctcatttctctacacaaaggacggaaagaaacagcaggaaggatgattagggaagtgtccatgaagttgccgcaattttagctgagacttgaaaattagctaaaatgtcattatgcaaaaggctaggacaagagaatggtaatgtggcattctagtgagaggaaatggcataagaaaaggcaacgctgtgtgggaaaaggcgacattctgaaggttaaaagaaatgaacaatttgggccgggcgcagtgactcatgcctataatcccag

SEQ ID NO: 150939 - DNA, 324 bp, Homo sapiens
ctgtaaacccaggagagcgatgtcccctctgaaggcagaggatggtgcatgcaaacacttgacaagtcattggaattcagtaaatggtgactgctgtcaccaaggaaatgggcatatgagttggcattaattttttaaaaaacatttacttatttccactgaaaaataggaacagtaaaattgagaaccattaaaacaggaacaaaaagaaccaagccacagcaggggatgctgagctgggtatctcctaagaactgtgctcctggtcccacctggaactctgcggcctggatgccctcagcacgtgctttccaggccaccagc

SEQ ID NO: 150940 - DNA, 382 bp, Homo sapiens
gcagcaaagccttttgaggtttggcatccatctgcctcatcgcagcccctctcacaaggccccctttctgtgaccagccccagccgcagggttgccggtcttttctctaataaagaggttgggatctcctcaccctggtgcacatctgtccttctgtgcttattttcccattttcccctttcaagttctgtagttttattgtgttgacagttgctggaaccactgatttgggatgcgagaacaattcccccaggctcctggcttcttcccaggctgcgtggcatcctgcaggacagctctgagaaccttctgtcctccacacagccctgcccagacacctgggatctactcttctgtcttcccacagtgcctgctgcatgca

SEQ ID NO: 150941 - DNA, 456 bp, Homo sapiens
gcacgtaaagatccttctgctgatcttagtaagaaaggaagctttctaagtggattttgtatctcgaaacccaccttgaaatctttaaaggacactgataaggccctgacaaaatggttaaccatgtccatcaacctatatcataacattatccctttgagtcctaatttttttaaatctcctcaaagatccattactaaaatgcatccattgcctttgtgttagagaatgagcagcagaagaaaatggtatggtccaggataggattcaaggaccatttaggggtagcaggtagaaagagtgtcagtgacaactggggataagataggtcccccagatgagaataggcaatgagctgattctagagagtaagacaaatctcaatggattggctagatcttaaggtcaaagtcagagttaagaagatcatagagtttaagatcacagaactggtga

SEQ ID NO: 150942 - DNA, 588 bp, Homo sapiens
cctgcattgttgctcttcctctaggccctattttagctaatggcaccaccagtcacccaaacagactagagaaaatacttgtgatgtgtatcataaacaaaacattgatactcaaaaaagtgaacttcttatagagatcagtaagaaagttcactttaaaaatgggtaagggcaattcagaggaaagtgtccacaaaaaggaaaaagttcaacttcacaagtaatcaagccatagtacctttatttatgagtctataactggaaatacacaaaagtctatcaacacatgaatggataaacaaattgtatcatatttacacaatagaatattacttagtactaaaaagaacaaattacttacagcaaccacatagttgagtatcaacatttgtatctaaaagaaggctctggttcatttactccaccctgtttatcccacaaaatcctgctattaaactgagagaatacatggactagctatttgaaggctcttacataaaaacagcgacgtgcagattggagaagaccagaattcaaagcaccaccaaactggtggcgtgtttcctgcttttcctgcagtatcgcctg

SEQ ID NO: 150943 - DNA, 514 bp, Homo sapiens
caagttttctgtcactcttccctctttgggctggaatgaggaaaaaaatcagctttgactcagcacgatttgaacacgaatgtcttttaaatgaatatggggggttagtaatagcatgttaccgaacatgtcctttgcttgttcgagacaggtcacccctgcattgttatcattgctgcaagtagaagcaggtttctggtggtttgtcactttcaagagcagggaaggtgtctaaatataagcgaagccttgttttgatagaatgttttattacctgaaaatgatcagcatatattaacattaatagaatagtccatgtcattctttttttaggcaatttacctctgctacagacctgtctgcttaaaaaaaaatcttcctctcttctaaaacatatatttgtttagagagttttcactgaagtgtacatgacaattacagctgttcattaacaaaattgggtatttgttttaaactttaaccaatcactttgatatgctaattatggtgtaat

SEQ ID NO: 150944 - DNA, 289 bp, Homo sapiens
ctttctacccactatcacatttccccacaggcatcaaagactttgggttggcactgatttcagtttctctctttccaagctattctgtgtgtctcatatataaatgtacatcccaatgaatgctcacaaagtgatcacacccagatgaagaaatatattatcagtaccccagaaccccctcctatgcctcctaaaattgctcactactcctactctacaaaaataaccttcatcctaacttaaattacagatgggttttgcctgttttgtatttgtataaaagtagtaa

SEQ ID NO: 150945 - DNA, 291 bp, Homo sapiens
taaggtaatgaggctggagatacagtctgctatcatattgtcaagggcatttaaatgccagacaggcatttagattttttagggtgtctctaatgtctgaggatacaccatggagggaaactgccaagtttttctggaaaatattctttggttcttgggtaaaccctaggatcaagtcaagtagcagattaatttcattttacagggcattgaaagagaaatcaagccacaaattgaaacaatgttgaaagaaggcaactagaataagagtctacctagtaagttagtaca

SEQ ID NO: 150946 - DNA, 341 bp, Homo sapiens
catagtaaatggaatggacaaagaatatgagtgacagataaaatcagtttttaaaaaattttattaaagttgattaagcctattagtgaaagaaagcaggccaggcacaatggcttgctcctgtaatgccaatactctgggaggtcaaggcaggaagatcacttgagcccaggagtttgagataagcctgggtaacacagtgagactccatctctaaaaaaattaaaaagtaaaaaaaaattagctggtcatggtgacacacacctgtggtcccagctacttgggaggctgaggcaagaggattacataagcccaggaagatgaagctgcactgacccatg

SEQ ID NO: 150947 - DNA, 336 bp, Homo sapiens
gggaaaaccactcactaatgagttgaatgttcaagagaaactgagaaagagtactgcttatataaaaattatgtgaaattaaacaaaaatgtagttcagtaatgaatggtgtttaagcacttatggaatataaaattatcacctgttaaataagaatgcatagtaaatggaatggacaaagaatatgagtgacagataaaatcagtttttaaaaaattttaaagatcttaatctaaattttattaaagttgattaagcctattagtgaaagaaagcaggccaggcacaatggcttgctcctgtaatgccaatactctgggaggtcaaggcaggaag

SEQ ID NO: 150948 - DNA, 595 bp, Homo sapiens
ttggcttaaatacttccatcaaaaacaaaacaaaacaaacccccaccccacaaaacacagagcacaaactgctcagtttttcatcatgctattaagcatcaacagagaataaacctagaaacagcatacgggtacagatacaggaggctccactgtattttagttcaaattacagaatctaattaaagactaacttaggaaagatacaggtattctagggaggatcagaatgcttcaacactgatacccaacagaaaggcaatttttaattagcttaagacactgaaaagttttccctccccttattctgcctcttagtcttcccaacagggatgctcttgttatagtttccctttttcccaattacatccacaagcactgacatatctttcccctctgctcacctaggatcagtttatctcaactccacccctctaaccgtcctcaaatttctttccccctcccctattttttattcatggcacctgtaatccctgctgccccatgtggatcatcaacataaaggttttacaaaagggattggggtttagcagagttgtgctaaggaagagtgtcaaagcatcagatgtcttgg

SEQ ID NO: 150949 - DNA, 385 bp, Homo sapiens
aaccatctgaagcaactgactgaaaagcaacacaccagacaggccttctttaaaatccccaggtagcctatttgaagtaatatttccactttgagatggtaagaaactgaaactatgcatgtaattagcatgattttagttgaaactcactggttttcagatttgcttagttggagttgcctttttcattcatggaaccaaagttccttccaatcatagcaaggtaagtaactgggaggcctgactgaggagcttttacccagccatcacttgcctaacgagattctcatcagccgcctcctggagacactcacagaatgcactccacaccctggtctgggcttcttaacattttactcttcagagtagtgtcatccagtgagtg

SEQ ID NO: 150950 - DNA, 487 bp, Homo sapiens
agagctgtagaaataaggaattgatacgtttctgttgtgtaattcaacaaaagtatttaccaaacatgcatactcttggtctcagaaattccatttctgagaattttccctaaggaaaccatcaagaacattcactgcagcattatttataatgctggaaaattaggcaataacttcaataccaaataataatgtactgaataaatactgaaccacacaactgtgtccccaagtgccttagaggttccaagccggagccacggaagcctactgctgcttctactacaatagatctgttcttatctattttacaaactgagattccactttagttacactgatgtataatcgtgaaataatttgaaaatcattgcaacagaatatgtaataacatgcaaagatgttcaagatatttttagtgaaaaccagcaatgacaatatgatttcatacaaggaagaatggcaatgaacatgtatcaaattgcta

SEQ ID NO: 150951 - DNA, 364 bp, Homo sapiens
gcatcagaggataaaacaggacattatttttgcactgttttgaattacagaggccatggtacttgttagaaacggagggaggggcagcccaaagcatatttatgaagcacttaacatttactcagtgagatccatcccatggtctggaaactctgggaactaatgtatccaaaaaagagacaattttagctttcaaaaggctagttaatttactaaattcagtctgtgaccaatttctcttgagaagagtccagtgcagtgggccaaatctcgtgggcaataccgggagagcatgagattgtgaattcaactgagaaagttgtgtttggaaatggctcatatcaaacctggaaatgaaaagctt

SEQ ID NO: 150952 - DNA, 305 bp, Homo sapiens
atctccttctttagaagccttcctggtcgcctgcctgtccctgctcccacccatgccgtcttcctccctttatcagtgattgacatcacagactttagtagccttgtaacaaccttgactcatacactggactggtcttgactccataactagacttgtacctcatcatgggcaggaacttttaaagtttcatctttccatgcccttgggcacagagcagaaatgtagtagacactcagaaggtttgtttgaagggtaatatcagcacattggttaatagtgaaattaatgaatgagtggatgaa

SEQ ID NO: 150953 - DNA, 581 bp, Homo sapiens
agtcaagtcagtgatgatttggattgaaattaaaatgtgactaaagagagagtatgcagttttgtctatctatgaaaccttcctctgttttatgtgggacacctgggcacccactcttggctggaacttacataaaacactactgtgcacgcacatgtcacctcaagtcccgtggctctgaaagtccagtagaagtgacagccagacatcccagtcctccctgtagggttttctcagaactgttcctttaaggtctcaggctgctggaagggagggctgatagcagaaaaagtggggacactgggaactccaaagggaagacgcgcatggcctgaaaccgagttctttcgctttctggagcctggtctccctatgtggagggtcatgctggcatggctggcaatggttaattcaccgatggccatggagtcccaagttggccatattattgcggtaaaagatacattaacccagatgaccttgccgggggccagaatagagcccgtgaggaaggagagcaaggcaggatcggccgggaggcgagagggattttgttgaggagcaaggtcttccacaggaac

SEQ ID NO: 150954 - DNA, 729 bp, Homo sapiens
cattttctgtcgagttccccaaaagcacatgggactttacagtgacgctttttagagtatctggctctagagttagtcgtcttgctgagagaaagtgatggagctggcattgcattccaaagccagtgtgcattcaccagctcaggctgcaggcccatctccctgcatggagaactgttttgtagattggtagcgattggacagccatgccctgtcacctgctggttcagtgctcctccaggaaggcctcaactgcctactgcctttgaccatgatttgtacagcagcttggatgaagagctggaaacctgcttatcagatttgcagacgatgcatggttagagcaatggggaccatctgggagtgagccaggatttaggactcttgagaagctgaacaatggacggaaactgatgtgatgaagtggaacgggaagatgtgcacacaccctctacctgtactcagaaatcacttgctcaaatgtggtgtgggaggctgggcccactgtgcagggatggtgctgtctgcagaggcatccttaacatgcctttagcatttgcatttccattttccatggacatctgtcttagtctgtttgcattactgtaaaggaatacttgaggctgggtcatttataaagaaaagggtttatttggttcacggttctgcaggaggtacaggaagcatggtgccagcatctacttctggtgaggacctcaagctgctttc

SEQ ID NO: 150955 - DNA, 332 bp, Homo sapiens
actcatgtgctctctctttaggtaaataatgtaaattccatgaaaataaatgaatggatcccaaaggatctttagattaacaggaaacagctaacacttttgaatttggttattcaagaggaccattcatgtgagcattttaagattctgaagactagggatatgattctttctaaaaccatgtttaattgtttttgcatttagtttaacatttagcagtcattgatatcttcaatgacaaacatttgaaaagtcaccactccaaagactgagaagaaaactgaagagattctgactgggttcttggctcacgcctgtaatcccagcacttt

SEQ ID NO: 150956 - DNA, 426 bp, Homo sapiens
caggcattggggtgcaggctgtctacacagcagaagaatatgggagtccgtgataagcaatgatgcagggaatgtaaatctttttgttcctctataacagggaaataggtgctcagttaacaaaacagtatttttctcaatttctcgattctgaaaattgctagacatatcatgctttacaaccctacacccacacactatagacatatgccacgagtagatgctttgctgacttgaaggtttcagcagtgattcttcttgcatgcactttgttttgagctaatagaacactcacaagataagaaaaagaaatgcttggacatgcaccatccctttctccaaagattgttaggcactggtaattgaagtttgagaacatattatttaaatgactacaaagctaatgtaaaggtaacagagccatgc

SEQ ID NO: 150957 - DNA, 527 bp, Homo sapiens
actgaatcctcagttcttctaggttcctccatccaattttctcccacttttctgacttggaatcactctgaacaagaactgctctgctcctgaaaccctgcaagatggagatgtatacctgatacaagttcagaggacaaccctcatgcctgatgtgtggaccactcagggagttcaccaaaatgcccactgccataactaggggcattcaaactgcaaaccaggaaaatatgcttagagctcaaatctagaaatcttcctgactaatcaccctctggactcagagaccgaatttatgatttgttcttatcattaagctttgtttttcttttgcttccatagaaatattagttagtttggttcgtggggactttaactaagaagctaagtctctcagtattatcctcctggtagtcatcattataatcttcctggtgcactatattctctcaagggtcttaaatgtatattcaaaaacatcaacagcataccagattgtctcactgtgattagaaaaaaaatgagat

SEQ ID NO: 150958 - DNA, 327 bp, Homo sapiens
ctcccttttgcaaacaaaacgagaataccagtatttcctttgccatgcttgtgcgtcattatacaccacaattcttgaaaagaaacatcatcggctcttctctattatgcgctaagatggcaaaggacaagtaacccgaacaaaatccttgatattttattctaagacttgttacttacctattcgtgcccctccaaaaaaaaaaaacaaaaacaaaaccacagcaactctacttttcaaattgaaattgatgagcaggaaaactatcactgattttttttaacataacaatgaaattctcagaatgagcaatgtggttatgaataa

SEQ ID NO: 150959 - DNA, 284 bp, Homo sapiens
ccagatcataggcatgtgctctgagaccctggtgcaggcaccatggaggctgtggtgggggcctggtgtcacagggaggagagagggtttggaggcacataggccagggctggcattgcagagccacatcatctcatcatgtgaacctgaggttggggtctctgagtctcatctgggaaaaggtacaataagagaaaaagtttaagcagcctgacataatcttcctgatagtcctggtgggagtgtaaattagtgtcaccttgtgggagggtaatctggcaatg

SEQ ID NO: 150960 - DNA, 500 bp, Homo sapiens
tggtcatccatatcttctgcatttgaaacctagaacaggtgtgctaaaaagacaggtatagtgtccaggtttcaatggactgggaaaggaagcctttggcaaggcccctggttagatcaagaacagcacaaaatcacagagaaagagagaggtagagagagagagagagagagagagagtgtgtgtgtgtctgtgtgtgtctgtgaagagacaggggttaacaaaggcaaagggacagatataccaaaaaggggctgagagaaaactgctcaagaaagaggttggggtctctgaggaccgaatcaatatcccatttgctacactatctgtataccacctatgccaccatttcaatacacatctggcaatagactgtttgttaatattatcagacattagtaacttttcaagcttcccaaattatctaattggattagcctataaactaaacaaaattggctcaagatgtaattgtttcgaaaggactgagatgactgaat

SEQ ID NO: 150961 - DNA, 263 bp, Homo sapiens
tgcatttgtgagcagacttggaacccttcccattgtcatgttttttatctttgctatgtgtaaatgtttaccttatgtatgtgcaataactcttttagcctgttcagttatcattgagtgagacctttctctgtggcagcaggtgggactgaaatatcactgaatttcctaactgtgactgttttacttctttttaaccaagagaatctaagaacttaggcaattttgtccacaatttctgttctctcattaaatatcattaa

SEQ ID NO: 150962 - DNA, 443 bp, Homo sapiens
gacctcactgcttcataaacagaactgttgggtatttgttttggcctgggttgccctgaaacaatgactgagatattaacagggctgtgatccaaaagagttggggaaacttggctttaactttgcagaaatctgtaagtcctcttagagtgtcccgtccatgctaaaaatatttccaaccacccagaccaaagaggtgggaggagatacttcaaaatacaaggtgctttagaagtcggtgccagaggagaaagcagcccagccttccaggccaagctggctgcccgtctggccacccctcctctctgaacttccgtgttcctcatccgtaaaatgagggggctggactgcgatgaggatattcatgagaactaagatctaatgcccacttatcatttcccaggcaccggtaaagccctttctaagcattagttattcagatc

SEQ ID NO: 150963 - DNA, 184 bp, Homo sapiens
aggctggtctcgaactcctggcctcaagtgatctgcccaccttggccacccaaagcgatgggattacaggcatgagtcaccatgcccagccagtctctatattattttaactagtgatttaaaactttaaagtaataacacactgatggcaaaaacaaaacaaaatcaaacaaacaaaaaaccc

SEQ ID NO: 150964 - DNA, 304 bp, Homo sapiens
agcaacatgaaatttcaggcaacatacgcttaaatatcaaattagtaatttaaacaataagtaagatctgaggaaagattacatccaagttttttgaagctacttccagcccatgtatttagtgaactatagtttttacaacaagaagttaatcagattcttgaaattattgtaatttttttttaaagcagtagcagaggggtgacagtttctcactattcaggccttccagctagagaagagggacaaggaataactgagtaggaaattagattaaatgatcacttccttaaagtctacagtt

SEQ ID NO: 150965 - DNA, 650 bp, Homo sapiens
gactctgaggatccccgctcaccgactgggtggggggtgtggacaggtctgtgattcccagacccatcctcagatgcctcctggagcctctttgtgggagagtgcatgtgtcatggcgagtatgtggctctgcgattggaggaaatgtcaccggaccagtcaataggtcttcctctttacaattagcttttgtcaatgtacgttttttctttagtccacacaaccttttaaaatttatttatgatcgtagccctggcctttatccatcgaatcctaaagtgatctggctgctcatgaccaggggtgacagccaggatgcttttcttggaccaagaaacctggcttaaatgacagccttgagccttgctttggagcagtcagactctctggggatactgttactattagtgagcattatttgctgcagaaattgattccttctgccgtacagtaggccagggaggcctccaggtgccttcggtgggggaaggattttagttgctcaggccaaataaccgagactagctccctgcaaattccatggagccatctatacttctgagtatatcttcaagtgctactcctaaatttaaggttcttccacttttcatccagttcacatgtagttgagggcctgcctgccttgagcc

SEQ ID NO: 150966 - DNA, 972 bp, Homo sapiens
ggggggtggggggacttggattgttaagaaagtgatcatcctgttcttggatagggtgattttggctgtctgggtaagttctaggaatttgctgtattctcttgattctaatgaactttgctatggcttgggaaggggcctctgcatggagagagagaaggaagctagcgtttcttgagggtctggtatatgctaggcactgtgctggctgctgaattggactgtttgatttaatccttgtcacaacccctttgaagtggtcttgttaccctcttttacaaatggggacattgtggctccagcaggttaagaagcttgctccaggttacatggctatcagtgggaagctgggtggggggtgtggacaggtctgtgattcccagacccatcctcagatgcctcctggagcctctttgtgggagagtgcatgtgtcatggcgagtatgtggctctgcgattggaggaaatgtcaccggaccagtcaataggtcttcctctttacaattagcttttgtcaatgtacgttttttctttagtccacacaaccttttaaaatttatttatgatcgtagccctggcctttatccatcgaatcctaaagtgatctggctgctcatgaccaggggtgacagccaggatgcttttcttggaccaagaaacctggcttaaatgacagccttgagccttgctttggagcagtcagactctctggggatactgttactattagtgagcattatttgctgcagaaattgattccttctgccgtacagtaggccagggaggcctccaggtgccttcggtgggggaaggattttagttgctcaggccaaataaccgagactagctccctgcaaattccatggagccatctatacttctgagtatatcttcaagtgctactcctaaatttaaggttcttccacttttcatccagttcacatgtagttgagggcctgcctgccttgagcc

SEQ ID NO: 150967 - DNA, 244 bp, Homo sapiens
cttttctccaaaactgcaaacactcatactttcttgcttgaagtcatttggtttctataaactcctggaaatatttctttcaggctgttttgaaaattgctattacagtttggggaggaatagacttttcctttttcaaacacatgcttcattgcccaattctggattggattaatgtcgattcaatagctgtttattgcatgtctgtcacgtattatgcctcaagttttgggtccagcccctg

SEQ ID NO: 150968 - DNA, 203 bp, Homo sapiens
gaggagaggaagctcagatggcggcaaactgaagggaagccgactctgagtcaggcctaggtgcacggcctgccatgctgcgtgctgtggggagctgagagcgcatgggcacctaagcacccagattaggctgcggctacagaagatctgactgtctggcctggcctgcagagggactgtggcctcagaggaggatgctggcc

SEQ ID NO: 150969 - DNA, 135 bp, Homo sapiens
acttttttgcttggccttggcctgcttaggatacttcccctcccctctaggctcctcccaaacctgcggctcaactcccacttgcttctgcatctttcttagctccgcccttgagctactcgacttccacacttg

SEQ ID NO: 150970 - DNA, 310 bp, Homo sapiens
tctttcatcctcccatcttccatcctttcctcccccgtcctgtgtttcctcccctcttctcccattcaccgtcaggaagggccacccgcgaagggccagttcagcacaactcggcgccggcagaggctagcggcagcagtggctacaacagtgagtggatttcaatctcaagtggaagtttaataagaatgagaacctgtgtacaaggatgactcccctgtcctgatggtgccactggtgtgtgatggcatcacctgtagcccaatcatggcagcatagctttcacatgttctctggctgtctttgcatg

SEQ ID NO: 150971 - DNA, 291 bp, Homo sapiens
tcttaacagaaaagcctctcaaatttggggaagctgccaagcttacagtaggaaatacacattttccaaaaatcacgtttttatttgaaagcttagattttatcagtggcaacaaatactgtcagttgttttccttgaagtgacagctcactcaccttgttcaatttcaagaaaatgtctcccaaatgcccaagtctgagtaaccttagtttgtcagtcattctttcaagtaaaaatggtgttctctgaaaacagttacttgtgcagcttgccgctgaatcccacaaatgc

SEQ ID NO: 150972 - DNA, 385 bp, Homo sapiens
gggagggatgaaagggactcttcccagcaccaggcagctgtgcaaaccagacccagtactgccagagccaagattttcatgagaagtcagaaatccagacttgcaatgggaaatctgattttaaatgatggccactaattcttttactgaaatatcagtctgtgtttctcactggcctgcgagcagtgagcttgcaacctctggattaggttacaaaatgttgtgggctttggaaaatgcggggccgaatggggtggtcacagagatccacacagcactgcaggggaaagcgcctgctcattctccccaagaagaaacggagtccgagtcaacaaaccacaggtgcctctacaactgtggggcttccgactcccaggggaatgtt

SEQ ID NO: 150973 - DNA, 301 bp, Homo sapiens
aagggaagtcggttgtatgctaagggaagtacgtgcgggctaagggaatttcttctggtgctagatggagaaagtgttttctgctaaaaggtaattttagaccattatatcattaaactcttatgaatgtaattcctggagacagtcttgaaatcttgagctgccaagcaaaaccttcagaaatgcttgataattaaaggaaagcaaaactctgattccttttgccatccatatacgatggcatttaaatgagtgtaccttgtcatattaaattatccttcttttctgttctttaatacca

SEQ ID NO: 150974 - DNA, 250 bp, Homo sapiens
gggcaacaagagtgaaactccttaactcaacagttatgtcatgataagtaataagacattacacacacacccctctaaatccacagatttcccctctgagaaaagcccttctgggaagctactcaacaggagggcccttaggggaaatgtgtgcagtgtgaagctgcaaagaaatgatcagatggcaatcagttgcctaagccacacataaaggtttcacttttggcttttgcagcaatttccccatcct

SEQ ID NO: 150975 - DNA, 252 bp, Homo sapiens
gtggccggtggggcacagctgattttttgggggaacccgttgacgtgaggtggtggattcgtggctgagagttggcagtggttttgcttggaggcacgtgtttgagaaccgtttactcgggtggaggaggtcaggagagagcatgatttttcataagagaaggaaggaggactgaggactcggctttggggagcagagttgggaacacacagaagagtctggggcatgcagagaggctggcaggaggcagag

SEQ ID NO: 150976 - DNA, 417 bp, Homo sapiens
cagctagagtttaccctcccacagaaaacacattcttggcattttgaaagagcatttcttttcttcctttgagaaattatttagcaaggctgtggaaagcagggctcccagtggccattcaaaaattaagaccaagccagaaggcaggaggaaatgtcaccacaatggggagaaaataaatcagttagattaagattaagatctaacccttttctgtggttggggcaggcggatttgagaataatagcatgctatttctggaaagtccctccagagtaaaagctgggagggtgggggtgtgaaactatatgtttcagtgttagattaaaatttgttgaagttgattgaaaacagatagaaatggccaacggtccccctgcccagcacaggtatgccagtcctctgtggctgaggtcc

SEQ ID NO: 150977 - DNA, 427 bp, Homo sapiens
tttacatgttatttatttatttagtgtcacccagcctggcacaaagctgattagtatatgtttcaacaaataagaactaaaagaaaacccatcacggtaccattatcattggtaacaaaattaacactaatccctaaatgccctctaatagccagtgcatagtcagttttttgaattgcctcaaaaatgtgcttttgcagttagtttgaaatgggacctaaacaagatccactttttgcatttggttataatgccttttgtgtgtgtgtgtgacagtagaatgtcttgctttctacatttggctgattgttgccttgtagtgtttcagttttcctctattctgcagattccctgtaaactggcaattatctctggaagcttgattagatttagattcaaatttgagggcaagtagacttcttgggca

SEQ ID NO: 150978 - DNA, 669 bp, Homo sapiens
taccattgagcctgcagggacatttcagtgtgcacacagcaagtcaggaaaacaatgcccagcacgtgggtccacaggtaggtgccctgagcagagggggagggctcttcaaaggaggcctcagaaacaatgacagagcctcaaaagaaaatgccactggggctggcttgcatgttccatcaacaagatacttagagctggattactgaaagtatgaatttgcgtttcataagaaaaaaaggatctagttctacctgaagatttcagatacgtgagcaaccagaatgtttcaatggtttcgaggatgtagatgatgcagggatgataatcattttacagggggaggaagaaagaaaatcaacacacagcaaattctcacttaaatgagaacacacagcaaattctcacttaaaaggccaaatagatttttgtgcgatgtctatacagtgtgcctcttatttaaaatgccttttccaatgccatggaaataagcaattatcagggatttgatctaaaaagaaactttaaggttatgtcatatacatttgtatcccagtttcctttacactttactggcttggtattgtatttttggtaaataattcaaggcaggaggatcccttgagctcaagagttccagtccaacctgggcaacagagcaagactcca

SEQ ID NO: 150979 - DNA, 282 bp, Homo sapiens
tatctgaggccattagaaattaatcctaaaacagtcactcccgaatctccacctgcagccccagcttgcagtttaagtgccgccttgcctccggatagttccatcttggcagctagaatgcaacgaatccaagcagaacttctgttttgtcttttttcctgccctcccaccttaatctgttccttacatactcctgagctctgaaaagatcaccctcactcctctagtcactccagctagaaacacagtcttagaagctactccctggctctttctccccgt

SEQ ID NO: 150980 - DNA, 330 bp, Homo sapiens
aaatggctcagtgcttcctcggagaggtggaaagtccctggggtcacaggcatggggatgaaacgtgacgagggatgccgctgggcctgtggatttattgcttgcgggccatttcattggcctactttttcaacatcggctagaaaggccttcaaagaaggctttgaaaaccagccggccatcttcacaataagctcagacggttaaaagccacgctctggatttcagcaagtggaaacctgacctaatatctcaggtcagggctcaaggggcaagttcatgggactttctattctgctgcctcaagggaaagagaaacagacccgagct

SEQ ID NO: 150981 - DNA, 438 bp, Homo sapiens
tgagccgccggccagcgagcaatacagcctgagctccacctcctgtcagatcagctgcagcattagattctcagaggagctcaaactctattgtgaaccgcgcaggagagggatctaacctccctagattgcgcgcttcttatgaggatctattgcctgatgaaaacatccactcccactccacctccgtgtcttccatgaaacgggtccctggtgccaaaaagattggggacggccattctaagagaccacttccctatttgtcagaaatgtgattgtgtttactccaatttaaaacagggtctttacatacgttcctaatacaagtgctgcttgctactactactcacagcgctctgtgcccaactcttaacttcctccctcaagtccctctggaaagaagagaggagatgccttccttctgacgatgggaccccc

SEQ ID NO: 150982 - DNA, 559 bp, Homo sapiens
taaaatcaactaggatgggttccttattgccttctttgttttttcctaatccttctccttctctccagcccattttcctcatcaaaacggctcccgttcctccagttaccggggctgctcttaagaactgatcctttttaatccaggttgggcaccagtattggccaactgttcttgtgtcaaaacctgtactcctgtacttcctgtgaactggccaggaatagagttcagctgagcccaggcatcaatcctttcctgagctctatttaacatgctcatgtcttcaaggtcaaatgcattctcactgagtcttttctgagcgagtgcccgttcactcattgctgtagagatgtccacaggctctgagggcaaatcgctgctgaaaacattatcatcatctttgttttcttcaccatttttctctacaggaactcattctccataaacactatctgcttcttttttccaatgttgagatccagatgatacagggaattcttttgttaaggttacctggctttttggtgaagctggttttgctgcagcaatattcagattg

SEQ ID NO: 150983 - DNA, 312 bp, Homo sapiens
ttacaacaggttggcacaagggagtttggggggtggtggaggccttctgtatcccgactgtgctggtgattatacacatccatgcatgtgaggagactcatactctgtacccccctgccaaaaatcaatgtgtcagtccaaactgctgcacatgctctacacagcccagcctatctcttgtgattcatccagttccttctcagcctcctcgcccgttctgtcaggtcccgaacacttgtggtcatttttattttctagcagggcacaatcacgctcagccttttgcccaagaacctctcctgcccacttttc

SEQ ID NO: 150984 - DNA, 536 bp, Homo sapiens
atagactcacttgaccccacatgtgctttcatgttacttgtatggtcagcaagacaaatgttctgtcttcccatcctctgctgtaggatttcattgattttacaattataatctctgttccaaaaatggcagagtcctttaggagctggataatcattccaggaactgttatggaaccaagtcttacctggtgcagatacatggggcacactcccatcttcaggttgtatcggaatcttagacactgattaaaatgtcaaagtgaagtcacagctagtagcctttgccattaatataaactgggtagataaatgtaagtgtatataccactgactaaaaaagcaaaattgacatgtgaaactcaaaaattctttcaggaaacactactctttagagcaaagttgttactcagcttaagaattcttaaagttaatttcatcgttttctgttattaagcaagtgataaagaatttcatagactacagtttatatcatctttcctttatctgataatggccaacaagacaaaattgaca

SEQ ID NO: 150985 - DNA, 488 bp, Homo sapiens
ctatcccagggcagcaggcaaagtcccaggcagcaaattcaagcatgtgggcacatcctccagcctctcatcctatcccaggatctttccagataaccgctccctgataccatggcagagttcctggggggagagtgcacagcactgcaaaaaggcagtgctcttgcaggagaaactacagcagcgaagaggaatgagagtaaatcagccccgtaacaatggtctcttcagatcatctatagccaagctataagacgacatctccagaggataggaaccatgtgtgcccagtcacttgtgtgcactgcacacccagcacaggtctgcacttggtagatcctccctctaataaatatctgttggaaaggaaaaaaggaagaaagaaaaaaaatgaatggcaaaactgaaaaattcatagtgccatttaactacacacttaaagatgttaagttttatatgtatatcttaccacaatttttttttttttt

SEQ ID NO: 150986 - DNA, 488 bp, Homo sapiens
gcctcctgggttcaagcgattctcctgcctcagcctcccgagtagctgggattataggcatgcaccaccacacctagctaattttgtatttttagtagagatggggtttttccatgttggacatttaaagacaaagttacagaactttatagctcaagtccctttactctttagagattgttggaggtggtgatggatccaggtccccaggttattataatgtattttaaagcctagagaaatgttactaatgattaaaacatttattgagcattttctgtttgcccggcactgttctaagagtgttatgtgtattaattatttcctttcttccttaagaactctatgagacaggtattagtaatatctttattttatagatgaggaaacaagtaccttatctgaaatcaggcaaccatgttttgattctagaactctctcttaactgtattatattttattaatgagactacataggctaaaatgcc

SEQ ID NO: 150987 - DNA, 594 bp, Homo sapiens
actcctgacctcaggtgatccgcctgcctcagcctcccaaagtgctgggattacaagcgtgatccactgcgcccggcttgcctttctttttagtggactaacccactctaggtctacaaggtaggaggaaaacaacagataaaacattttcatgaatgtcccatctttaggggagacatgaattcaggtgaaaagcatattattgatttaatttcacatgttttggacatttaaagacaaagttacagaactttatagctcaagtccctttactctttagagattgttggaggtggtgatggatccaggtccccaggttattataatgtattttaaagcctagagaaatgttactaatgattaaaacatttattgagcattttctgtttgcccggcactgttctaagagtgttatgtgtattaattatttcctttcttccttaagaactctatgagacaggtattagtaatatctttattttatagatgaggaaacaagtaccttatctgaaatcaggcaaccatgttttgattctagaactctctcttaactgtattatattttattaatgagactacataggctaaaatgcc

SEQ ID NO: 150988 - DNA, 448 bp, Homo sapiens
agtttcctaaaatatctatctactattgattctgtttctctggagaaccctgactgacatgctgatcaatcttagagttggtctccctgcttccgcctcttctttctatgtctacacagcaggtagagggatcctgtcaagacattcaatgacccctctggtaaaaattctctaatgacttcccatctcatgcagaataaaagccaaagtctacgaaactctagaagccccacagaatttctatgaccttcctccttccttccctgatttcatctcctactactttctccctcattccacattccagccagacattagccttctggctattttaacatgccacaaacattcctacctctggggcttgttgtacacttgctgttccctctacctgggattcttttcctccagataactgcacagcttgctccctcatttccttcaagtc

SEQ ID NO: 150989 - DNA, 419 bp, Homo sapiens
agggccccatgcacagatggtgtttatgtaaggaaatggacacttaaaaatttccgatgttcggccgggcacggtggctcatgcctgtaatcccagcactttgggaggccgagacgggcggatcacaaggtcaggagatcaacaccatcctggctaacacggtgaaaccctatctctactaaaaatactaaaaaatgcacagttcttcccatggcccacctccttacttctttcaagtctttacagaaatgtcactgtctcaaagagccttattttgaccaacatatttgaaactgcaaattacctgacatattctcaatctctcttaccctgacctacttcttcttcctagtgctgatcactacatgatgtacttagttgtgctcattgcctttctgttattgcttatcctttgtttt

SEQ ID NO: 150990 - DNA, 274 bp, Homo sapiens
gcacagggagtggttatttctccacacgttgtaaaattccacaatgcctagttatgttttttagtcaaatcattatgttcaaagtaagaaaatgtatatggagaaagaaaaaaaatcaacactttaagatatcagaaataaatgatggtgttgctgttcttctccttacccttaatattattacaagagctcatgcttactaagggatcatatccatgatccagactgaatgcattacatgtttttacctctttcaagtcttcaaacaaccctc

SEQ ID NO: 150991 - DNA, 355 bp, Homo sapiens
tggagaaggaggctgaggatgcagagtggagcaagcagcgaattcttccctgagaagtcaagaaaggcatcccagaaagaagcaaattaaatcttaagaattagtaggctgggcgcagtggctcacgcctgtaatcccagcactttgggaggccgaagcgggtggatcacgaggtcaggagatcaagaccatcctggctaacacagtgaaaccccgtctctactaaaaatacagaaaaattagccgggcatcgtggtgggcgcctgtagtcccagctactcaggaggctgaggcaggagagtggcgtgaacccgggaggcggagcttgcagtgagccgagatcgcaccactgcac

SEQ ID NO: 150992 - DNA, 299 bp, Homo sapiens
ctaatgtccagtggtcctcctggaagacttcctggtttcctctgagatgagactcctcccaaagactgggcgactcagccccttggttcccatggcaccctggctatggaataaacgctggcagtgtggggattactacccccatatagatcattcagtcatcttcttttctgtatgattaattctccagccccctccctactccatttaattttagcatatgtatgataaatcttcattgaataatgaacaactcatcagtgataaaccttttctgaggtattgttgtcctttgaaac

SEQ ID NO: 150993 - DNA, 294 bp, Homo sapiens
  misc_feature (32)..(32): n is a, c, g, or t
tttttgcgatccttttcccgtcattgatttgnaaggagtcggtgtttccggccgcatcgtgatttattattactcaactttgtctccccgaacatttggggatcagagtttttaagataatttggcgggtaggggcttgggaagtggggagtgctgattggtcaagttggagatggagtcatagagggtcgaagtgagtttttcttgctgttttctgttcctgggtgggatggcagaactggttgagccagatactggtctgggtggtgtcagctgatccatcaagtacggagt

SEQ ID NO: 150994 - DNA, 125 bp, Homo sapiens
tgagagcgtgctttggcaattacggatgtgacttggttttgtcccaacaaggacagcctattcctgcagcaaacatttgctctagcagtgagtgctccaaagaaaacacaaggtccacagcagag

SEQ ID NO: 150995 - DNA, 125 bp, Homo sapiens
ccctccgggctctctgctgttccctgcctaggagttgccacgctcatggctaagaaagcaccagcgaccacccacaagggtcgggggatcggttctgctcgtactacacgtacacccacctcctg

SEQ ID NO: 150996 - DNA, 288 bp, Homo sapiens
gatcgtgccactgcactccagcctgggtgacagagcgagactccatctcaaaaaaaaaaaaaagtgaaaacaataagctaattatcagctacagctgactcttctgctcttctgttggtccttactgtgcactaggtacagtggtggtgtttgctggagtgcagtggtggagtcatggctcactgcagcctccatctctggggctcatgagatcctcccatcttggctacccaagtacccgggtagctgggactacaggcacgcgccaccacacccggcaattatttt

SEQ ID NO: 150997 - DNA, 741 bp, Homo sapiens
ctgagatggaattttgctcttgttgcccaggctggagtgcaacggcacaatcttggctcaccgcaacctccacctcccgggttcaagcgattcctctacctcagcctcccaagtagctgggattgcccagctaattttgtatttttagtagagacggggtttctccatgttggtcagactggtctcgaactcctgtcctcaggtgatcagcccaccttggcctcccaaagtgctgggattatcgcgtccaccctgggacactttttatcatagagattattttataatttatctgctgtttagatggcagcattgattgaatctgtgatttttactccataatttaattgaaaagacagatgttcatcaaagccgtctaaaaaaaaaaccagttcatactggctagcatcacaagggtactacctccagatctgggcaagagggtttttgcctagggcctcatgctttagagggccttgcttgatccctctttcagctgagtttatcaccattagctgagaagttggtggagttgtggggacaagttcagctggaacctgtatcccccttctagattatattccaggtaatcaggagcccacagttagtcgaccagatggctggggttctgcttccatgatttgagtgagcttctttctttgtctgtccactggagggcgaatgcaatactggtaggcctgagggattgcaataggcatctgtagctcatggatgaactgt

SEQ ID NO: 150998 - DNA, 125 bp, Homo sapiens
tctggattaggggtgtcagaagcaatctggactgggcaagatggtggatgaccaagatggtggaccaccttctctaggcagtttaaagaagggtagaggcacccttcttcttgggagtgagtgag

SEQ ID NO: 150999 - DNA, 352 bp, Homo sapiens
aaacatctttgagctcctgagtcagtcaagtctgtagctgaccttagctcctgccttgctataataagagatctcacacgtcttctttgttttggcctgtttgagccagacttgtataacctaaacctaaagcatcctagtctatacaaaacataatgaatgtttgttaagcaaggcaagtacaaaacaaaaatacttttctatacaactaaggacgatttttttcaagtatgctcactgaccacttacacctaaatcacactggatacttgtttaaaccgcaaaagaaagaattatgcagcctgtctgaattcttgtttctctgtttaaaaaaatgtgtggattcacacct

SEQ ID NO: 151000 - DNA, 886 bp, Homo sapiens
tcgaacgttcctctgggcctagatccataggctattcctggacggtgcaaacgatagtctctgagaagagagatgagatcacattcttgctttaaaatatatacttttttaaaaaagacgaaaagatatttgtctctgggggaggaggaaatggcgaacaagtaccaggagatgggcattcccttactctaatgactgcagttgagtcttcaggccaaaatagaaacctgtagatggcaactctctctccacctccccgccccgcccgccaccccaagcttataaatagaagtttccagtatcctatttggaagactttccaatactagaggccgaagcattggctagttttaagggttgttgatagtgacagtaaggctagatgctgttcataaaaactgggcgacttgaaggagacagccagaaaaagtgggaattctccaattgcccctttcttcttttcagttttgaagggttttataccaatgctttcttgaaaagactaacttattctgggtttggtggatagggatgggactctaaatgcttaagttgtcgtttgctgagcccttgaagagttccagttattggttgagtaaatggtagccacggctagatgtcaaaacccttccttccctctatcccctacagggtaatgacactcacaacccactttgttgtgaaaaacttaagagatatagaggaggcggtgcagcagcgccacccctcggtgggtgaaactattggcaaaagtcaatttttgaaaaatattgggaagtgaacttatgaaacatttttcccccagagatttaaaaaaaataggggagataaaactaacggataaaaaggactttgaagtttatcaagtagggaagaaaaatgttgc

SEQ ID NO: 151001 - DNA, 735 bp, Homo sapiens
tcgaacgttcctctgggcctagatccataggctattcctggacggtgcaaacgatagtctctgagaagagagatgagatcacattcttgctttaaaatatatacttttttaaaaaagacgaaaagatatttgtctctgggggaggaggaaatggcgaacaagtaccaggagatgggcattcccttactctaatgactgcagttgagtcttcaggccaaaatagaaacctgtagatggcaactctctctccacctccccgccccgcccgccaccccaagcttataaatagaagtttccagtatcctatttggaagactttccaatactagaggccgaagcattggctagttttaagggttgttgatagtgacagtaaggctagatgctgttcataaaaactgggcgacttgaaggagacagccagaaaaagtgggaattctccaattgcccctttcttcttttcagttttgaagggttttataccaatgctttcttgaaaagactaacttattctgggtttggtggatagggatgggactctaaatgcttaagttgtcgtttgctgagcccttgaagagttccagttattggttgagtaaatgtcttgagaactgtgggttgcgttgcctttatgatgccgtgttattggaaccctggcgaaaaatggaactagtgttgcaataatgagttttaaagctcccccatggaaaacaaaaacacaaccaaaccgatttt

SEQ ID NO: 151002 - DNA, 355 bp, Homo sapiens
gcggaacaagcaacacctcagcccctatggacctgaacagtttcatatcccctagcagatgtggggctgttcaatgtagcctttggaaacccatttctgtgtaagtggtgtatgccctgggcaactggcctttagacctggagtcagataccagagtttttttctgggtttgagtatttataccctccgttagcatggataaatcagtcttgctgctagtccctatgtgataggacatgattattcctagagaggagtggctttctgcatcaagctcactgggttttataatcaggatgatggcttcaatttttgcttgttccgctggtaccgagctcgattcgatcatgctccc

SEQ ID NO: 151003 - DNA, 198 bp, Homo sapiens
ccatgatacagtaatgaaggaattgctccactgaatcgagacataaacctattcattccaggctaagctagtcacagatgcatggaagatagaagacccagcatcttcctgaggaagactcatttccaatgcctgcatttcttcacattcccttgttgttgttgttgttgttttaataaacatgtattgagtgccact

SEQ ID NO: 151004 - DNA, 348 bp, Homo sapiens
taactattcggtactaggcttagtactaggtgacaaaataatctgtacaacaaacccctgtgacacaagtttacctacataacaaatctacacatgtaccctgaacctaaaatgaaagtttttaaataaacaaataacatttttaaaaaaaagaacgccagagattttataaaaaggatttgaggaacattacaaacactaaagacaagcaaaagcagcatgatatatatgaacagtaggagtccctaaagaagcaaatcaaaagaagggaagagaaaaattagtttaaaaaacaaaaaaaacttcgctgatactatttttgaaaaaattgaaactaggtactgaaag

SEQ ID NO: 151005 - DNA, 190 bp, Homo sapiens
gaaggatatacaaggattatgtacttataactttaaaagattatatttataaacataaaaattaatagaagctacattataaaaacataatcagctgaaacaaacctccaagttattattattattattttttttttgagacagagtctcactctgtcacccaggctggagtgcagtggtgggatctcag

SEQ ID NO: 151006 - DNA, 311 bp, Homo sapiens
ggggtggcgagcttatcagcatcatgtactgtgccctgaggatgcactcaccactgtgctaagtcatttacatgcattcttctcactgaattttaatcctcacacaacccatgacatgagacactgatattatctcctgttttacagaagaggaacctgaggcacagagagaggttaagtaaccggctcaggattctagagcaccaagtggcagaacctggaggaaaacccaggtgtaactgattccaaagccaaggggtctcaccaacttgccatcgtgcctctcaggccagttggaatatacggagggt

SEQ ID NO: 151007 - DNA, 278 bp, Homo sapiens
gatgcgcacccactctagacacttctttgaaaacttcctgatagtccccagtagaatggatcactcccacatctgctcccatagagaccggggattttcttcctcttttgtgtgaagtttattttccattacagctcccagcaatggttagtttgtaataaccatttgtggaagacatttccccactattaagagcctacaagcccatgcttatgactctaaaatcaaatctataaaactaacagccacttccaaagtgttctcacattttggactag

SEQ ID NO: 151008 - DNA, 348 bp, Homo sapiens
acatcccatatgtcacacctcaccatagacctgggtgccaaatagcctgaagagtctgaactcacgttggcagttaggaaagtgctcctacagacgcatctacggttaacatagcatccctatggccactgtctcccttgatccccacagccattctaggagaaaggcagaatgtcataatttgctaaaagggatgctgaggctctgggagggaaagggacttgcctaaagccccagggtgaagcagcatctctggactcccagtccagtgatcttgcccaatactttgctgcttgcctatacccctctaacttggtcaacagcacatcacagggcaagccccaatcc

SEQ ID NO: 151009 - DNA, 311 bp, Homo sapiens
ctacaaagacaaaaataagattacttagataagtaactattttaattaagaaatatcaattgttgatgttgttactcctcagaaataaataattcatatcaacaacattaataactggttaagagttctggtagccaaaattatcactttggcatcatagtataggaaaactatgttgtatcttcttttagggcacttaagagactgaactatttcttcctctaaaaacattacaggagaatatttatttgtagtgtgctcagcacacacacaatatagtggggaaaaaatcccttttaacttgttcaaca

SEQ ID NO: 151010 - DNA, 198 bp, Homo sapiens
ggcagtgagtgtgcattagtcaggttgcactagtaaatctgtcagaggacaagaatgtgtgaagagcaagaacagtgccaggtcggaacatcctggtgttggaactgcagcattctgaggagctgcaaattgtttggatgcactgaaggaaaagggtatgtggcttcacaagatcaagagacgaagcagataggagag

SEQ ID NO: 151011 - DNA, 703 bp, Homo sapiens
acaccagtggtcccagctaccagggaggatgaggtaggaggattgaggatcgcctgagcccaggagttcgaggttacagtgagctcgaggttacagtaactgcagtggtgccactgcactccagcctgagctggagagctggagagcaatactccatccctacaaaataaaataaaaaacaaatggaaataaccaaaaagggtagatctgaaaagatggcaaagaaagatgtttatgtcctaactactttttaatcaagtgagaaaaatatctcttctccttaggtatgagtactgccaagatatccaatgtaaattaaaagactcaaaatgaaaagaaaatccaacttggctggacacagtggctcacatctgtaatctcaacactttgggatgctgagaagggtggatcatttgaggtcaggagttccagaccagcctggccaacatggtgaaaccccacctctactaaaaatacaaaaattagccggacatggtggcacacgcctgtaatcccagttactcaggaagctgaggaccatcgttgcaacgatggtcctcagctccctagtagtgggacacaggcgcccacacaaaccggctaatgtttgattttagagagacggttcacgtgtagcaggaggtctcgattctgattgtgaccacggcaggttccaaggcgggtacggggatacggccgccca

SEQ ID NO: 151012 - DNA, 527 bp, Homo sapiens
tttcccagtcctgttggcccttctcccctacattcctcctaccacctgcctctccactcttcttataggaagtcccacgttggcacagatggccaccaccagagaggctgcctggctgctgcacatggccctccaagctcctccatcctttcctttggttggttttctctgctgcttctcagcagtcatccaggtttcaactcaacctcctgcccctccttcactgagaaaacagaagccactggcacgcattccatcttggtgcttctttctctctcctccattttgcttcccatccttcactcacgtaagccattcaccttcttccctctcttctcagaggaagtaagtcccttctcctattcaagacagttccctcacctggtgcttggccccggcctcctgtccatccatgctccctcatctgtgtctcctgtgtcactctcccacagccagatccatgtcctcaaccaaaaaatacatcccagtttcccacctccacccagctctcctcaggaaaaaaaaca

SEQ ID NO: 151013 - DNA, 325 bp, Homo sapiens
ggtgggaatgatatagccactatggaagacagaatggtggctgctcaaaatattaaaaataggccaggcgcaatagctcatggctgtaatcccagcacttgggaggccgaggcgggtggatcacctgaggtcaagagttcgagatcatcctggccaacctggtgaaaccccatctctactaaaaatacaaaaattagctgggcagtagtggccctcacctgtaatcccagctactcaggaggctgaggcaggagaattgcttgaatccaggaagcagaggttgccgtgagcacacatcgtgccactgcactccagcctgggcaac

SEQ ID NO: 151014 - DNA, 662 bp, Homo sapiens
ttgagaattaacctgctgtgcgtggacaggctcttggaccttcaatctatttcacagcctgcaacaagaccttcagtgaatctagatctaggtgatgatgaaaccacattggctcctttccacattctgatgaaaatactctgtaaaaagcctaatagggctttcaaatgattccaatgtaaatatttcctttttatggaagggattcaaactgcttctaggtagagggaacgtctataaaagctaagtgagctagaataagggaacttgtatatttccttttcaaatgccactgtcttatcaagcaaaggtttctccacttggagaattctcttcttctgagtttgggggaaaaagtggtgatcagaaggtttgaccaagatacagtggatttttctcctccctataggctgagccaactgatagggaaatggggaaatgagctatggggagagctgaagagctggcccagaggagagcctagagcagcgtgagggtgggagccacggcgtcgcaagcatcctgactcccacagaccggcccaggagaagtctgagtgcaaggtaaggattcaaccgagtcaggaagcccaggggcagaagaggatcagaggaagtaagatgtgatagcagttattagaaaagcactacattcagctgggc

SEQ ID NO: 151015 - DNA, 499 bp, Homo sapiens
caagctgggcttgtgtatttttcctcacttcagttgttcttcccatagttcatgtagggaggcactttggcttttgaaacactacatttctcaatatttaagcacaatttattgtccttatttttcagaacccattaaatataagggtcagaacctagaaaatcttatgtgctggatttctaccctgtatgattcttttcatccatgctttgcacttacgtaggaatatacataatttggtctgaagaagtataggaacagttgagcacattacttcaccactggaagaataggaaccagggaaaaacatcagcctctgccacttggagcactagaggatgacggaatgtcttgtatatgcggtcaactgttcaggatttactactcaattggttgttcacaatcagggaaatgattggcttcttggttgtttgttgaactttctttctttatatggttaaattattttgttttgataaaaataaaacttaaaatgcaa

SEQ ID NO: 151016 - DNA, 374 bp, Homo sapiens
atttacccttctactgccatatctttgtttcatgcacacacgttttgctggaccaatagtagataacaatgtttcttaaaatgaagatatgggctgggcgcggtggctcacgtctgtaatcccagccctttgggaggcaaaggcgggtggatcatctgagctcaggagttcgagatcagcctggccaacatggtgaaaccccgtctctactaaaaatacaaatattagccagatgtggtggcatacacctgtaatcccagctactcaggaggctgaggcaggagaattgcttgaacccgggaggcagaggttgcagtgagccaagatcgcaccactgcactccagcctgcataagaagagcgaaactccatctc

SEQ ID NO: 151017 - DNA, 268 bp, Homo sapiens
tatcgattgccaccagccagccctgacccatgtttgaaccaaattccagccaaccgtggactagtgcatttcaaatatctgattcaatgtatccaagccactgcccaacagacaccgcacgttggaaacaactgtgaggtgggggtagaaaaggccaaaccaaacagggcggagtgcaataagggttggcaagtgtcacagtcactcatgtcaccaatcctgattccctgtgaaacatactggttcctttctcacatatcgaggcatg

SEQ ID NO: 151018 - DNA, 515 bp, Homo sapiens
agctaatactgtgagaggtaggagggaagtaacatgatgaagggaatagcagatctgtgtttgcaatctgacttgcatgctcattaagtctaaaagcaggcaaactgtcaccatgattttaattcactctcttttatgtttcatgaacccacacagttggttttatatatgttcaatgcacacttgacatgcctccacatcctcattgtgtgttattaatactgtaaatatgtaaggcattgttgtcacagtctctgggatcatagacttgattgatttctcaactctgtatcccgaggtggataagttaccttaaacttaagagtttatttactcagccataaaaatggatactgtgatatccactttgtagtagtcttttgcatgtctgagatgtgtaacccctttagtccagtacttggtacaaatagatgcttagtaaatggagatgtttttgttagtataagaagagccacaatttttatttaatacttaaaattgagaaatagggaaat

SEQ ID NO: 151019 - DNA, 392 bp, Homo sapiens
ccatcaccgtcatcatcaccattcatcatcactgtcatcactgtcattatcaccatcatcatcaccaccaccaccatcaccatcactatcatcgtcatcatcatcactgtcaccaccatcaccatcactgtcaccaacatcatggtgcttctcaacctttgggctgctttgggtcgtgcttgacatggcacattcctggtgagttagctgttctttgggggttttctactgttggtgtggtgattagggtagtcaggacaggatgagtataggcatagagaacccaagtggatgatggtggagtgtgattcttctgaaagggtcttcatgagaaccactgatctagaagattctgggagaatctcacgtattctttcaggcccaggagtaag

SEQ ID NO: 151020 - DNA, 315 bp, Homo sapiens
catttttgctctcttcacttcatttatcatttctccctgtttcactcttcatagcacatttgtactctgtccacacctagagacctccctgttgaagttcttcacattctcttccctagagagggttaacttgttgagctcagagacttaaacttaaaataaaatgtaacagatatgtattgaatgactattttattttagctctaggagaaatgcaaagatatatcatccatagaccctgaaatccagctaagggttctgcttatacacaaggtgaaaggttgtgataatgcacattaaacaatagaagagtga

SEQ ID NO: 151021 - DNA, 869 bp, Homo sapiens
atgagggttttctctgtatttcacaaagtcactgtgtggtctgtggcagaaaggagggagatctaaaaaatgatttaaatcgtaaattattagaatttggttgcaacagaatttgtgggggagggttttgggggttttgcaagctattagcataatttaaaaaatacctgctttgtaacaaaaactaaagctgattgaggttacagacttctagttattcttttccttctatttccttctttcctttggtctgtatgtttcagccctgtgaaatagtcaagggtttaaagtctttgcacaagcccagagttcttgtacacatctgtctgtcagtgtatctggcagcctttgtgactgattactcacttccccacaatttgactgtgggccaagaattgtggtaggtgcctgtggtagggatggaaatgaataagacctattcacccctcagggtcaccccacctggtatcacatagcagaccacactcaatacattgtgtacagagtgataagaattaaataggatgctaaggagactgactcaggttgaggaaggatgggcttctaaggggtgatgtgcttgagctgcatcctgaattcctaaatgggaaagagctaaatttttatacacacacacacacacacacacacacacacacacacacacacgtttacctacctagatgttaatactcacctttcatcactatttttaaatgttgattacacaattacaatgacaaaaagagagatcatagatgttataacaaatgtaactttatcttaatttttttgtttgtttttgtttttgtttttgtttttgtttttgagacagagtcttgctctgtcgcccaggctggagtgcagtg

SEQ ID NO: 151022 - DNA, 189 bp, Homo sapiens
gcatggactgtggtcaagtccttccacgataccaaagttgtcatggatgaccttggtcagggtgctaagcatttgtggtgtaagtttgaatcaaggatggtaatagtccctccctaaaactgactctgttcttttctttttaattaatttatttttttattatactttaagttctagggtacatgtgca

SEQ ID NO: 151023 - DNA, 134 bp, Homo sapiens
tctcacccacagggagtaatttcctcacaatgtgcagaattagattagatgttggtatggtgggctgaggaggacggtagaatttcagaattatttattcccaggaaatacgtagagaatgggtatttcgttct

SEQ ID NO: 151024 - DNA, 145 bp, Homo sapiens
taattttcatgcatatgtgagatatcagccttagagaagtttagtgacttatccaatgtctcacaaccagaaaatgatgaagccaaattttgaacctcgatatgacttcaggttcagtattctgaactaatttacaatcaattct

SEQ ID NO: 151025 - DNA, 240 bp, Homo sapiens
ctagacacggtctcactctgtccccaggctggagtgcagtgatgcagtcctagctcacggcagccttggactcctgggctcaagcgatcctcctgcgttggcctcccaaagcactgggattacaggtgtgggccactacgcctggtgatttttattattttgaagacaatttttctaatagtttttagaaagaaaagcattaattttgtttactttttcaaatacatgagttatacttgg

SEQ ID NO: 151026 - DNA, 526 bp, Homo sapiens
tatcagacatccaaatggagacagtatttactgagcacctactatgcaacagacacatcatttaacttttttccttcttttttgctaatgctaataaccacagaactagaaattaaaaagtactaatttatttggaataccaggaagtgtgttatatacaataatgccagtaaacaagtattctcaggtctaaaaggtataaacctaaaaaagaaatgtagatgtatacatatgatagtgatataaatttgtcatgtgttagtgatggggcaacacctcaaggttcccctggaggctgtccacataaaccagcttagtttatggttctataagaggggcccaataaccatttattgatattgataatgatgctaataatgttaaagatagtgctggcagtttgaccccttgtagggagtatttgaatagagcagactctaatgtagcatgaaaaagcataatcaacacttttaaaagtttgttttttgtctggatagttaatttactttggaatttcaaaaaaaaa

SEQ ID NO: 151027 - DNA, 257 bp, Homo sapiens
aactccgacacatctgagcatcagaaggaacaaactccggacgcaccaccttaagagctgtaacactcaccgcgagggtctgtggcttcattcttgaagtcagtgagaccaagaacccaccaattccagacacagagtcactactcaaatcattctcatccaaagcttgtaggataggggtttttcaaaggcagtttcggggaaggcgtgggggtggccagggaacgggtgcctgctgctgattggttgggcagaga

SEQ ID NO: 151028 - DNA, 572 bp, Homo sapiens
aatcgaggctcgtaccggtgttatcgatgccacttaagttgggcaatctagcagagcaatgtcttaatgctcctggcaaaagatacaggatatttctgatgagatttggtttcacagttggattctccatagtggagacatttaagtttatacagctagagaattaaaactgcagtgaccacggctttcgtcacacacccatttgtttggacgatttccctccctaaaatcaaggttttgttggaaagcacagtcccgcccattcgaacctccagggtggagttgagaagttgtgacacatcactggacgctcctcgctggacatttctacccggagctctacagacctcggggtcgcggtcaccagctcatagcattcccacttcccaggcccctttcctaccgcttacacagcccattcctgggtccctaccaagaagtctggaatctgtcccattgggagttccaggcactttcgggactcagatacctccaacagcaccccgagcattcaccctatcttcatctagctccccttcactccgcggcccaccttccttatgacctggaag

SEQ ID NO: 151029 - DNA, 467 bp, Homo sapiens
  misc_feature (10)..(10): n is a, c, g, or t
  misc_feature (17)..(17): n is a, c, g, or t
ggtcgctctngaggatncagtgctactccacaaacaggagtaatggtttaagctgtttccctcttcccctcccaccaccaatcagcagcagactgctagaggacagatgcaaaacagttattagaccaggcttagttagacatggaggatgcatcttaacaagttagtacctttttgcaaagcatgaagactaattcaaagtctattttctggttttgctctaccagtacggccaaaaccatttctttttaagtgagaagtggggatatggtcaggtttgattccagttgaagttgtgagctgcacagggctggtctgagcccagtggcatctttccaggtgtcagagccatgattttaagctcctgttaaattcacagtgcttagtaaccataacttcttggtttcatgatcataggggtttttgcatagctgccacccccattttctgtttgtggaggtagcact

SEQ ID NO: 151030 - DNA, 204 bp, Homo sapiens
tcatggtgaaacacacatcacttaaaatgtgctgttttaccatctggaagggcacagttgagcggcgtgaagcacgttcacattgctgtgcaaccgtcgccaccatccacctccagaaccttctctctccccagactgaaactctgtccccattaaaccctgacccccagcgcctggtaacctcttttctgctttctggctcgg

SEQ ID NO: 151031 - DNA, 809 bp, Homo sapiens
  misc_feature (45)..(45): n is a, c, g, or t
  misc_feature (51)..(51): n is a, c, g, or t
  misc_feature (526)..(526): n is a, c, g, or t
  misc_feature (555)..(555): n is a, c, g, or t
  misc_feature (600)..(600): n is a, c, g, or t
  misc_feature (627)..(627): n is a, c, g, or t
  misc_feature (636)..(636): n is a, c, g, or t
  misc_feature (656)..(656): n is a, c, g, or t
  misc_feature (665)..(665): n is a, c, g, or t
  misc_feature (678)..(678): n is a, c, g, or t
  misc_feature (688)..(688): n is a, c, g, or t
  misc_feature (692)..(692): n is a, c, g, or t
  misc_feature (701)..(701): n is a, c, g, or t
  misc_feature (709)..(709): n is a, c, g, or t
  misc_feature (724)..(724): n is a, c, g, or t
  misc_feature (737)..(737): n is a, c, g, or t
  misc_feature (745)..(745): n is a, c, g, or t
  misc_feature (754)..(754): n is a, c, g, or t
  misc_feature (756)..(756): n is a, c, g, or t
agatgccttctgccatgattataagtttcctgaggcctccccagncatgcngaactgacctgtgagagaaagccggggaagcagaaccctttgatggagacaacagagtcaggacaatattgtttaaaactcctaaatccaaacatgcctgaagctataagttacttctgaaatttaaaaatttgtctgtggtatctgtttattatggcagcccagtaagactaagacaggccatcacaagacgtgaacgttttggaccttctcttgggccctagtaaacagaaatcaggctatttattaaactaatccacgttctgaacagttattgctactggaaaccagtcccgatccagaccacaaaagacgattcttggatcttgcacaagaaagaaaggctactcctcacagtaaaagagcacttggtggaaattttgttctgaagtgaaggctgaaaccccagagatcaaacactgtactcaagtatacaaagctggactcagaccctaacactggctttaaaatttgncctaacttagaccataatgcctctctttncagctggatctacatgcctccactctggcttttacaaggctctgnactattgtcagaacttgggaattctancattgaggnaaccattgacacatttcctngatgaaaantgatacacttatncaagtcgatntgancatgtatgnctatttgnaccttacaaaactgnatggtgccaaatngattgaantgaaagtgncncttatgtcttagaatacttggttaaatctcagaatcagttgtctgaacaattt

SEQ ID NO: 151032 - DNA, 342 bp, Homo sapiens
agagtagcgctctaagatgtgctaagtatatctgcccctttgtgggcaaggtaccagaggagggagatatacgtctgccccttacagcaaggattccatagccgatggtgtctggatagagactgtgataatgttagccccatttgaaggggacggccactgctcagctccagctgcttgttgccatgtgctgggatatttatgtatccacctaacctttatatagctcttgcaatgtgtcaaacattgttctgagcacgtcataaatattagcttgcttaattacattgtcataacactgtgagggaggaatattgttatgattctcatttcagagttgaa

SEQ ID NO: 151033 - DNA, 190 bp, Homo sapiens
aaggaatgtcctatagggaatccatgtgcggttgtccagaaaacgtaatgagggtgaagattcaccaaataagctctatactttggttacctatgtacctgttaccactttcaaaaatctacagacagtcaatgtggacaagaactaatctctgatcatcaaatacatcaaataaagttataaaatagca

SEQ ID NO: 151034 - DNA, 186 bp, Homo sapiens
cccatgaaggaagtggaaaagaatgatgaatgtaatggtgatcgatcttatagggactttttggaagaataagaaagggaagcctttcagctttatggccattcactaggaatagaaagaagaatgatcttttcttcacgtgatatatgctcagtttcttctagcatccctgtattgttgctattg

SEQ ID NO: 151035 - DNA, 395 bp, Homo sapiens
cttgggttccttggaagcccaagaatgagatttgggtaggtgcggtttattcaaggtgggggttctcaggagatggaaagcgaggctaggtggatgatgttggagacgactgagccaagcgggaattctcgctctggctgaggctatcctgcatgtgacgtcggatcttggagtggccactgctgtaggactgcttgagccgactttagaccagcctactctatatggtgaaaccacatctctactaaaaatacaaaaaattagccgggcatggtagggcatccctataaccccagatatttgggaggctaaggcacgagactcacttacacctaggaggcagaggttgcagtgaactgagattgtgccactgcactccagcctgggtgacggag

SEQ ID NO: 151036 - DNA, 1051 bp, Homo sapiens
aattatttatcaaattagttgagaggcattggtgggggttcgggatctacacattaagaaacatagacatgaacgtctccatggaaagactgggaaaatggattgcaggttctagcaggatgtcataataaatggtgcatatccagagtgcaagatgattcagtctcaccaagaacactgaaagtcacacggctaccagcattattgtgataagaactactattttgggagatagtttagcaaaggtgccatgtagaaattgattaagtcagaggtatctttaacttgccaccacagagaagagattaatttcatatacttccattgagaagagagataagaatacaaaaccaagctgatttgcaggagtaaacttgatattcaaatactatttcctgaatgacattttctgagacatgctaattgtaattactttcagcttcaaaacataataaatttatctcatagtaagcatatagatggaataaataaaatgtgaacttaggtaaattataaattaataaagtatatttttaaaatttccattttaatttctgtttaaattagaataagaaacaaaaacaactatgtaatacgtgtgcaaagccctgaactgagatttgactttaccttgagctttgtcagtttacgatgctatttcagttttgtgctcagatttgagtgattgcaggaagagaataaatttctttaatgctgtcaagactttaaatagatacagacagagcattttcactttttcctacatctctattattctaaaaatgagaacattccaaaagtcaatcatccaagtttattctaaatagatgtgtagaaataacagttgtttcacaggagactaatcgcccaaggatatgtgtttagaggtactggtttcttaaataaggttttctagtcaggcaaaagattccctggagcttatgcatctgtggttgatattttgggataagaataaagctagaaatggtgaggcatattcaatttcattgaagatttctgcattcaaaataaaaactctattgaagttaca

SEQ ID NO: 151037 - DNA, 308 bp, Homo sapiens
tgaaagaataacctccatgagaaagctaggtcttactggctttctgaaataaggatgagctgcttgtgaattgttatgtcccgtggaactggatcttggcttctcctttttctctacacaggtttgactattaataatagcattaggacctatggctgtctctgagggttgtcgtccattactaatgtgaggctcctcgtaagtgctggttatggtttatgagtagtggtccccttcattaattcagccaaagagcttccaagagaggactatggaagtaagaagtgagagaaacccatacctgggac

SEQ ID NO: 151038 - DNA, 211 bp, Homo sapiens
tgccaccatggtcctgaaaaacagaaaaataatgctcaaggatctgatttaaagcaggccatgttgtgcctccatctccaacttttccagtgaagctatctagagatttaaacaggacaaaaacacagtgtgtccttaccagtatttagtttggtcagtcttcttaacttcagtcattctaaatatgtgtataatgatacctcgtgatttt

SEQ ID NO: 151039 - DNA, 569 bp, Homo sapiens
tcttctcccctgacaaggatctagacccagttgtagagggaggcaaaaacaatccaggcctcttggaggttctaaataacagacagaccagttgacattgttagagaggatgactcaagtttctaattcagcacatggacagatgctcatagcttcagtgaaaggtaagttttgacacattaaattgcccagaaaatccagatctggaatcaacgtggtagagtaagttagatcacccaaaaagtcaagagtcacgtgaactaaagatggttaagaactgatttggggcgaagttttatagaacagtatttctaatttagaaaacaatacatagactaacaggagatacaagacaacgagggttgggggaggattaagaagcccagtgaacagaattcccagaagagtataattaaatgtggtccctgagtggaatcctggaggaccttacctgcagccacgtggctgtggacagctgcatttcagtggtgacaaggaggaagcagctgtgagatgcatggtgcaacagggtctggttactgcattgtggtagtgtggagccactgagt

SEQ ID NO: 151040 - DNA, 354 bp, Homo sapiens
aacgggtgatgcggttgtgaggaccagggagagtgacctgggagggagcttagggatcacctcagccaactcttcattttaaatataggaaaaagaggtgagaagaggtgaaatgacttgcccaaggctgtctactgagggagggacccgctcactatgcagctttgcggtggcccatcaccaatccctggacaagtcaggctcacagaccagctcagctataagcagaaccaagtccagaacctgccttactttcttcatggggttcaatgagaagaagccccttcacactgggtaaggagcgccatcccgtcaagcactccaggtggggggacttctaagcagcctggagaa

SEQ ID NO: 151041 - DNA, 340 bp, Homo sapiens
tttgagaccagcctggccaacatggtgaaacccgtctctaccaaaaatacaaaaatttagccaggtgtggttgcatgtgtctgtattctcagccactgggaggctgaggaaggagatttgcatgaccccgggaggtggaggctgcaatgagctgagatggcaccagtgcgctccagcctgggcaacagagtgagactccatctcgaaaaaaaataaaaattaaaaaacaaagatgtatcggacatggccctggtcatttgtgagtgcatagattaataaaggagtttgacattataaattatgacatagtatgatatatatatatacacatctcatatat

SEQ ID NO: 151042 - DNA, 676 bp, Homo sapiens
tgcgcgtcgatctagaggtcccctcaacgctttatacttccctgcctcagagtgggtcggtcagaatggtttaacaatctttgtcctctttttatcctggctaatatggactatttatgctattctaagaagcatgtcatttagtatttctcatttcattcttccaacttggtacttttatgttttgctaaggaggaagaaaggtgataagtttagttacagtttctaaaatgggtttgaatgattgggttttatcctgaataaagaaactccgctatattttgttatttactttacttgacagcagtggcttcaccctaagatgacaaatggtcattatgagagagctgtcatttatatcttctcagcaaaatactcctctggtttaggtaaatgttaaataggagagaggaatgaaatgcattagtaaatatgctgaaaaatgttcaattcaactcaaagaaatgccaaataaagcaacaataagatcatttttcacatatggattagcaatttttttaaataatgatctttaaatctggtgaggtgctactcatacattgtcgaccggcaagaaaattggtataaactttctgagaaataatttgatgctgtatatcagaggggtcacaatgtttatgcccttttgagctaattcttcattgcggagataaag

SEQ ID NO: 151043 - DNA, 323 bp, Homo sapiens
ggtatgtgggcatagcatctgtgctacagctacgggaaaggtcatgaagctggtagatgggggacatgtgaagggggaagagagaaaaacgatatttattgtgcacctttatgcatcctgctagatgcttacgtcacatttatctcaattactgcagccatacaacaatcagtaaagttctgagtataagatatgttaaataggttaggccagaggataagatacattagactattaagaatgatttttaaaaagctataaatattttgaaataccaacagaaaaggaaaaaccatctattaaaagtgagttaagctatccct

SEQ ID NO: 151044 - DNA, 521 bp, Homo sapiens
tatcacaatgtctgacatcaagtgtactccaatttctgtgaggggagagaagtgattactcacccgtgggccttgcacccatctcccacccttgcttagtgccaagtggcatgctcttggcattcaaagaagtttgtgaaagcatcttacattgccagcacctccacgaggccctccagatcacatctgcctgggaaggtatctgctcaattgccatcattcctggcttgcttgcacagtgtctctggctatcttccctaccagcctcatgtctcaattacttatgggtcagtctcagaggccacactggaccatccacgggttggaagaataaaaatgggaagggctggtaggagaggaaaggtagaaggctattctcttcctaaaggatattccaccccttttctgtttaaccaccaccacttcttcgagccctcctagtgtcctagccttgatgtcttactaaacacacagacacacagacacagacacacagacacacacacacacacacacacaca

SEQ ID NO: 151045 - DNA, 299 bp, Homo sapiens
agaaaaacacccagtaggtgtgctttttgttttagataaatgcatttgtttgcaaaatattatcctatttcaaaagtattttttaaatattcagtattgatatgctgagattaaggtgatttatgtcccagtgacgttaaaaagtgttgacttgattttgttttagtgaataaaataactagaccactgttaagtttcctgaagaaggcgtaaaattaatctgaaaataaaagaatcagaataagttattgcttggaaactaagtactatttagacatcttcatttctgaattgtgagg

SEQ ID NO: 151046 - DNA, 550 bp, Homo sapiens
  misc_feature (3)..(4): n is a, c, g, or t
tanntgagcagaagaaatgcttggacctggaaggcaggttgcagtgatccgaaattgccccgctggagtgcaggggcacaatcacagctcactgcagccttaacttcctaggctcaagcagtcctcccaccccagtgtctcaaatagctgggaccaggtgtgcaccaccacacctggctaattttttgttttaattttttgtagagatgaggtctcactatgttgcctaggctggcctcaaactcttaagctcaagctatcctcctgcttcagcctcccaaagtgctgggattataagcctgagccaccactcccagccatacgtaattttgtatcatgagttttcacttactaattacacaacaattttatcatcttaaaaaaaacttcataagtatcatttatagtaggtttatatttccattatatatatgccaaatttttaaatctttattatattgtagcacacatgttatttttaaactttaagatttaaagtatttgttcccttaaatgtgattattattttcattattaaacatcgactgat

SEQ ID NO: 151047 - DNA, 362 bp, Homo sapiens
cggcgccactggtgcccactgctggctcccactggttgccctcccacttggttgtggctcccacttggctgcccgacccttgctgtgacctctccattcatttattcccagttggacatcagagtctgccatattttggctctaaaacttttgctccaagaaaattaacagtgacaggccaggtgcggtggctcacgcctgtaatccgagcactttggggggccaaggtgggcagatcatgaggtcaggagttcgagaccagcctggccaacacagtgacaccccatctctgttttttttttttttattttttaagtgaaaaataaataaaggagatggtggttagtgggctccggccaaca

SEQ ID NO: 151048 - DNA, 223 bp, Homo sapiens
cagccccttgttcaaacacagcctctgaatcgccagaggcttccggtgcatactctgaggcgcaggtgggactcgggagtgagaggtttcggcgaatgaattgggattgcctacttcttcccagtgcagtggagcttggttctgtggtcaggtccttacgccctgtctgcctttctcgtttctttatttctcgggtagtagttgtggaatcaaatgacctggg

SEQ ID NO: 151049 - DNA, 437 bp, Homo sapiens
agcaagctaatcactatcttatttgtaagaaataaatgaaaagtgattcattatgaaatgtttggatatattacagtataaaatataactaaccctttcttcacttttggttagatgattacaacaactacttcgcaaagaaaacttggcctgcaggaagaaattcattcattctaccctcatacgttaccatacattaaaagtggaacactgattacttaaagattagtatcaggaacgaaataaccattcttgtatatatttgtaattcagagttttatgtatgcattgcatgatgaaagtagtatttctagaccactttttgggtcaatggctctttttattctgagagccaagtaaaatagattgttttaaaactactattgttatgtatttaatatgttttccaatgctttttatgggaaaaagttatttgt

SEQ ID NO: 151050 - DNA, 188 bp, Homo sapiens
cacagcttcagtggatgcaagtatgatctctccgatgatcctgggtcccttcagaggcctttggatggttctgagcagtagaactcaaactgtgatcccaggaaggcagcatcagcatcacctagcaacttgttagaaatgcaaattcttgggccctaccccagacctactgaatcagaaactctggg

SEQ ID NO: 151051 - DNA, 171 bp, Homo sapiens
taaatcctgacaagtccacagatttgtacctggactctcttcaaatccattgatcaaaagctgccatggcagagaaaaggagagaccatgaaatacacaatggctcatgaagcatctccctgtagtgacatatgtcaggtctgctcactgttcattgcaaaaaaagcaagt

SEQ ID NO: 151052 - DNA, 202 bp, Homo sapiens
tctgctttcccagccactctgtcttctcctgaggggttggctcctagggagagaactcggttcaccgccaccttccactgcccagaacactttccagcccccacgggggcccgtaagtatttaggaatgaaagaaaggccccctccaactggatggggagggcttcaaggggggctgtggcgcattcacaactcccagtgcc

SEQ ID NO: 151053 - DNA, 739 bp, Homo sapiens
tttttcaaccaacacatcataacctttttaagtgaaatcactttaatatggttttctgaagcctctctatctgtttaccaaagtttatctaacagtctgcataaggtaaagaatatactgtgtcacattttctatttgttgaaggaatttgtgtggaaaatagtttcccattgaaaatgtcaacctgaattgtttaaatgggcttattctgtacattgctaaacaaaaaatggggtagcatggataaagagcaaactaagctttattagtgctgcaactaatataaacaaatgtttatatttgttgcttcttttggttagcaatgatatgtcaaagttatatctgaaatagtcaaatctttgggaaacagaatctagtaacaatttgaaaagtaatacactatcccatttttattggctttatgatggttgacataatgttgctgtgacatttaaacattcttgtaccaatattgtcttttaccattattatatactgcagttaattggctttacagttctttatatatatagcaaaatcctgaaagaacatatacctttattttgatgtggcttgaagcttttgaatgggtgaataaggatgatagaaaggtttcaaaatcaagcaacaaagtcttaaagtgataaggcatggcttaaagatcttttgatcaaacatacctgtgtttgagatagatttaagagccctaaatgcttatcaccattcactccaaataaaa

SEQ ID NO: 151054 - DNA, 432 bp, Homo sapiens
gctcgcgcgtgtgtgcagggagtctataggataccctgtgaccgcaattgctggaacccgggaggcagaggttgcagtgagccgagatcgagccactgcactccagcctgggtgagaagagtgaaactccatctctaaataaagaaataaaagagaactctggggcaccatgtgaggggaactccaaggagagtcttgggtagagacggagcgaggagcacaggcaggatgctgcgccttccaggaaaggtcagtaagatgtccccactggcaatgtgattctgggaccatcgagaatgggttatttgctttgctgcgtgcaaactcctctcatcgctccaatcttttagggaagctgctcacacaaaggccttcttgcagaatcaaggagaaggtacccatttcctctgccactcttctctgcccccagcc

SEQ ID NO: 151055 - DNA, 395 bp, Homo sapiens
gagggactatcccacctgggctccatccctcttgaaagggacacctatctgcctctcttagttcagattgctggaaagttcttctatacaccaaacctaatattgtggtcttggaactgtcactcctgatccatgtctgctccccaaggccccagctccccaggtagcacatctgctccaccccttctcttctcccactcccaaagagcccttctgttcttggagacatttgtcagaggcaggattcatggggccttcctagtctgtggtcctttctatgaattccaggttgtcacttagcccctccccagtgcacctgctgtgtacccattactgtgctgaacactgggcagatactaagtcaggcatcatctcagtcctcatggattcacagt

SEQ ID NO: 151056 - DNA, 411 bp, Homo sapiens
gcagggcattccaagaaagcaaatgtatatattaatacatacagtctattttggagcataagtaggtggcaccctcaaagaggccttacctatttttcttttcatagcagccattctcctttctagcacttactcccatttacactttggatacactggctagcttcatggcaacacactttttggtagaaagcaagaaaaacctaggccctggtgtccccgcaccatggtttaatacctgtcatagacaacctaggttgctgccatagggcaacctagaggacaaacaaatatttaaagtgtatacaaggaagaactcctaaactggttgtccaaatagcctaggagttctcaatttgccctctacagaaaggctccaggaactgggtgaaggaacctctgaaaatcatg

SEQ ID NO: 151057 - DNA, 304 bp, Homo sapiens
aatgttattgagtacttctgtgcaggcaggttctggtgttggggacaagggtgtgagtgagaggactgagttgttgcctttaggaagtgtaccgtctagccaggagtaacggcttgagtcgaagtcggctcccattgggcctcttagggagtcccagtttgctctgaggcctgctcctctctgggaagaaatcaccttgagagcttctgggatttggaactccctgcatggttggatcccttccatcttcatgtgaattgtcttggtaatgaggctgcccaggaaagccataacacagggacat

SEQ ID NO: 151058 - DNA, 317 bp, Homo sapiens
agttggaaattatgccagagagtgagtttgccatcgccaggcttttacaaatgtcgtcatccctatgtattgagcactgtttcagtgtgcagatactggctagtacttttttaaataaagattttattttgagtaacctggctattagtcataacctgtcttaattcaccttccctagaagtagaacctgagaaggaatttgggtgcatgtggtttattgagtttacactcttaaaaaacatcaccaaagaatgaagaaaacagaacagagaagagctaagcaagaatgtaatcataggtaaaatgcagtcttattc

SEQ ID NO: 151059 - DNA, 562 bp, Homo sapiens
ggtgcctttcagttaggattttggatttataagcaaactccaagaaagagcctggttctgagtttctctgaatagcttaggtcaagtcctaaattctgaagccaactcctataattccttctttatgtctttggcatgtgaagtaggcaaatttcgaactttataataatagcctagacttacaaatacttgccttggtaatcaggatgagtttttgagagacaacatagtctagtgttaatcgcgtggacaccagactgcttgagtgaaatacaggttctaccatttattaacggagtaatgttgggtaagctatttagccagggtccttatctgtaacatggtgataataataaagattaaataataggtgaaaaatgtttagaataccactgtgttattagtaagcaccatgcataggtgtttggatttaaaaatactggcaaaggccaggttgggtggctcacacctataatcctcgcactttgggaggccaaggcagaaggatcgctttagcccaggagttcaggaccagtcgaggcaacatagattccgtctctgc

SEQ ID NO: 151060 - DNA, 528 bp, Homo sapiens
tcccactgtggttacctgccctgtgtttccaggacttgttcatgatcttgcctatcaactttcccaggaagggctcttgtaaattccatgggaatttcccagagactctgtttagcttattccctttgggaaggcttcatttagcaaaggcagtatttttactcctccatggtgttgtgggtagaatagtgtcccccacaaccctccacacaaacaataagttgaagtcctaacctgtgaaatttggaaataccatctttgcagatgtagtcaagttaagatgaggtcatactggattaggatgggccctaatccaatgaccgatgtccttataaggacacatagacaaataggagaatgttaggtgaagatgcagacagatacacaaagggaagatggccatgtgaagatggaggcagagattagacttaacgctgctacgagccaagggacactaaaaactactggcaactgctagaagctagaagggtcaaagaaggatccttccctggaacctttgaagggaga

SEQ ID NO: 151061 - DNA, 158 bp, Homo sapiens
ctgagccgggtcatctgactctgagagctatgctttgagttactccctgccatctctcactccaggacacatacaggtccatgtcccttacgcacaacccagcgctggccgtgggctggaatccaggatactcacatttcagaaggttcatagagtgc

SEQ ID NO: 151062 - DNA, 299 bp, Homo sapiens
gcaaaacttcgtctcaaaaaaaaaaaaaatgatgaatgatgtatttctaattctagtgagaaggaaagagtatcagtgcatattgtcaagtgaagaaagcaagctccagaacaaagcctatgtatgttcctatttattaaaaacaaaagccacatatgtatacaaatgtactctatctttctgttataattttatgaatgcacatgtatgcaaatacatatattcatatacataagacttagtctaaacaggaatattctttcaggagggaatcttgcttctcctacagaaaaatacct

SEQ ID NO: 151063 - DNA, 164 bp, Homo sapiens
tccctgtctgaccctggaccacccttctactctcccctttcatcactttcaccacgcctccttcctgtctaccctgaagttttcttgtacctcaagctcccttcttgggtctaagtctctgctgttggcttccagtccattgatcaccagcatcacttgcccac

SEQ ID NO: 151064 - DNA, 562 bp, Homo sapiens
  misc_feature (544)..(545): n is a, c, g, or t
gcaggaagtaaagtgcagaaacacctccacccctgcacaaagagcacctaggagtgagtgcgcaagcgtggacaagccctgcggtaccgtgtacacacacacacacacacacacaccacaggcaagctcaggcagggtccttcacagacgtctgcagtcactctggaggtgacccaagcacctgggcccttagacagtaacaccactcacaccgagcacagaccagctcgcgcccacaacacgagcctgtgacacgcaagtctctgtttctgagctgatgccgtctggctttggccatgagaccctcgtgtgaccaggtgcgtgcctaagttagaatcgcccaggctaagttcgtgaaccccctggatgagggaggcccgactcccgcaaggagccctgcccttctgccagctctcaccgggccggattttcctgcggggcttttggattttgtttttgagtcactcattgagtgttggtcgcgtgccagacaccatgccacactgcaaaccatgtgcaacgttgttagcgcgtgctgtccggnntcctctagaacagctca

SEQ ID NO: 151065 - DNA, 489 bp, Homo sapiens
aaaaatagttaaggtgataaatcttatgttacaggtatctttccatattttttaaaaatagaaaaccaacttgttgggcattgttttcctatcacttctagaaacaggcgaggtgtaagaccagaaaaacgaggatggtaactggtcttttctcgtcctctctccattggcctgtcagcccctcacaaagggaagataagctacaggaactatccctgttgttaagcgatgaatgactgcattgcacttcctagaaaaaccttccaactatatagcatcacagaaaaaaagatgcctgagatttaaatttctgattcatagacaacttccactactttcattgacagccatgaaacgaatgaacaaatacaatgtacacaggtccaactgacccctcagctcaggaacctgccagaagtggcaacttaaattactgttacaggaggtcatggagcaaaaccatggtttcttagggagctcagttcttta

SEQ ID NO: 151066 - DNA, 473 bp, Homo sapiens
tccattggtgcgatcttaagagtcacatgacttcgggatgtttgaataaaaggggccttgacttggacctacagggcaggtaaaatggtcaacagtcgttccagctcttgctgctaaagaacagaacgtccctgtgaacacgggccacattctctcagcaaaccacaacagaaattgttcgggaaaagaataaactcaatccatcatgatttccttctgttttctgaaattctcccggcaagtcagtctgcatctgcaattctgcctgctctgtgagtgatcctttgcacagggttccagctccccattgtccaaaggtgtccctggggcacggtcctctcctaacccctggggcaggctggcttcccctttcatcccacagatggagggaagacgcacaggcgttcgtaacgggccagaagtcacaccacatgtggaactagattcacagccacaccaagattccttcctgc

SEQ ID NO: 151067 - DNA, 242 bp, Homo sapiens
ctgaagcggctccccttctccctctcccctccttcttggcccctccctctgaaagggtagcagctagggggacctcctggctggcctccgtgccatgcacccatgggcatctgccttcttgaccttggcatgggcatcaagaaatcactgggttcatccatcaggaatgtcactgaaactccagagtcctggctggtgggggcagggaggaggtgcgggagcggtggggggggcagaggtag

SEQ ID NO: 151068 - DNA, 502 bp, Homo sapiens
cctgatattattgtatctctgggattaagccttggttccctgaaattgcattcaccacaaactacatgtgcttttagctgctccagagaacatcctagcataatctggcacatcctctggacaaaaccctggttggacctagccaataagacagaagttactgctgggataatcccagttgctgaagaggaaaactatgtttatctatgcatactaatatgactgaaaaaatattttctttattaatctatggagaaaaatgtccctaacacagtctgggacaaaaatcactttacaaggttctttacaaccttcttctgggggaaaaaaaaaattaccattcctgaatagaaatgctgaagcaattttatgataaactttaattagattaagatcccttttgagaacttacttcccatatctccggctgcgtgtttgtcaggaacctgatggtattgaaagagatgtagcatttattatattcagtgaacacagattatct

SEQ ID NO: 151069 - DNA, 179 bp, Homo sapiens
atattctatgtcttcattttattcctgtctagtgtgggtcccaatcacctcggatctgggctgccaccatgaactaacatggctctctctctacatctaagtgtttcctctttgttaaatgctattatatcactacttgccaaagaagtctcaaaaacaaacagtgtaaaccactgaag

SEQ ID NO: 151070 - DNA, 263 bp, Homo sapiens
taatcagtgattatgtgccgttgtacttcctctgtcccgtattgtctgacgtgcattcgtatcttcagtgtttttggtagctgcatggtgtgtgacatagaaaagtcccagtttcctcgactgtgatttgggtgaggtctgtatcctttggtgcacagtggaattacaaggtcagaaggggatagtggcatgagatgaagctggagaggcagggcaaggttatccagggccttgttaccatggtaacaagttgggaagtttca

SEQ ID NO: 151071 - DNA, 273 bp, Homo sapiens
gtgaattctaggtcaaacaagggaaatccacttgctatttaccataaaaattatttttggtaatgatatcaaatctccatgtggtagacttttttttgacagatacgtgttatatttctttttattctgtaagacacattgttatatgtaatgcacatcatttctatactataccagtaagtctttcatagatttctaaagtaaccatggtgacatttttcactaggaaaagttgtagtaactcttagaacctaaattggtctagtgactgaa

SEQ ID NO: 151072 - DNA, 248 bp, Homo sapiens
ttactgcagagaaaatgttaattaagcacttgggcttgattagatcgtctttcttcagatacagaagcataaaatcacaagaatagaagggagtggtagaggagtgttttttgcataataatggacttggggttaggtaaatgtgagtttatgtctatgttattgctcagtttaggtggtgaagtcaaatatgacctgtagaacaataccctttgatcacagcctcagaaatatcagagacagatatg

SEQ ID NO: 151073 - DNA, 371 bp, Homo sapiens
gaggtatattttagtatttggccttgggaaaaggttttgcttctgcaggcatgtcttccagagactgggggggcccgtgctggcgtcaccactgtccccttccccatcaggaaccttccttccttggatggcatttccagtgtgtccgggcctctgctgttctcattatgagtccccagctctgacggccactgtggctgatgcacagggtgttggagacagtgattcagcccagcaggctgtattcatgtgctgttcctctgtacacccagagctgtcttctcgctcatcatttattaatctttcccatgcaagtcatacgtgaatatatccttgtggtaaagttttcaggtgatagcgaaaactcagtc

SEQ ID NO: 151074 - DNA, 286 bp, Homo sapiens
attcactttattgtggtggtctggaaccaatccctcaatatctccaagatatgcctgcatgtgctttgacacacctgtgcttttactccctttctgatgttgtcttcatgccttttctatgccaatccaaatcagaagcaggcaacatatcttaaatgcctttttatcaatattctcaaaaaacagtcattgactaacatcctacatattcttttaagccttatttaaatctctcctcttccacagagccttccctataccctctacaggccacagtcatcactat

SEQ ID NO: 151075 - DNA, 352 bp, Homo sapiens
tacaggcactggcttctctaatcccccattggcccattctggctcattcatgtaactgatatttattttgcacttagcacttgtgagctgtgcgcacagtaagaactacagaggcgaagacttggtctcgcggagcccatgtgctggtagagaggctgcatgggcaaagccaatggtattggcgtcagggacgctgccgtaggggaaataaggttgggtgagaagaaggggccaagtgttgccacacagcggccaggtggcttcctgcactgagcgatgttttaaacgcggtggagccttgcacacctccagggacagcaagagtctcaggggctgtggttggggtgtgagg

SEQ ID NO: 151076 - DNA, 334 bp, Homo sapiens
atttctttctagttagctattcatgtacattttaaagctcgccacacaaagtcattacattgaggctattaacatgtttaatagtgacaataatagggtgtgacccatggcatataaccgcattcagataagaagaaagagttttcttttttcttcttcctgtaattgctcagtcaataccattttcacggaaatacttgcaaacaaacttttaaaaagttcattgtccaaagccttccctgattccttgtttccttcctcttcaggggttctataaacttttcctgatcagtggccggggattagcgagatggtgcactctgtcctgattttg

SEQ ID NO: 151077 - DNA, 391 bp, Homo sapiens
tgccacaaagaaagagacatacaaaagaaacagcccagtggtaagtacgtttgaagctcacaacatatctctaagttacagaggacaggtattttacacatgagaaatggtcccaaacctaggtctttttgttccttctgaacgatttcaccccctgtcaatgagaagaaatgcagagcaccctggaggtcaggaggaggaaaagaaaaaagcagaaactttgacctgctaattgatggaatcaagtcagacaaattctaatgtggccacttcttttcactgccatcatggaaacctaaagccctgggtaggttccttgccactgccctgtctatttctagaaacatgaaagacctgggctaatgtcctacctgacagccattagctgact

SEQ ID NO: 151078 - DNA, 639 bp, Homo sapiens
agttctaccatccatgaatgcaagctttgctcacttttgaattttatgaaggaaacaaagaaagacattttcagacaaagaagacaaagagtttacgaccaggagaagcttgctaaagggaattctaaggggcatattttaaaaaaagaaaaatgatcccatatggagagccagaaatgatgatggaatgaagaacacaggaagctctaaatgtgttgataaatctaacaaacattgactgtataaaacaaaaataatgatgtctttggggattaaaaaataaatgatagaaatgtaattagtttaatctctatggagggaaatttagcattactgtacttatcaaaattacaaatgtacatatcctttgatttagcaattccacaaagaattgtaggaatttatttgaaggttgagtatttcttattgtaattagtcttcacattgttttgactgcaggcaaggatatttcagatatgtgagcgcttactggaaccaacgaaattcttaagttgtataattcttccaaattctttgataattcctggttcaatctgtgtttacccccactaaatttatgactacttctgtttctaaatgctttacaattgaatcacaattaaatgtaatgagaagatc

SEQ ID NO: 151079 - DNA, 361 bp, Homo sapiens
ggagtacttgctcttctgacctccaagcaggttaggggaaggcctgtcttcatggtgggggtctggagtacaggtttggatggtgcccacctgaaggacagaggcaaggaccttacttggccagtcacaagtaaggatggggtgagccttgggcagctggggagcccagtgctcttcaaacttgaacatacagcacacaggtcacctgggaggttgttccagtacagattctgactctacaggggggtctaaaaccctgcatctctaacaggctcccaagtgatatggatgctgcttgtctagggaccacacttggaagaacagggcaccggcccatggccctgcctttatccgagatgag

SEQ ID NO: 151080 - DNA, 287 bp, Homo sapiens
gctgcaaaaagtatttcccagaagctaccaagctagaattttagtgagtgaagactaaatgaaaggattcctacaaataatcagctgagtatggatccttcaattcagatttctaatttagatgagtggatccctctgtgttttgatcaatattctcattttcataatgggctaaagtgtgactataatgattttcagacatctaccctgatttgaattttatgaaaattgaagatacagtagagttttctaaaatcaagtgacagaagaaaggcaaccttaccgat

SEQ ID NO: 151081 - DNA, 701 bp, Homo sapiens
gtgggcggagagcttgagcccaggagtttgatactagcctgggcaacatgatgaaaccacatgtttacaaaaaatataaaaactaacctggcatggtggcacatgcctgtagtcccagttagtctggaggctgaggtaggagagtcgcctgagcctggggaggtcgaggctgcagtgaaccatgatcgtgccactacactccagcctgggtagcagaatgagaccctgtctcaaaaaaacaaaaaaagatattttgggacacatgaaaattatataaaattgagtacttgcaacaaagacttcatagcccaaaatatttactatccacccctttacataaaaaaggttagcaaactcctcatctagatggttctgtctgcctctgtttgcctttaggtggggagagaccattatcagctcacgtcctgagctctgtcaaacggtgcttctaggaataagagacacatttggaagtgtgataggccagagagacattttcaggagctacaatttagaaccctggccctcccaagctggaaggaccctcataggttacatgtcctgctcagaggttcccacatgctatccagaactgatccattcccaccagctcatgacaaaatgataaaaataaggcaattctataaatcagtttatgtaaactaaattctttccatttataaaaccaaacttttactctg

SEQ ID NO: 151082 - DNA, 398 bp, Homo sapiens
caaggattacttcaaattttttgtcctgagcaactgaataaatggtgatgctgttaactgagatagactagtagaagagacaggcttgggccccaggatgggaagtgatgcaagagttctgtcttagatattttacgtttgagttaccttaaaacctccaagtagaaatgtcaaataggatttatgtttctggaggtccagggagaagactggggtgttaaagaggactggggctagggtaaggcaaacaaggtgcctagggtggaaaaggtaaggtggtagtcaccctccagggccagtcctgcacttgcatgggcctgataaagaatgtttccttaaactttatgtgctaagtgcctcaatgacctctccctagtcctagccctagtatttaaacc

SEQ ID NO: 151083 - DNA, 615 bp, Homo sapiens
ccggccgcgctccgaacggcgcctcccgccccaccatgggcaacagcgcgagccgcagcgacttcgagtgggtctacaccgaccagccgcacacgcagcggcgcaaggagatactgggtgcggaagatcgcgcccgagtactacgaccacctgccgcagcaccactcctgggtgaaggtgctctgggattttgtgtttgaggactccctggggccctatgccagggtgaagcgggtgtacaggctggcaaaagatggtctgtgagcccgggctgcctcctggtggtggccattgtcccccatcggcccctcagccttgcaccccagcactgagaagctacatttccttcctgtgctctggactgctgcccttgtccccgaggagtgtcccgcgcagccacacctggcaacagcagtgtgggctgcagggctccgtctgcacgtggacttgccctggaccttgagtgtggccctccctttctgggcctccccaggtgaggcctggccctgccccaccatgacctgggtgctctgagcccacggttcccacggagctgacttctccggggtgcctgtgccctacattaaacccggcgtttgtttcacagcccatgga

SEQ ID NO: 151084 - DNA, 1357 bp, Homo sapiens
ccggccgcgctccgaacggcgcctcccgccccaccatgggcaacagcgcgagccgcagcgacttcgagtgggtctacaccgaccagccgcacacgcagcggcgcaaggagatactggccaagtacccggccatcaaggccctgatgcggccagacccgcgcctcaagtgggcggtgctggtgctggtgctggtgcagatgctgacctgctggctggtgcgcgggctggcctggcgctggctgctgttctgggcctacgcctttggtggctgcgtgaaccactcgctgacgctggccatccacgacatctcgcacaacgcggccttcggcacgggccgtgcggcacgcaaccgctggctggccgtgttcgccaacctgcccgtgggtgtgccctacgccgcctccttcaagaagtaccacgtggaccaccaccgctacctgggcggcgacgggctggacgtggacgtgcccacgcgtctggagggctggttcttctgcacgcccgcccgcaagctgctctggctggtgctgcagcccttcttctactcactacggccgctctgcgtccaccccaaggccgtgacccgcatggaggtgctcaacacgctggtgcagctggcggccgacctggccatctttgccctttgggggctcaagcccgtggtctacctgctggccagctccttcctgggcctgggcctgcaccccatctcgggccacttcgtggccgagcactacatgttcctcaagggccacgagacctactcctactatgggcctctcaactggatcaccttcaatgtgggctacacgtggagcaccacgacttccccagcatcccgggctacaacctgccgctggtgcggaagatcgcgcccgagtactacgaccacctgccgcagcaccactcctgggtgaaggtgctctgggattttgtgtttgaggactccctggggccctatgccagggtgaagcgggtgtacaggctggcaaaagatggtctgtgagcccgggctgcctcctggtggtggccattgtcccccatcggcccctcagccttgcaccccagcactgagaagctacatttccttcctgtgctctggactgctgcccttgtccccgaggagtgtcccgcgcagccacacctggcaacagcagtgtgggctgcagggctccgtctgcacgtggacttgccctggaccttgagtgtggccctccctttctgggcctccccaggtgaggcctggccctgccccaccatgacctgggtgctctgagcccacggttcccacggagctgacttctccggggtgcctgtgccctacattaaacccggcgtttgtttcacagcccatgga

SEQ ID NO: 151085 - DNA, 1354 bp, Homo sapiens
ggccggggctgaggctctgtcagtggtaactggtaaaatccaggaccaaactgccagagccacaaggggatcctggggctccatctcccagccacagagctgcccggctgcaggccaagtacccggccatcaaggccctgatgcggccagacccgcgcctcaagtgggcggtgctggtgctggtgctggtgcagatgctgacctgctggctggtgcgcgggctggcctggcgctggctgctgttctgggcctacgcctttggtggctgcgtgaaccactcgctgacgctggccatccacgacatctcgcacaacgcggccttcggcacgggccgtgcggcacgcaaccgctggctggccgtgttcgccaacctgcccgtgggtgtgccctacgccgcctccttcaagaagtaccacgtggaccaccaccgctacctgggcggcgacgggctggacgtggacgtgcccacgcgtctggagggctggttcttctgcacgcccgcccgcaagctgctctggctggtgctgcagcccttcttctactcactacggccgctctgcgtccaccccaaggccgtgacccgcatggaggtgctcaacacgctggtgcagctggcggccgacctggccatctttgccctttgggggctcaagcccgtggtctacctgctggccagctccttcctgggcctgggcctgcaccccatctcgggccacttcgtggccgagcactacatgttcctcaagggccacgagacctactcctactatgggcctctcaactggatcaccttcaatgtgggctacacgtggagcaccacgacttccccagcatcccgggctacaacctgccgctggtgcggaagatcgcgcccgagtactacgaccacctgccgcagcaccactcctgggtgaaggtgctctgggattttgtgtttgaggactccctggggccctatgccagggtgaagcgggtgtacaggctggcaaaagatggtctgtgagcccgggctgcctcctggtggtggccattgtcccccatcggcccctcagccttgcaccccagcactgagaagctacatttccttcctgtgctctggactgctgcccttgtccccgaggagtgtcccgcgcagccacacctggcaacagcagtgtgggctgcagggctccgtctgcacgtggacttgccctggaccttgagtgtggccctccctttctgggcctccccaggtgaggcctggccctgccccaccatgacctgggtgctctgagcccacggttcccacggagctgacttctccggggtgcctgtgccctacattaaacccggcgtttgtttcacagcccatgga

SEQ ID NO: 151086 - DNA, 640 bp, Homo sapiens
ttagtttgtaacttcaagacagagatggaacatatcaattgtgagaaataacattgattttttatgtggagaggacatttattttcaggctgcaaagctcagttttgctgaattaaaaaattgtgcttcttttatttcctaattgtcttagttttgtttgtcttattatgtgtatttcagctgtgtatgcatcacagccctcctttttgctgtgctgtggctacagttttctcactgttctcttcacaccatgtcatttcacatggtatattgtaggttttgatgagaaatcggtattttaaatgcactgcaagattggttttaactggagattttgcatatcaatataattttctgatcagttaaattaaaacaaaaagcatacagtgtccacagatgaaaggattaaatcatttagcgttgtttttctctgtttgttaaagaataatcttattaaattcttacacaaagtgtggcaaatataaaatttgcttgaaaatatatcttagaaattaaacttttaatttaattttctacagtatacttatgccacaatgtacgtttccatgcaaaatcttctgtttgtaagtgtgaacattaaacattgcaaaatagtaaaatgacctctgtgattttgaaa

SEQ ID NO: 151087 - DNA, 334 bp, Homo sapiens
ctaggacactaaaatgagggatcaagagtaagggaaagacaattccttttcacatttgcctgagttagaaggaaggtttgccatacagtcaggtgcagaactagtgcagtcccacagtgtacggtgtaggtttaggaaggaaaaagtgcagggtacaccgatgactattgttactagttaactggcgttagaggtggagtgttgtcctaggatctaggaactagactaattggaagttgatgagggaagtgttggtcataagatgattaccttttaatgcagtatatatggggcatattatgtaaatctgtcagatgcagcagaagaactgggg

SEQ ID NO: 151088 - DNA, 286 bp, Homo sapiens
gctaggtgttaccccattttatgtgtgagatatatgaagattgctggacaaataaatgcccaagatcacacagtagtaagggctgggtttattcgcaagtcctgttttgttttgtttttaatctacctttctgaagttgctcaaacaattgaagttgctaagggaaatcactatgtatggtgaagatttaaatttaataggcactctaataataaaaggtgtaccagtgtaagcagactagggaaatgatttcactttgcttagggaaaagagatggaggtttagg

SEQ ID NO: 151089 - DNA, 354 bp, Homo sapiens
gtcgagccggcccccagtttacaacagcttagtgtgacagcagacaagagacaagtagaggaagtggcaaggattcctgcactgtattattgtgaaatccacccagggctagcctacaaatgtgaagacaggaaaactttataggtctcgctgctcttttatgcgagcagatttccaggcacgatgttgttcacccatctataacttggccccaaagtgtgaggaacatatgaatttttttaggcggtcctgagttgaaatatctaaaaattatatttgcattctattgccatattatagactggtgatacattctatacttggtaacacaatttcatttttaaaaaaattttt

SEQ ID NO: 151090 - DNA, 623 bp, Homo sapiens
cagaggtccaaaatgggtctcactgagctaaaatcaagctgttggcagggctgtgttccttcctggaagctctaggggaaaatctattttcttgacttgctcagctcctagaggctgcctgcatttcttggcttgtggcctccttccatcttcaaagccagcagtggctagtagagtctttctcagatactgtcctgggttccggctcatctgcctcttccccattcaaggaccctcatgattatattgggctactcagtccaggataatctctttttgagtccgctgatgagcaaccttaatttcatctgtaaccttcattcccctttgccatgtaacaaaacattcacgggttccagggattagggtgaggggcatcattctgccaaccacacatgacccagcagacagaattaggatgagactggaatgtagtccagcagggcagagaccaagcctagtcctctgttcacctctccatgccaagcatagtttacaggcgctcaggaaatgcttcttgaagaagtgaataggtaggagtgcacgtctccttgtaccaacttgtctgaaatgtgtgttgaaactagagccatagaatgatggccaacgaggtggctggaggc

SEQ ID NO: 151091 - DNA, 516 bp, Homo sapiens
tgtattctgcacccctatgtggtagccattgttgcaggccctaggagactggataaataagagaagtccctgcctacatggaggaacctatctcaatggactctgagctctacccactaggagttctcctgcagtccaacagcaatactctccctctcacacctccagcactgacagggcttccaattctagacaaaatactacctggcccactccaatggcctgctacaccaggacctcttcagattggagcagctacaagcaccactcctcaactgagacccctccacaccaccacagcccaacatcgggacctttggataactatcaccgtcccctaggagagagaaagataagaatagaaggagggagggaaggggggaacaaatagacgatgagtggatggatagatggatggatgatgggtgaatggttggatggatgatggatgaaaggatggatagatgatggatgaatggatagatgatggatgaatggatggatggatgatgggtg

SEQ ID NO: 151092 - DNA, 322 bp, Homo sapiens
ttctgtcctcagaagcttcgcacccacctcccaggccaatgtctcctccgagttctggctcccacgcctcacgctcttcaggaacttcttcctagccatctctcatcattcctcttttctactacagccgcccaactaggcctacagatagattcgaatccttctagtctaacccttaaaaaaggaaaggatgggaagggaaggaggatggggatgaagagaggccctccttccttctcgagtaaccgcatttccttcccgtgtccccatgctgccaatgttcctggaacagcgtctgcatggggagcagcagggaaagaca

SEQ ID NO: 151093 - DNA, 229 bp, Homo sapiens
actgctttctccttccacgtaagcagtcttttaaagaggcttttctcacttttagagggtaggatgaatatgactgttatcctttgtgaattaaacactcttaaggcactttggttcttgagctgaattattctaaccatggagaaatctgaattgctgaaatacagatttttcgcattccagaactatctgtcttccattatttttatttatttacttattttgagac

SEQ ID NO: 151094 - DNA, 340 bp, Homo sapiens
tggtatgagatggcttctaggcacggccgtgggcgggtctcacgtcagttgcgtgtcgtctgaggaaagttcttctgcagctacggctttgaaagcagcatccccgacgcagatttccccgaggcagatttcaccacagcagatttctgctgcctccctggacatggcctctgtaccctggacctcccgagctgcctctccccatctcctctctcaggtaagcacgcctggacctctctgtgacctcagagctcccttggctgccaactccgggctgtttcctttgggtcttcagcacttgggcccattgctagagcaccccgacatccctgaacacccc

SEQ ID NO: 151095 - DNA, 156 bp, Homo sapiens
acatagataattaataaataattgattaacagatggctgataggttgataggcgtgcacacgtgtgtgtgtgtgtgagtgtgatttatcactctagtttaaattatcttactcttttgctcttgtttcactttgcaaagatttctttgtttctcat

SEQ ID NO: 151096 - DNA, 132 bp, Homo sapiens
cacaacatacacagtaatgcatcccagaggaaggaaccagggatgccacttggagaactagttttcaactgaagttgtttaaactatgtgatcactttatgcctccagggaaatgaaatcccatcccacaac

SEQ ID NO: 151097 - DNA, 256 bp, Homo sapiens
gctgccggaaggatcagttcctgtgtcatctcctagcagcttgggcgaggcgcggtaccgaaggttggagcgcagcggagccccggtcttgtagatgatactctccaagctgtaaggaagaagtcaaggattaaggagacctggactggagaggagcctttttcaaaaaacaacaatgacaagagaaaatgtagcccacaatgctctgagacaagagggccttgtgaaggggaaggatgatacctggaaatgggga

SEQ ID NO: 151098 - DNA, 830 bp, Homo sapiens
ggcaggttctaggggtagttggaggattctgggtacatttgtcatggaatgaggcaggttctaggcaaggcttgggggaactagtggcatggggtcagggagtgaggtcagttatagaggaggctcaggaggatctggggaaacgggaccatagggtaagatgggttatggagatggtccagggaggcttgaagtaccaggctcactggctggaataggacatgaggctggacccagaggccataaagccatgggtcacaggtcaggatattgggtagcatcagagggcgacacgaactccaaggatggtccagagcgagccagggaaaccaggcttgtggatggggcaggacctggggtggaacctgtgatggctggaatgccaggcactgcaggtggcatggcacacagagacagcctcaggggcacaggggtgctggggtctcagggagggcgacagactctttcagatgagcgaggctccaccaaagatcttgggggctatggaacttcagggatccctgaggcctcggaggctgctggtgccaagggaaaaccagatgtcaaagaatggcaagacagttctgggactccagggtcttctagagacagaggggctcccagggtgaaggataggtctccagaccaagcagggataatgggggcttctgggtttcttgatggcaagggggcagtggaaggtgagacctgggcaggaatggctgctctagggtctggatatgaacgggacatctggaaagcaggcccaggaatgacagacaggggtagagttgctggccagggggggttggcatctcagggaggtgggg

SEQ ID NO: 151099 - DNA, 470 bp, Homo sapiens
ttgggagtgaaccttgtttcccttccttcctctgtgatcttccttcctctttaatgttgagtagatggtttttttattaatatcccaggtcagtggtctgtttaaattccaggcaaccaagcaaaaagacccatatagctttccttactaaaatggctttctgctgctgtttgattaaataatagagaagttgaagggtgtgctgatgatgaaaagcatctccctgagccttcagaaggaaccgagcatacaccccctccccccggagagcctccctcccctcagcttcagctggagtgcatttgcttctgttgagctgcaagttcctgcaaagcagaaacattcagatgattttctttggcgagttttgaaagcgctgatgactgagctgatcttttggatcatgaacttcatttggagggggttactctttccctgttaacttgggctgtgaaatgatcaaagtgctt

SEQ ID NO: 151100 - DNA, 541 bp, Homo sapiens
atggggggcgtatataggttcgtctgactagtctagataagtgaatttgtgtagtaattgtttttttgtaactggcttagtttacttagcttgatgtcatcaagatttattcatgttggagtatgtgtcagaatttccttccttttaaaggctgaataatatatccattgtatgtatatatcactttttgtttatccattgattcttccatagacattaggattgcttccaccttttggctcatgtgaataatgatgctgtgaacaggggtgtacaaatatctcttaaagacccctcttaaaactttttgcgatatatacccataagtaacagttgctatagaatcatatggtaattctgtttttaattttttgaggaatactatactgacaaatttgaatccttatttaaacccaggattatggaatactgctgcttgatttcagctgtcattttgttgtctacattgtattttattgaattggcgttattcccaaatattggaaaatgtggaggtttctaatttttgctactgtaaata

SEQ ID NO: 151101 - DNA, 329 bp, Homo sapiens
cccaggagcaagacccagccctttatggttacacagaagccatgaggacagtcacaccagcttggattcccatacacaggatagtctgtcttcctcttggaggcccctgccctgtgccggtgggaaatcagaaacatggctactgattgcaaacgtgttaagaagaagaaaaaagcaaatcagtatcccaggcacactaaggtgatgggcttgtacatcagttcttcagcaatcttatgaaattagctaaagccaaacttccaggcacagggaaaacggaaataaaccctccaaggtcagatgcacagggcttgtcctgcctgctacaa

SEQ ID NO: 151102 - DNA, 457 bp, Homo sapiens
caggcagatttcacagtccctaggcagctattaagctctaaatatcaggcatcttgacaaagacagctccaaacttgccaacaaacccacattccaggggcaaaggatatcaaatatcatactatttgtttaagttgacccctcttcgctatctgaatccccacactcataaccatggatgaatctgagtgctgcttcttttgttcagacggaatttaaaaatcagttttagagtgagaaatgcgcaagcccatcccatataggcaggtccttttccccaacaggtatgccctccttttccctggcctcctgtcttctcagcacttccagggagccacatgctcactgagagctgtctccaccccttattcaacgcacctaaaacttgacagtctgagcagatgggggaagtagagtgattccagcaactgtctccttttctggagcaggaagctgg

SEQ ID NO: 151103 - DNA, 317 bp, Homo sapiens
gtgaaaccccgtctctactaaaaatacaaaaattagctgggtgtggtggcgcatgcctgtaatcccagctactcgggaggctgaggcaggagaattgcttgaacctgggaggtggaggttgcagtgaactgagatcatgccagtgaactccagcctgggcaacaagagcaaaactccgtctccaaaaaaaaaaaataaacatttatggagcaagcctaagaaggttcatctaaactgtcctctgcccagcccctgcagtttgagatgagtaaagggcttgagttcaggtccggacaggcctggggagggcaagggca

SEQ ID NO: 151104 - DNA, 203 bp, Homo sapiens
tacggtcgcaagtcaatatgttcctgctagtacacccagtaacaaaggccagtaagtggtacttgctttgtggctaactccaggattgatttacgggggaatggtatggtgaggtttcatcctacagaaatgtgtgatgagtcagggctaaggttcacaaaatcaaaggagtacaggggtcaggggaaggacatacattgact

SEQ ID NO: 151105 - DNA, 415 bp, Homo sapiens
acacatgagatggttttcacatgttctcaacaactgttctgggaaccaacagccctgtgaagaatgcggctgtccctatctcatagatgtggaaataggtcctaggatctgatgcaagtcttttgatagaccaactctgatcaataaagctttccccttagttcatcatgcgagggggtgggcatgggggcagacccctccatctgcaggattgggtttcatggagtggcctgggctctgggccaccccctcttctgaccaccattactctgctaccaagtccgtcccaaggattctatggcccgggctgtcgtcacacactgggtaccggcattcttggtctctcttccagagtccctccaatgtgcattcctcagtttatgtaataacccttaccctctcacagtgctttaca

SEQ ID NO: 151106 - DNA, 416 bp, Homo sapiens
ggccggccccagttacaacagcttatgaaccatcatggcattttgctgctgcctctaaaacatgggaggctaagagacccagctactagggtctttgagaggagattgtgatgggtttcattggatttcagaactgaaaaggaccattgtgttcattcggcctcacctcttacctagtgcctgaaagtctcacaatgtccccatcatgcttaatctctgcttaaagccacttgggacttgccccttagggaaactcccttagacctcttcttccctaacttgagctctgatctggctcccgaactgtctcctcggatggaggtttgccctccgaagccatttcttttcagcgtggactttgcctgcagaagagccaacacatttccatggcaggaatgggttcagcatttcaccac

SEQ ID NO: 151107 - DNA, 329 bp, Homo sapiens
tgttgaaaagattatcctgtctccactgaaatgttttctcccttgccaaagatcagttggctgtacttgtgttggtctatttctgggctccctattctgttccattaatttatttagctgataccacactgccttgatcactgtagctttatactttatagttagacttgaagtagggtagtattagtcctctgactacttctttagtattatgttgactattctggatctttttcctttctatacaaactttagaatgtttattgatatccaccaggtaactttctgagattttgactgggaatgcattgtatctatagatcaaattg

SEQ ID NO: 151108 - DNA, 375 bp, Homo sapiens
cacattgcgggtccgtgaattctagagggggtcacagacatttagtctgtaagagtaatggtgcccacgtgtcaccagctcactactgacgggcccttccgctgcggacgtgctgcgtgtgcgatgatgatatggttgtgattgccatctgcggttcccttattacttctgaggccgagcacctttctgtgcatgtattgggtggctgtttgtgtgtcgtctttggccatgcgccagtttgggtcttctgcctgtttttcttcaggcttgtctgtttcgtattgatttgtggtcagtccttgtatacttcagaagcaagacctttgtcagtggtgcaggtgtgcggatgactgctcccacagcgtggtttgcctt

SEQ ID NO: 151109 - DNA, 284 bp, Homo sapiens
ttgtcagactctttgccacatcctggatgtatgtttcaagaccacaaacccacccagttgcccggccaggtctgagcccattagactttacaaactaccttgatgagtttcttcctttttgaggaactagcatcattccttcctaaagtatgatcttttaaattattagcagtcagcataaaatggtcctatgtcatcagaaggtttgacatttctttgccagaaggcactctgctgtgctttctctacccatctttcctccagcgttaccttctcgtcttcta

SEQ ID NO: 151110 - DNA, 337 bp, Homo sapiens
tggataagtaaatgtaaggtgttctccatgtttccattagctgaatatccttccaatttgtcactttgaagatgacagtccatctggaatattagaggaaaggctggatgccccgttgatctactgattgctcctcaacccgtatttctactggtgattttctctatgtccatatgcaggtgagcttctactgatctggaaatgccatgtccttcactgacacactggacaagaagaccatcagtcatatgcacttgacttctcagaaaacatgagggctgcctcctgattgcagccagcagaaagtggtagaaagaagaagactttgaaatgagac

SEQ ID NO: 151111 - DNA, 396 bp, Homo sapiens
ccaagtaaacactgcttgatagtttagaattccaaggggtcccagccacaaggagagtctcaatttactcaccaactttttcccacaagccttcattcagcgctcatgtaaaaaaagtagggacaagtgtaacaggagggctgagggagactccctaagatacagatgcacagagcctggtgaaaccttagggcagcagagaagaactgagagtaacccctctaaggcactccaggctctcatggagaagatggcagccacgggaggatggctgagaaagaggtcctcaataccctctctgtcctgccaatgataggtgtagatgaacacctagtctgatgaacacctaggcaaatggcaaaacaagtgaatttatggaaatcctctgagccactc

SEQ ID NO: 151112 - DNA, 316 bp, Homo sapiens
aatgagccgccccgcttactgccccatggggcgggggacgggaatacggcaaacagtggtttctcatcagcacctggaacaggtgcaaagggaagcctgagcagggttggcatcgcaggccgtgtgtgtgtagaaataatctttgtctgtgcaagctgggcgcacgttacaggaagaagatcctttctctaaattgccaaagcaagaagaaatatttggagttacataagaaagctgagctcctggcctcttcatggccctgtgactcccaagtccctgggtgcattgccacacaaatattgccggaagtagaaaa

SEQ ID NO: 151113 - DNA, 209 bp, Homo sapiens
aataaactgcaaaatttgacatattcatcatcatatagtaagagctttcaacatacctgtctcctttattgacaaattaagcagacaaaaatttaaaaagaaatagattttggctgggtgtggtggctcatgcctgtaatcctagcagtttaggaggctgaggaagagtttgagactagccagagcaacatggtgaaaccttgcatcta

SEQ ID NO: 151114 - DNA, 175 bp, Homo sapiens
ctgaaggttctttcctttagaatcacgtatttagttgtcttctagatacatgggacatttttctttttcaattttaacatgttttattgctttgttctgattataaacccaaacaatgtgtgtgatggtgcaattctttttttttttttttttttgctttgtataaatctcttgc

SEQ ID NO: 151115 - DNA, 340 bp, Homo sapiens
aaaaagacacttaattgatgaaagttaataccatgtaacttgaattttctagaaagagttcttaatttcaactcagactcaaatatctaaaataatgatggagggaagtgaagtagggggatactccctgaataggaagagattttaatgggaagccctgagcatgacagagcctcatggaaataatcccgagctgactaagtggaagtaagtcctgtcctcagagaattctgcagagagtcagtaaaaacaaggacttggatgatatccactgtgtaatatgtgcaggtgtccagtgaggactgtggctgcacgaggttgaccatcatttatgctaatc

SEQ ID NO: 151116 - DNA, 391 bp, Homo sapiens
gagtcagtaggctgggcatagcagttcaggcctgtaatcccagctactaggctgaggcaggagaatcatttaaacttgggaggtggagactgcagtgagccgagactgcaccactgcactccagcctgggcagagtgagggagggagggaaggaaggaaggaaggaaggagggaaggaaggaaggaacaaaggaaggaaggagatggagtccatgaatactaacaaatcttttgaaaggcttgactaggaagaggacagtaagtggagtgacgcatgagatcatcagtggagagaaagggaagagcaagagagagaagtgaatatacaagacaaaaaaaggggtaacaggtgaagaacacaatgggtgggatttacattagataggaagac

SEQ ID NO: 151117 - DNA, 578 bp, Homo sapiens
ggcttctgttcgtaggtccctattacatgtttccaagacactggatttgtcagcctctttctttggcctctcagcttcttcagactctgggggtaggtttccgtagacctgtccgctgcacattattattttaaatgtttttaggcactgtgtaaaccaaataacacatgcctgtctgtgggctaaccagaagctacctaatctagtccaatcaccccatcagagaccacatgacctgccctgacagcatccagctatatctacagaatccagactagattccatttccccaatccagttctgagtgttccttccactccaactctcctgctttaccatttaatggtacatcagaattatctgttactctacacaataaaccagctacctggactgcttcttttaactctccccagagaatgattttaactaaaaatattaacaagtgatccgaaaaaatgggaagaacatatttgggttcttcaaataaagtcatcaataatgataataagaacaaacccagagaggccaggtgtggtggctcacacctgtaatcccagcactttgggaggcggagg

SEQ ID NO: 151118 - DNA, 344 bp, Homo sapiens
atgtttgaaactaaaattgccaggtgctttctttacagtgtccctaggacttaaaggattaaaggattgaatctgagcttatggaaacccaagaaaaaatattcagtagtctgtgtcattcgttatataaaaaaatgcacatcaatgcagaaatttctactccgttctgttatctgaaaagtcacatgccacctgtttaggaagtatctgattgaaaaaaccaactgtgcatgcttccctagagtcccacataagcccacatgaagagcaactagaaaaagacaaaagcaatggccctttcttggcagcaagtcagatctctccgttttaactagctgcttgga

SEQ ID NO: 151119 - DNA, 393 bp, Homo sapiens
aatctgaatttgtagacaatggaaattctctatacattgattccgctgtagaatcatttgcgtgaaagtccatacacactcacacacacacacgtacacacactcacacacacacacaactttacttttggtgggatttttgataggaaatggaaaagagatttaagctactagctttttcttatctgaagatagctgcttctctggttcttattgttatactttaggcaattagatatatagattccatatttccttacatcacagatgacgattcaatctatataaccataggaaagggaactggttaagttagagtatataaaacaatagaataacaaataatatttagataaatgaataatgcaggtgcgaagcactatttaaataaca

SEQ ID NO: 151120 - DNA, 334 bp, Homo sapiens
agcactgctcctcggactccacaccccaggtccagaatagtcagggtggctactctaggactaatctctcttcctatctcctggtaaaatggttttagcagacatttgtccctggcagctgttagtttcccctctcatcactatattaagacatccttggccaagcatggtggctcatgcctgtaatcccagcacttttggaggctgagacgggagaatcactggagcccacaagttcaagaccagcctgggcaacacagggagaccttgtctctaccaaaaataaaataaattagccaagtgtagtggtacatacctgtgattccagctactt

SEQ ID NO: 151121 - DNA, 449 bp, Homo sapiens
tgtactgaattctgcaggcaattgtaacacaatggtaagcatttatgtatctaaacatatctaagcatagaaaaagtacggtaaacgtatgctattataatcttatgggaccactgtcattaagcaaaacgttatgtggtgtaagactgtatttttaaagctgaagtaaatatcagctcttcagaaaatattgtaaggctattctatggaatttatctcaggttttaaacccagggatagctataaagagagtttccttacgtctggagattggatctgtgcagtgaacagctcttgccatgcccattcaatctttctccaaaaagctacatgcaagaaaggacacaaaatccttcattcaactagtttgcttttgcttggcttagattgtgatctagttgactcaaataatagaaaaggaattgataatcatatagacttggtctgtt

SEQ ID NO: 151122 - DNA, 410 bp, Homo sapiens
tgtaaatagaatctttggtttatttcatttaaagtgatgttttgatgatgcaactattttacaacattttttcatttctttttattgctgataataatctgttgtatgaatataccacattttggttctccatttatcagttgttgaacatttgatgtgtttcctttttttggtattatgatcaataccaaatgttgctatgaacatttgtgtactagcttttgtgtgtgaatattaccacagttctcctaagtatacattcaggaatgaaatagctgaattatatggtaactctgttgcagttttgaggatctgccaaactgttttccaaagtggctgcattttccaattccattaacaatgattgaagcttctgatattttcacccctctctctctctctctctctct

SEQ ID NO: 151123 - DNA, 434 bp, Homo sapiens
tgagccagcacgcccgccctagatgcagatttttaacttcaactgggccctctgtgtcacttgataagtctcttcttccattagtcagctccctcttccacttctcaaaggagttatacctaaccttcagatacctactttatcacaacacattaaccactgcttagtgtgtatcacctagatatcgcatgcttagttcaaattcaacatatccaaacactaaacttctatcttccatctctaaacgtctcctcctgtccccagccagacaatggatctctccctctctgcactctgtccctatccaatcactcagccctgtactttttacctcctaaatatctctggcatccactgctgcctttccatttcacactgccactatcatctcttaactggactataacaggagatgatagtggcatcgataaaca

SEQ ID NO: 151124 - DNA, 433 bp, Homo sapiens
tcacgccatgtccacaatgctacagttatgtgcgtatgtctctgtgtcagactcagagtataatgtatccatgattatacatgtctgttggggagcgtgtaacagtatatctgtatttttctgagggcatgagtctgtgtggaagcagctaccaatctgtgtgtgtatctgtcaggtgtgtctgttcagttctgtatatcttattttgtttgcatatgcacatgtgtgcatgcagatgctctcaggtgaggcacctgaccaagcataggccttgttccaagtggggaggagccagagtatctctgggcagtgtgctgacattaccacaacctgtgagcctttggggtcgcatcattgtggggggggactggagagagaataccaggaccaaaggacccagtcacctccttcagagtagatcctttatccattc

SEQ ID NO: 151125 - DNA, 243 bp, Homo sapiens
tattgcctcacctcaccttttattcacatctcatatcattgcaatcaggcttctgcccataccactcccctgaaacaaatcactgatgacctcttcacaaccaaattcaaggaatgctttgcaatcacctgctttcttgatttccctttccaggcttcctcctctccaaaacgtggttgttgcagagttggcccagttttcattccacatattatctgtgggtggtttcaattatactacaga

SEQ ID NO: 151126 - DNA, 339 bp, Homo sapiens
gacaggttttacccaaggctgcaggccagtgtctaaccgtctctagatccgtcctggtttagcttcttccaaatagttttgtgtctgtgtgagagtgtgtgtgaaatggagttttgctgtgttgcccaggttggtcttgaactcctgggctcaagcgactctcccaccttggcctcccaaagtgctgggattacaggcatgagcaacggtgccggctctaaatggttttaagggcacggtacctacctcaagctaacgtgcaggcaggcacgaggtagctggaattctagcctaggattctctcttcagcaattcttgccttaagacctcaccttagac

SEQ ID NO: 151127 - DNA, 266 bp, Homo sapiens
tggcacaagcaagtcattttagaaggaacacctactacatctctggacctcagagccgctcaccttcacagtgaggacttgaactggacagatttctaagttccctttgcaccttgagtgtctctgaaagccctggcaacaagtgaggaattacgctagataatgaccaaactctggtgttcttgcttaactctgtggctttcagccctaaaagcaccaccacatagatttggaaaagaaagcagaagatattttgctctactctt

SEQ ID NO: 151128 - DNA, 569 bp, Homo sapiens
ggaaacttcaccaccggggacatcagctgctgtggccagagaagagaacatggtgaataatgctttcataccttagggcagggcttctcaaacttaaacgtgcataggcatctcctggggagcttattaaattcacattctgattcaggaggtcctggagggcctgagatgccatgtttctatcaaccttctaggtgatgcccatagtgctggaccatgggccacactttgagtaaggagggcttcctggcttttgcccagaagtgacacatcacttttgctctcaaaagaattaaagcaagtcacatggccatgcccaacttcaaggcagcagataatataatccattaactacatcagggagaagagaattggaatttttgtgaacagctccaatgaagagcaaacaatgtgaagctaggatctgaattcaggcaggctggccccagagtctgtgctcttaattataactatatacagtcatgggtgttggtccattctctataaagagaatgcctgccaggcagacagctagtcagggagttacagttgacttgtgtgacttgaca

SEQ ID NO: 151129 - DNA, 359 bp, Homo sapiens
aaaaaacctatggctttggaaggctttctcggtaacgtcctagaattaaggttaagcctgcgtttcctgttaactgaacaggaaaccagcctgaccaacatccttctgcccggtggcttgctctcagctcctcttcgttgggccttgggcagccagactgtctagttttaatccttgctctgccacctgtgaccttggacaagttacctaccttcagttacctcatctacaaaatgcagatattaataataccctctttttaatttatccagaggattaaaagagttaataaaaagtaaaaaataaaaagacttggtaagcataggcacagaggaaaaaaaagtaaaaataaataatta

SEQ ID NO: 151130 - DNA, 874 bp, Homo sapiens
ctttctttctttctttctttctttctttctttctttctttctgtctgtttctctctctctctctctctctcatatatatatatatctggctctagaaggaatttaataactcacatttagttatcagacattctggaaatttatagtcttaaattcaaatgtgttgagagggaaacaatgtaattttactatccttctatggtcatttatttcatttagtggtggaagacttgcccatagagatactgaacatactgctgctctcttctccttcaaaggtgctggctcaatgactcacaccttccaccagttcttatgttaattcctttccaggcttttgattgaagagcattctctaatagattttcaggaaagactcataggaacaatattccgtaagttcttgctagttatgtagcaagaactcagatatagcttttttaatctgtagcctttatacttgaaggtcactttagctttatcagatatatttgatatgttgattattttccccagatataagtatgtcctttccgtatgtcctttcaagttatcttttattttaggagagttttaaaaattatagtttttagtattttttgttttgttcctttggtcatttcttgagggactcctgttacacacacatgttggaccttctttgcctatgttacatattactttctcttgaaatcttgtctcctcatttttttaattctgtagtttttttcttaccatttcctatttctgttaaggcattatccattgtgtttattcattcttgtgtttcttgtaacttagtcttcatccctaaaataagttttgatatcttttctaagtttttcctgagtttgatcacctctattttcatatc

SEQ ID NO: 151131 - DNA, 767 bp, Homo sapiens
tcattttaagcaagtttttaataggaaatgtctctgagagcatgaaaaaaaataggaaaaggatgttatatagtacttaatccaatcctgtacctaatccagcacagaacatgtttatctatgtagtgttaacaagacatttctgagttgaatgggaaaagcttttgctgtgtgatgtagactgtagagagcctcttgtctgcctttttcctttttctgtgcttccccttgtcccggtgtgccatcttacctttcagtccacttatttggaggcttcatttggagcctttctcagttatccttagggcacctcttggctccttggggttggtttctgccccttaagaggtctctccaagtgatcaggccacatcacacagaccttctttttgcttttgcaacagtggtggtttttatctacaagactgttctcccacttgagacaatctgccctgaagcaaacagatgtttgcattgagatctcccctctagatgaataaaatcttcccagaggctaatgctggctaggaaaggttttttgtgcacctatgaagcgtaactgagccctgagcaaccaactttgatgtatattttgtgattgaggaagaagaaaaaatcaaatagcatttctttctgccaaactgttttttgcagataaaaatttttgttgactgaagactttatccaatgtgtgctttgtcctcttccattaaaaagagttcagttgagattgctttttcttatattgtccttgaattttgttctct

SEQ ID NO: 151132 - DNA, 205 bp, Homo sapiens
atactctgccctctactatcaaaaggtgatgtaaggagcccattaaataacacttagttataaacaaataagttttccgaaacaatcccgcagttaaaaggaattcctatgcagttttcagaacaataaaatctatcctttgtttaaagaataggtaattttaaaattgtatcctttatttaaagaaaaggaagcacagctaaga

SEQ ID NO: 151133 - DNA, 139 bp, Homo sapiens
ctctgagtctggctaacaacagggctcaatttcctggctgcaagttacagcagctctaggaagatgctgcttgcagatgcgtggttcataaatcaaacgctccccaattctagggcagcattgggaatgcttccgaggg

SEQ ID NO: 151134 - DNA, 356 bp, Homo sapiens
gccacaggtgcaatctgaatgtagctgccagggtagggtggcccttgagtgaacatcatctttatcatgttccccagtgatgtatccagtggtcttgggctttttagacatgcatctagaggtttccaggtcttctctggggtagagtccttctgttccaagttctgttctcaggcacttgtggggcaggcatgcaggaaggcacaagggaagtgggaggaggcgagattgggcacaagggaggaagccccttttttagagccctgagcctgagccccatcacatgtaaaccaaaaaatatctgagacaggcctcaatcaatttcgtttattttgccaacgttaagaatgtggttg

SEQ ID NO: 151135 - DNA, 242 bp, Homo sapiens
tgggtggatcgggcttcctgcggctgccacctctgaaacaatctaagttgagcatcatggagcatagttatcccaaggccaaggcattttccacactacaggagatgaaagccagtgtgactcacccagccactgtggaaatagaacagcactgaccacacacagtcaggatacagcgccaggatgggggcagtgccccagagggcagagcgcagcctcttacacagccacccacaactgtg

SEQ ID NO: 151136 - DNA, 467 bp, Homo sapiens
ctgggcccagtactacagctggctatgggaaagtacatttattcaccacgtgcaaataggcgaaaatgaactaaattgtcatactcttacctgccctgcatcatacagctttgccctagaacttgaatgtttgtccaactgttcgcttttctctagctccctatgctaggagcaaacttagaagcaagatttattggctgtgatgtgtccactgcaatcgtgtatgggtgctggcctgagtagagagcacttgccaggtcacctcactcatccagagacagcctcatggtggatgagtagttacaacagctttcaccaacatttgttgttttctgttgttctgttttgaatagtagccattctaatgggtatgagtggagttcagtgagtgttggcagatgtatatatccgggtacactaccccaatcaaggtaaagaacattttcatcaccccttgatgttgcctc

SEQ ID NO: 151137 - DNA, 580 bp, Homo sapiens
gctgggattacaggagtgagccactgtgcccggccgtctctctagttttactttgcaatgtcgttcatatccatcccctttctagtgccactgctgaagtcctaagtcactgcctcctaactggtcctcctaccctaactcctctctgaccagtcctcctgccctgacttctccctgaccggtcctcctgccctaactctcttccctgaccggtcctcctgccctaactcctccctgaccggtcctcctgccctaactcctccctgaccagtcctcctgccctaactcctccctgacctgtcctactgccctaactcctccctgaccggtcctcctgccctaactcctccctgaccagtcctcctgccctaagtctcctccctgaccggtcctcctgccctaagtctcctccctgacctgtcctcctgccctaactcctccctgaccagtcctcctgccctaactcctccctgaccggtcctccagccctaactcctccctgaccagtcctcctgccctaagtctcctccctgaccggtcctcctgccctaactcctccctgaccggtcctcctgcccta

SEQ ID NO: 151138 - DNA, 132 bp, Homo sapiens
acctgtcctcctgccctaactcctccctgaccggtcctccagccctaactcctccctgacccgtcctccagccctaactcctccctgacctgtcctcctgccgggctagtcggggggattcctctaagtaac

SEQ ID NO: 151139 - DNA, 424 bp, Homo sapiens
agggtaattcttctgataaagtttcagagggtccttaggcatttataaaaacaccatgttctatggtggcccatcctttgtacagtaacactggagggatgttgggggcagggtgagaggcatgtatcccaattgaatgaataaatgagtcttctatataaggcccaaggaaggaagcaatgcctagcctaattggcaaagaaagagatatgcccacttgtcattcttattcagaaggcacttctatgttgaaacacattaaaatacaagaataaaaatatcaaccgcccctcaactagctgtgtagtaccacaaaagcaagtatcaatcagtctgctatcacaagataagttctgtccttgattagtcaagatgaactctttattttcaaatcctattattaacgtatataaggatggaagcc

SEQ ID NO: 151140 - DNA, 387 bp, Homo sapiens
agggaattacagaatgtaagctccatgaggagctttgattttgtcaggaaattttgttttaacaagaatctttattttatcatttgctgatatgtgccaaagagaaatcaggaaagagaaactagaatggaaaagactggttctctacaggggtggggtagaaagaggtgtaaggcaggggaagagcagttgggttgacgagggaatgaaacctctgtgattatgtatttttgagtagctttgacttatagtcataggaatatttcatatacctaaaaataaacaacaatgaaaaccaaccaggttgtgaggggaacccaaactggaatacaaatactaacaaggctattgaaaatgaacaacataaccacaatgaggtgggtgtaa

SEQ ID NO: 151141 - DNA, 234 bp, Homo sapiens
ctccctgggtattaagattgaaagtggggagctctttaaccaagtaagataaaaaaatactaagtgacataaacattctactgagatacactttaaaaccacaagggaagagattgtctttaaattcaattgctcacaattctcatttgaaatgtcaggaaatgaaccttgagatggtgtcaatcaggcaggagtcagggctttccagctttatattttatgttttcaatgtgc

SEQ ID NO: 151142 - DNA, 826 bp, Homo sapiens
gattggatttaattgaacagttttggcttccttaattttattttgaagatagaatttaatgatttgtgtaggcataacagttacaattaacagtgattccgagatgagcgtagggtttaacttaacagttcacattttcttgggagttgaaaggactggagagttggatgtgtgtcttctttgtgattaaaaaagcatgctggaacttagctatcagaagattctggtggtccatctttgggaagaggaaaagattaagaatgctttgctagtcagtatttacaagagggtttctttacttaaaggcattttctctttggggaggggaggagttgagagttgtcattaatggaaggatcttagaataaaaaagatgtatacatgttttcctttggagtgaatttgtgactggagatggggtttcactgtgttagccaggatggtctcgatctcctgacctcgttatctgccctcctcagcctcccaaagtgctgggattacaggtgtgagccaccgtgtctggcctatgtgctttttaaagatggaactgatttagaatgcagtatattacagtacatgaaaaaattttggaatttctgtatgtttttcactgttggaaagccatagtgagtgtaataacagcattggctcctgttcataaggcatttaaatgatgtgtttcctatgacaggaagacaagcgtttctcattccttcaaaatttggctctcagatggagtgccctttaagctccctgaatgcagggacttcttctgtttcactcattgtcttttttctggggcctagaacagaacctggcaaactga

SEQ ID NO: 151143 - DNA, 847 bp, Homo sapiens
gcttgctgtttcccaaactggagctgaagaagggtgagaagcacttaatgggggaggcagatgtgagcaaaaagcttccaaaggctcagcaaccataaatttcctgctctccgttaaccagtcagctccctgggggctctagaaagttttctggggcccagctcacccagcagccagggtggacggacacctgtgggggtcacactgaggtccctgcctcttctctcctcctgcactggccacagcccagagctgagacatcagtcaagcagacctgatacccagggagcagggctgagagcgtgaccatgcgccacacgatgcacagcattatttctcgtggagtccgcacacagcctccgaatccttcttaatacggcccacaagcacattaacaactgggatgctagacatcaccttgttgctatgcccagaggaagctgagggtgcacaagctgggtgcctgtctgtggctttcagctgcccttcaacacagaactggccagggactgtgctggggacatggttcatagcctgccctgagctttcaaggagtatacagtctagtggggaaagagcagatggctggcttggaggaacagagacaaaaaaaggccatggggtgcctgtgtgcagatgaaggagggaatgggctggggaaagaaaggggggctgttggctcagtacactcaaactccgcagcccttgctggtgggaggaggtaggcccccgggggagctccgctttgggtagtggcaccagccctgtctgcagtggacggagacgagcacctgaaccttccatgactccctgccacactgcctgagcagaggcaaacaagaggtag

SEQ ID NO: 151144 - DNA, 516 bp, Homo sapiens
aatagatactttgaaacatgcttgttaactctaggaatgccattttttcttaagcatatgctcttcctctcctatgctttgcataatagtcctacatctattttcactttctgatgactcaatacgtatttatcagctgtctgtaatacgcagacacttgctttttctcaccactgtaaacctcaatatattttatacttagaaccttagatgttagaatttactcatagacagttaaattcgctggcaggccaggagttctgacaaagaggcagcagagagagagagctggacttctgtcaggagacccagttagagcctgggcttatccagtaaatgctaagtaactgttgggacactagcttcacacctctttgagtcccagtttctcatctgtaataagagtaacatgtattttcttgccagcctcataggatattatgtgactcttacatgaaaggtcttttctaagctctaaagtactgtacggaagtttattactgatttgcatatgtg

SEQ ID NO: 151145 - DNA, 284 bp, Homo sapiens
gctttgaggagctgctccatcagatgaggagacggggccccgagcaagcccaggcctggaccatcccggagtgcacgctcagtgtgcacacacacgttctcatgtacacaccgtctgcctttggcccatgtctggggaggccgggtcccctgggtgctgaagcccttccatgacccaggcttgggatgagggcaggtgggtggatgcagctgacaagagacccaggggcactggaaggcagcacacgggggctctggacatgcctcaccttcgtgtgtgcacgt

SEQ ID NO: 151146 - DNA, 507 bp, Homo sapiens
cagaatagaacatccctggggcaggaggcaggtgcattttgagctcttcctaaagtggactcctttgctttgcacttctcgagctttctccccgccaagagccttcatcaccacttagaacattgccatcttcctagtgcctccgatttctgaggcgagaggactgaggctgaaaactgcccggctgcaggtcaccctcaaggccaaaggtagctcctgcacctgtgccagctcctgcaaatgcaaagagtacaaatgcacctcctgcaagaagaactgctgctcctgctgccccatgggctgtgccaaatgtgcccagggctgcacctgaaaaggggcattggagaagtgcagctgccgtgcctgatgttgggacagccctgcgtccagttgtaaataacgcaacccctacaaatctagtttttttttaaacacaaacctaacccatttactatgtctgttttcttaaatgaaatatgggaatgataataaacattgttggcctta

SEQ ID NO: 151147 - DNA, 543 bp, Homo sapiens
cagaatagaacatccctggggcaggaggcaggtgcattttgagctcttcctaaagtggactcctttgctttgcacttctcgagctttctccccgccaagagccttcatcaccacttagaacattgccatcttcctagtgcctccgatttctgaggcgagaggactgaggctgaaaactgcccggctgcaggtcaccctcaaggccaaaggtagctcctgcacctgtgccagctcctgcaaatgcaaagagtacaaatgcacctcctgcaagaagaactgctgctcctgctgccccatgggctgtgccaaatgtgcccagggctgcacctgaaaaggggcattggagaagtgcagctgccgtgcctgatgttgggacagccctgcgtccagttgtaaataacgcaacccctacaaatctagtttttttttaaacacaaacctaacccatttactatgtctgttttcttaaatgaaatatgggaatgataataaacattgttggccttaaaaaaaaataaaatttaaagagaaatatcaaacgaa

SEQ ID NO: 151148 - DNA, 180 bp, Homo sapiens
ccaaagggctaaaatgtggatatacggggtgactgcaaaagaacagcaaaccctgaatgatgatgaaaccagacagaaggaacccgggtcctttgatgacatcatggattcaatttgctctaattccttggattgcctaccagttcagacttttacttcaggaagaaactttccatgtcc

SEQ ID NO: 151149 - DNA, 277 bp, Homo sapiens
caaaagctgaaaatatttactatttggcctttcagggaaagtgtgccagcacttgtcttacagcatcactgtattacagtgcagtataataatgcatccttaaaatacacataagttgaacaagaaatgttaaactctattgattacaatgttttaatatggcagagaaatatgtaacatttactagggagatatatcaagcatagttttaaatttttaaagtttgatgtttaagggtaccagtgaatatgattagacaatgctgataaacaggagc

SEQ ID NO: 151150 - DNA, 288 bp, Homo sapiens
agcagtatcatagttacgggctttgacatatgcttacttgttagaaagctctggctaaatagtgatgtcaagatgcttttacttaagtgaggctatgttcataaagagagagaaatttcgtgctgggcacggtgacttcttttaggcctttaggaagcctctcagagttcagagagaatgccctccctgacctcaaaatcagttttccacagtgtacgaaactcatctccgcggtttttaatctgtcagaagaactgcattttgatatcttgattcccttttcagaag

SEQ ID NO: 151151 - DNA, 493 bp, Homo sapiens
atgataaaagccccagcaccacgagagtcccctccacccgtcagatgtcgttatggactgaagcctcagaagagctctccctaaaggacagcagagcatgtagtaggtctcattcctgctcacccatctaggtgttagaaagcacctactgcctggtacagcctagcctacaacagctaaaggattatttttttaaagctacacttttttgtgtgtggtggtgcaatacacataatctaaaacttaccattttaaccattaagtgtatagttcagcacttaaaagcattaagtacattcacattgttgtgcaaccatcaccaccatccatctccagaatcattttcatcttgaaaaaggttgttactgaaactaccaattaaacaataactccccattcccccttctcctggcaacctccattctactttctgtctctgtgaatatgactattctaagtacttcatatatgtggaatcctacattctttgtcc

SEQ ID NO: 151152 - DNA, 403 bp, Homo sapiens
agcaaaaaggaaagaggaagacaagatcaggctttcctttatccaagttctgccactgccagtctcaattaggggaaggaaaaaatttcattttaaatcaaatcaaagtttgattcttatctgggactggacactttttgttaccgaattgagaatgtgaggtgcgtgtgatttcagttacctgagagtaatcagaaaaaatttcatccagttgtcaaggtggggccaacaccattgattagatttgaagagacttgaggggacaaaataaaattgcttttgcaattataccttgtgaaaactgcttgctcaatgtattagtcatatttatttgctaactttaatcttaatatcctgtcagaaaatataattagcatagctgaaagttttttaactgaaaagc

SEQ ID NO: 151153 - DNA, 1273 bp, Homo sapiens
ctccttataatttgcttttcccacagtgttcctcatcaaagaaaaaagcatccaactgctcaggccatcactgaagtcatccttgactcctcttttaccctgatcccacatccaaaccatcagcaagttattatctccactacctccaaaatatacctcaaatccacccaccagtacactcaacaccacaatcagctgttgcctcaactatcacgatagcctcttttttttttggagacagagtctcgctctgtggcccaagctggagtgccgtggcgtaatctcagttcacggcaatctccacctcccgagttcaagcaattctccggcctcagcctcctgagtagctgcgattacaggtgtgcaccaccacgcccagctaattttggctttttagtagagatggggtttcaccatgtgggtcaggcgggtctcaaactcctgacctcgtgatccacccatctcggcctcccaaagtgctgggattagaggtgtgaaccactacgcccagtccacgatagcctctgaactggtcaacctggttgcattattcatctttcaaagtgcatatatcagatcaagtcatttccctgcttccaatcaaacttgaaatacaaaactagatacctatcaagtctttaagtccctatgttatctggtccctggctacctcttctatctcctatcactattcccccctttactgttttagcccttttctattccttgaacacaccaacaggtactcctgtctcagggcttatgctcatgccccagatagttgcactgggtccttcatataattcaggtatctcctgaaatattagtgcctcagaggacttccctaactacccaacatcccttaccttgtttatacttcctttaccacatctatcatcaaaatgctaggacatatttcccatttatttaatattgtctatcttactcaaaaggaagcactatgaaagcaacaacttttatctgttttattcactgttgtatactctgggcttaatacagtacttgacataaagatccagatgggatctcatcttgttgcccaggctagagtgcagtggtgcaatcatggctgactgcagcctcgacctcctgggctcaagaaatctactgctcagcctcccaagtagctgggaccacaggtatgtgccacaatgcctggctaatttttaaaatttttttagagacatggtctcactatgttgcccaggcggtctggaactcctgggctcaagcaatccccccacctcagcct

SEQ ID NO: 151154 - DNA, 158 bp, Homo sapiens
gggggaagtgagcacaggaccaggggtcatgagatctgacactgaccagctgaggacctggggcagggggcttctctctggccttggtctcttccttgatgctgtaaggattggtttagataatgtaaggatggagaggggagttggatgcctctcgt

SEQ ID NO: 151155 - DNA, 370 bp, Homo sapiens
tacactgatatagggagtgctatgaaacaatttcaatatgtggtattgacttaatgggttaaatggtagatagcaaggacaatttattacagactaaaagggtaagagtccttgttatggaatggctaaatacttggtaaaaggggcaactacagaaacttagcaggcagtatgagacattcatatatgctctaggcccatagttaagttgagaaagacagagaggcaaggggaagagaaagcaaaaaatattcaaagtgagaattgtgactcaaaagaaacgggtgtggtcattgctcatagagccaactgcaataaaatagagaagccaaaaatatgtttgagagaattgtgctgtcaaaagagtcaa

SEQ ID NO: 151156 - DNA, 229 bp, Homo sapiens
atccgttataaataacatgagatacgaggggagagagaggagccttggcgcgaactttggttctttttttataatttctatctctttgttgatattttctgtttggtgagccattgtactcatactttctttcagttatttagatatagttccttttacctctttgaatatatgaaaatagctgatttaaagcttatgtctaataaatctctggcctcgctggcctcaa

SEQ ID NO: 151157 - DNA, 247 bp, Homo sapiens
ccaggagtttgagaccagcctggacaacatagcaagaccccgtcccatttaattaaaataattccatggcctcctcccagcagccctgcgtggtatcatgcccaccatgtatgtgaagaaactgaggctgcaagcagtgaagagcttgtccaaggtcccacagagaggctaccagagtccaggcccacaccttggtactggcttcccctcttcatcctcggcaagagccgtgtgggagggagcctgc

SEQ ID NO: 151158 - DNA, 256 bp, Homo sapiens
gatggggaaaaggatggatatttaattcacaaaactgtggccttatagacttttgcttctttggtttagtgattttgtttagggagagaaagagttgatgtggaagttaaaggttgagaaagaaagaataattttgaacaactgagtttcaaggtgcaacatcatacccagattttaaaggatgcccctcagggaaagttaagtgttggctccagatctcgggtcagagtttggttccttaactctctaatgatgt

SEQ ID NO: 151159 - DNA, 448 bp, Homo sapiens
acgtcccttctcattaatacacatgtttggacatgaggatcaataaagtgttaataaactgacaaaaccacagctgaaataggacttcaccagtgtcacaagacagccagtgggccacccctccctgtcgcaccacggaggcagaagcagggcaggtctgcacacatatgcatttaagataaggcacaatagcagtgtgccaggctcctcagccccagaaaacagagaggttcttcagtctggatagagaagtggaaaatgctttcttttctttttttgttataactgctggtgccatgataatcctctgtcggcccggtggttatttggcacttcgatttcttactctttttcactgtgcaagtcactgaatgtaaaaggtgaataagacatgaggcacacagacaaatacctctgagaagggtaagtgctgtcatagatgtgtgtt

SEQ ID NO: 151160 - DNA, 224 bp, Homo sapiens
agtttatgtgcagcttcccgtctccccaacaaagcgatcagctcaccagcatcagataccaagccctgttagtccggcccttggcacccagatgcctgtagggccttaggtgtagggagcactcaactaagatttctctgtttaaaaacttctgccacacaggcctgggtgtgggaagaataactaaataaataaaaataaacacttccaaactctgcctcttg

SEQ ID NO: 151161 - DNA, 309 bp, Homo sapiens
gagaggctaagggactttcccgaagtcacataggaaaccaggactaaagcactctgccagcaccctgactaaaagccaggctttggcacctgcagggcagtattttggttcattttgtgagatccctcaaccccaactggctctggggctcctatgtggcaagtaaagcctctcagccttgaggggcttccgagggccaaatgccatgcactttataggactgaattgaggagcagcccccaaagactttggaggccaaatcacactgcatttcccaatggactgtacaggttagcccagcgttgcaga

SEQ ID NO: 151162 - DNA, 352 bp, Homo sapiens
aatttttttaaataaaaagctattataaacgttttgatcaaaatttgcccatatgaaaacatgtttttgcttgtatatgcttctttgggtgggttctcaagacatcacctgactgttaaacagaagagggaatgatattttcactgtatgtgtctcttttgtacctttagattttgaaccatgggtgagtgtattataaaaataagtatcctattgcaattaaaacttaagttggtctgctcttaggttcctttcacttccagatacagtcactttgttgttatacctctacactttaggtaggcaagcaggatctttcttcactgcagtttgaagtgtatagtgataaaat

SEQ ID NO: 151163 - DNA, 255 bp, Homo sapiens
tggctctgtgaacagggtaagtaagagtttgcaagtgggagtcaatgaggaagggaggtggccactagaaggcagtgaactatcattaggaaggagtctcccacttttagtgtgagcttgggaggctccagtcctaggtacctgtccttgccctgacaggaagcatcatcctctctctcttcttcggaactgggctccgtgattggctgctcctcttcctcctcctcctccctgagacaaagccaggaaaagaga

SEQ ID NO: 151164 - DNA, 321 bp, Homo sapiens
taacaagaacaaccactaccaccggcatactgatctatgcctagcttatgggctacctcctgtgctcagagcagacattactaatcacaccactctcagcagagtccagaaaagatccaacattcttctcagcacagtaacgcaggcacctgttgccagacatcctagagcacaggataagcctccttgcaatacatagactctacttatttgacaatttgcagatcagttatttcctaacttgtatgactacaaaagcaatttcaacagactaatatctatgtaatcattggcctccactatggagttaaagaactgtcc

SEQ ID NO: 151165 - DNA, 133 bp, Homo sapiens
ctcttttagggaagcaccttattctaaagttaatgtctttttactaggtaagagcatccagccatgaaaggaattgagtgtgtctgttgggaaggcacagaaatgcaacagacactgtagcataacgataagg

SEQ ID NO: 151166 - DNA, 270 bp, Homo sapiens
cagagggagcagaatgaacaaagcccttgttcagaaggagggcctgtccagaagagaggtgaggctgaagtgcagggagcaggaggttgtggagatgtggagagaggccacattacggagggctctactgtaggccaaattaaggaatttttttttttttttttttttggaaatgggttctaacccggccaccgggcgggagtgcagggggcgtgatcggggcccagggcaacctgggcccccagggtacaggtagatctcgggcctcat

SEQ ID NO: 151167 - DNA, 369 bp, Homo sapiens
tgacctctctacccagctttgtgcgagaagagtgaaaataactggggcgctcagggccaaaccccaaaacaggctccaactgagagccctggcaaggcctggtcttgtaaggagcatgtaccccctgctcccctgacgcattttagaacatgatgcagaagggcagagggcccgccaccatctctgcgaaagtctggaccggatggcagaagctggggctgggaaacaacttcagaactgccagattcaggtgtggaaggagaaaggcattatcccaatggggagaaaatggcactccaatctagttcaccagaaagagctggaaaaggttgcctttttgttgttgttactttttttttgagatggagt

SEQ ID NO: 151168 - DNA, 206 bp, Homo sapiens
gttgtttattctcattggccttctctcctctctatttaaaatagtccctccatccccatctttatgtatattagaaagcagttattgagattaaccatttggtttcccattggaaccatttggatatgtttctgagggtctacttagattttgttttgccagtctgtcactggtcttattagcagtcaaatcttaagacttcaata

SEQ ID NO: 151169 - DNA, 351 bp, Homo sapiens
ggactccctcaggctggtcgctgtccgagaggggccggggaagagctgcaggcctggctgccttcggcaggctgtgacccagcaggccaaggccgagtgggcgggggtcgagggaagctgcctggggcgcgtgggttacgcggcagacgctcctgagtgtgtgggcagcgtgtccaagccacggatctgggtgcctggccgggcccgggtgacacgggaccgtgtgtccatgcggctcacggagggtccagtctccggacatctgagtccttgccatgccctaccccgggcccatgcctggcatagaccccccagtccaggcctcagggcagccccctcaccactcctgct

SEQ ID NO: 151170 - DNA, 546 bp, Homo sapiens
caacgatggtcctcagctcaagaggtcctcagctcaacgatggtcctcagctcaacgatggtcccagctgcccaggaggatgaggtaggaggattgtttaagcctgggaagtcaaggctgcagtgagccatgatcgccccactgcactccagcctgggtgacagagcaagactctgtttcaaaaaccaaagtacctgaacctttgaaacaaatcctatctacctagagaggatcctctagaatctcaggtatatgaacatacttggtagcatgttatttaactctggtactcaaaaactgagtattaagttattgtgatttgaaattgtggatcttcagtctttagctatttgacatatctgcagcttttgtacattgcttccattcagttacacaaatgtccacttgtccatttagaaactaaagaccttcagtatcacataaaactgatcatcagttgttctttggatataacacattagacttgctgtggtctactcaaatggagagttcccagtaataaaggctgccagaaacttacccatg

SEQ ID NO: 151171 - DNA, 358 bp, Homo sapiens
cgacctcagcccaccatgcccagctaatttttgtatttttgtagagacagggtttcaccacattgcccgggctggtcttgaactcctaagctcaaatgatctgcctgtctgggcctcccaaagtgttgggattacaggtgtgaaacatagcacctggccggtgatttccatttttttttctttactcttatctctgttttctagatgtcctacaatgaacacgcatggcttctataaaaaagaaaaaaaagcttatacttttgcaaattgtatcaaactaagcaagcataggaaagaacaaaaatatggagaaataagtatttttaaacattgtgggctgggcacggtggctcatatc

SEQ ID NO: 151172 - DNA, 437 bp, Homo sapiens
gtcctggtttatctacatattgttacaactggagaagccagataagcaaaggatgtgaagacaagcagggagaagtgtcttgatcctcaagtcctcacattacaggaagcatctgctctgagaacaataactcccagcctctgtataatacagtaacattctcctttgaaacaggagagtgctcctagcaatggcattttcaatgaaactctatgtcaatagagtcaaaaacagcccatgaaagaagcagcgttttccctccttccttcccacagatccattctgctcccaggacagctttgcccgccccagtcttgagtacttgaactttcctatgggcatacaaggaacccttctcccaaaagaagatctaagaataaagctgaaaaccaagccacaacaacatgcacccaatgtaggtactatttgttgcaaaa

SEQ ID NO: 151173 - DNA, 349 bp, Homo sapiens
gtttttttccactgtcagataaacctccacgctttggcttctagagtgatgggtgggcttgctttccttttgtggacttgatggcatttgactgtataattattcttctcagctgaatatccctgcgtgtcctttgacatgatggtggtataggtagctttaccaggcataatttctataatccatagagtgtcaagaaggtacttattttcctatcaaatgctgctgacctgattaagccttctgcctggctttgtagctgaagataatgagtttgtccagtgcagtggctgttgggacctggggtctttctgaagatgattgtaacctgggtgtggagtggggcctt

SEQ ID NO: 151174 - DNA, 913 bp, Homo sapiens
gcatatgacacccccagtgcttggttcaaacctgtttgagtcacctgtcactttctaccttgaatttttgtcaccaatggacatgcagtaacttctatactagactgtgactcagacgctcacaatcacactcaaacacagtctagtgtttttcacagcctggtatagaaggtactgcctgtacatcagaacaggggagcaggagcctgatctgatttattatgaagtctcccaaggcctccagcgcacagtatcaggcacacaggaaacaatcaatgattaatgtgtgcttcctccatcctatgagaaatattacttaggtctctttatgacgagtggccaaaaagcacaaagccgaatctgatgcttattaatagtaatcccatacttgctgtaagccctgcaacaactatcattatccatgttttgtttttcaatggaggtataatttacatacagtaacatgcacacatcttaagtgtatagcttgatgaatttttacctaaatatacctcctggaaaccactgaccacacaaacatctatgtctttccatcactctagaaagcttcctttttcccttttcctagtcaattaacccccatgcccctcacactccagtgaaccactattctgacttctactcccataaactaggtttgcttgtttgtgaacttcatataaatgaaattgtacagaatgtactcttgcatctggcttctttctcttaacataatgtttttgagatttatccaggtgattgtatcagtttattctttctttttttaatctgctgtgtattattccattgtaagaatatgccataatttgtttatccattcttctattgatggacatttggatcatttccagtttgggcatattgtgaataaagctgctatgaatactggtgt

SEQ ID NO: 151175 - DNA, 1058 bp, Homo sapiens
gcatatgacacccccagtgcttggttcaaacctgtttgagtcacctgtcactttctaccttgaatttttgtcaccaatggacatgcagtaacttctatactagactgtgactcagacgctcacaatcacactcaaacacagtctagtgtttttcacagcctggtatagaaggtactgcctgtacatcagaacaggggagcaggagcctgatctgatttattatgaagtctcccaaggcctccagcgcacagtatcaggcacacaggaaacaatcaatgattaatgtgtgcttcctccatcctatgagaaatattacttaggtctctttatgacgagtggccaaaaagcacaaagccgaatctgatgcttattaatagtaatcccatacttgctgtaagccctgcaacaactatcattatccatgttttgtttttcaatggaggtataatttacatacagtaacatgcacacatcttaagtgtatagcttgatgaatttttacctaaatatacctcctggaaaccactgaccacacaaacatctatgtctttccatcactctagaaagcttcctttttcccttttcctagtcaattaacccccatgcccctcacactccagtgaaccactattctgacttctactcccataaactaggtttgcttgtttgtgaacttcatataaatgaaattgtacagaatgtactcttgcatctggcttctttctcttaacataatgtttttgagatttatccaggtgattgtatcagtttattctttctttttttaatctgctgtgtattattccattgtaagaatatgccataatttgtttatccattcttctattgatggacatttggatcatttccagtttgggcatattgtgaataaagctgctatgaatactggtgtattttatggacctgtgctttcactcctcctggctatgtacttaggagtaaaattgctgggctgtagagaaggcatctgtttaacttaatagaagttagtatcactatttttgatttggatatgagaaaaaaagggtttttttaga

SEQ ID NO: 151176 - DNA, 374 bp, Homo sapiens
taaaaacacacgaataaaatacagaactacacatacacaaacacacacactccaccaccaccaccaaagaactaccttaaaagtaaccagagaaaaaggcaggtttagtgcaaaggcacagtcattaaatgaaagactccttaacaacaacaggagacgcaaggatacaacaggtaatatctgctaaaagaaaaaaatcgccaacctctggtttggttatccatacatacctagactaacattcatgaaaaagaaaaacattttccaggcaaacaaatatagggaatttgctactcagagaccttcaatgaagactacttcaataagaagcgactggatccagaagtggaagtggtttgcaagaagccatggtt

SEQ ID NO: 151177 - DNA, 256 bp, Homo sapiens
ttggataaccaagactgaaataagttttctaatttttttagaattcaagtaaatctctaaaacaaaggggaacttgtccttcaaaaagaaagaaacaaagcaaacgacaaacactccaatctgaaaaatcctcagagtaacagaaaatgaatcttttaaaatgtgttgtgattggctcccaggttcaagcgagtggctcaaataccaaaaatctgtgaagtgatgtttcatttaggactgaataaggtttttctac

SEQ ID NO: 151178 - DNA, 301 bp, Homo sapiens
ttccctttgatacaaccataatacttgggatgtggcacaaatgctttttagggtacctctcatttattcacatagaaaattaaataggacacttagtcaagggtgcagatgtgaggatttaaagagacaatgaaaaaaagcacctaacattcagattgacacgtaagtatccaaagtttggttttccttgctctgttcttctcgtaagctactctccatattttccacctttcctttatttcttaaattcctaatacggtcaatacttattttcattttcttacttaattccttgtagcct

SEQ ID NO: 151179 - DNA, 334 bp, Homo sapiens
atgttcattaatataaagcatgtatcatatacaataaagtcactttatttctatacaaaatatatgattctcattaatctctgactctggctgtaatgtctctgaatttccagcctctacaacctggaaaatcgagagctgagtaaaatttcatttttgattgagtacatgtaagctgagcacttagctagctcatttccttctatttaactgcaagagacaatttaagaggaaagtaggaaatggatatagccctagaagctctgaaatatatccttactgatgattcacaaagagtagaaggaataatgatgaagtgcctctaaagcatatt

SEQ ID NO: 151180 - DNA, 313 bp, Homo sapiens
agggttttgcatccgtcacccaacgctctcatcaaccttctggggaaactgtgttctactcttattctccctcacccctacttgggactaaacaaatccaaagaacagcccaaactgattttctgttctgggatgtgctgaattccactgcctgaagacgtgcctggtggctgctgttgagaagcctctggccgcagagcatccacagtgtttgtcacttcagtgggaataggctgcccttccttctctgtgctcctgtcagtcctgggcttttccagctgtctcacatctatccaggcatctgccttccccc

SEQ ID NO: 151181 - DNA, 557 bp, Homo sapiens
cgagctcggtaccccaacgatggtcctcagctgccagacagcagattgtggcagctgaggttttccacggtagagtagaagcatccatcatgtgtgacattcagcagatggggcgctgtgggtggcttggagcactctggttgtaactgaggcaggcacagtgtttaggaaggctgtgcagtaatctaggctgaaggaaggggaaagcctagactaagattgtggctgtgggattgaaatagcgttgaaggagctgactttgactcccggagatgatggggaaagaggaaatcagaagggaccaaggatggtgatgttcttaagagaagctgaggaggaagagaggatgatatggtggcagacgtatagagagtctttgtagatctctcacattggaggggactatggtcggaggtacagatgtcctaaggcaggctggaaaagggagtctggagagagcttggtgttgtagtgaaccacagggagccgcctccttggccctgtgatcacccagggactgaatagagaggcggccctgggagacttcagacacttag

SEQ ID NO: 151182 - DNA, 457 bp, Homo sapiens
gcttattccattgtttcttcttttaaaccttgttgatggtgaatagtttgggagaaactgttcatttgccaaaaaatttcggttcattagcttacacagcactctccccttgttaactggatggtcctgccttcaattgagggagatagatgaatgtacgagggtccctggttggcctaatcatggctttgtttggatttttttttaagggaccaacttctagagcaaggcctacactttactgcttcaaaaccaagatatttaggtcaggctaagatatttttagttaactgtgggcacttttgactgttgatttggggtactgcgtgtatcaagtaaacaattccctgtgcacatgcatgtggtggtggtggagtattttcgtagtcctgatttctttccatttgtcagttaactgctttttaaaagtttattctggtcatatgggggtgtaagt

SEQ ID NO: 151183 - DNA, 938 bp, Homo sapiens
tcacgcccattgttatcaatctccttccacttcctcctcagataagtagtcatcgaatttctatcactgtacgttagtttttcctaatctagaactttatataattggaatcacagggtatgtgttccttcctatatggcttctttcactcataattgaaacatatttttttcatccatgttattgcatatattagtaatttttccctttcatgactgaatagcatttcagtgtacatgtatagcacaaattgttattttatgctctggaattggatatttatttgtttccagtttttgacatcttcatttttgaggaaacagtgggcccttgcaatctagtggctcagtgtttagctttccatgacatgagactcaaggcttatggttctacattcccagatatatggtctagtcatggcttctgtttctgggatgtcactctgacatgcttcaactcagtggttcatggctctggctgtgggcgaaaccctcatgtgaaatactttagttaatagaaaaaaaattgaatcatttaaaagtacatgatgggaagataagtaatacacaggcaatttctgctttcttccatgctacaaatcctcccagtggcaaggagcacaagtttgtgctgccatcggattaagtcattggcaaagtaaagataaaacaccatgagaggttgggcatggtggctcacatctataatcccagcactttgggaggccaaggtggccagattacgaggtcaggagtttgagaccagtctggtgaacatagtgaaaccccatctctagtaaaaatacaaaaaattagccaggtgtggtggtgcctgtaattccagctacttgggaggctgaggcaggagaatcacatgaacccgggaggcggagatggcaccattgcactccagtggggtgacagtgcgagactctgtca

SEQ ID NO: 151184 - DNA, 337 bp, Homo sapiens
cacacacatgtctgtcaacgtaaatggagaggagtccttggcctggtgcccaagttgagcacgcacagtacagctattatgtgcaagttgccctcacattgccatgcctggccacagagtgctttccagggtacacatctagtacttgatatgaaagttttcaatttttcagtccatgacctcactgattctttaaggtaagtacatttacacaagaagcccagctcctaaagaggttgtgtctcttgccctgatcagagtggttgagctgctttgtaaaacaaggagcctgagtccatagcattcactcttagcattcactctttcccactatgct

SEQ ID NO: 151185 - DNA, 534 bp, Homo sapiens
  misc_feature (490)..(490): n is a, c, g, or t
cccacgatggtcctcagcttctatttttctcagaaaaacagaagctgaattttcaaaatatccggggagctgtctttgagattgttttgagaagaagccagcatcacgagaagtggaggtggtttcatgcctcctggagacagggcttaacttcatacagtttggttttgttgcagtaaaatgtcactgggatcctgtaaagacaagaaggagaaatggtgttttgcctttctttcatttccttttttttttttcaaagacagggtctcgcctaggcaggatgtagtggtacaatcataactcactgcagccttgacctcctgggctcaagcaaccctttcacctcagcttaccaagtagctgaggaccatcgttgcaacgagggtcctcagcggcattaaccagccccagttccgggcggtctggggggaagtgaaccggtgtgagaagatgcgccagttggatgctaaaaagttggcagagacccaanctataaaggacacaccacggaaagagaagggtcacgggaagaga

SEQ ID NO: 151186 - DNA, 118 bp, Homo sapiens
gctccttgtttacatatccacccttcaggactggataacagatagtcttttccgacctgaatcccattccattcccttttattatgtgtccctgaaattctattacctgctcatggtc

SEQ ID NO: 151187 - DNA, 264 bp, Homo sapiens
actgcagcaagtctcatcctagaagaggctgcgagaacaatggccaagctatagtgtaggaggttctcaggcctttcatctctggctgcaaaatgcaacagagcagatggtagtaataaagccaactgggatcctcagggctctgggatggattcttgttacctttgatcactgtaaaacaaacctttctctggaagagttccctcaaccttagccttggtgttctaggtgtgcagcagcaggcaggctgagcaacatcaaagc

SEQ ID NO: 151188 - DNA, 442 bp, Homo sapiens
attttaaattgttatttttggtttttcaaacattttttgatgtgctattggttgaattgacagatgcggcatccatggatacagagggccaaccgtataaataacataaaggagaatagattggagtgaagggggcatacttggcttatcctaagaaatagattactttcttgaagtgtcacagtgtgtctatatctgttagccttaaaaagatgctcccccattagtgttctaaaaataaatcttcaagtgttaattaaaaaaagaaagtaagaaagaaagaagtaacatactttcaagcagtgattatgcccagtttggtgtcttctcatgtaaatttcaccaaagtgcattttgagtgaatatcatacagtgaatgaaatatatgagtaattctccctcatcaaaattataaaaaaatacatctatacaatcaattctg

SEQ ID NO: 151189 - DNA, 477 bp, Homo sapiens
tgagatggaatcttgctcttttgcccaggatggagtgcagtggcatgatcttggctcactgcaacctctgcctcctgggttcaagcaattctcctgcctcagcctcccaagaaactgggattacaggcacacaccaccatacccagctcatttttgtatttttatagagacagggttcaccatgttggccaggctggtcttgaactcctgacctcaagtgatctgttcactttggcctcccaaagtgttcggattacaggcgtgagccaccatgcgaggcctgccttactttgtatacatggtttgaggtgcacatgtaggtattcaactgctcctgcaccacttgtttaaagattatcctttttctactgaactgtctttgcacttttgtcaaaaattaaatattcataatgtgatggtctattttcatattcatattctttattctgttccattatttgcccatcttaacaccaa

SEQ ID NO: 151190 - DNA, 944 bp, Homo sapiens
gagcgtcccgcagtggctggagccctgggcgctgcaaagcgtgtcccgccgggtccccgagcgtcccgcgccctcgccccgccatgctcctgctgctggggctgtgcctggggctgtccctgtgtgtggggtcgcaggaagaggcgcagagctggggccactcttcggagcaggatggactcagggtcccgaggcaagtcagactgttgcagaggctgaaaaccaaacctttgatgacagaattctcagtgaagtctaccatcatttcccgttatgccttcactacggtttcctgcagaatgctgaacagagcttctgaagaccaggacattgagttccagatgcagattccagctgcagctttcatcaccaacttcactatgcttattggagacaaggtgtatcagggcgaaattacagagagagaaaagaagagtggtgatagggtaaaagagaaaaggaataaaaccacagaagaaaatggagagaaggggactgaaatattcagagcttctgcagtgattcccagcaaagacaaagccgcctttttcctgagttatgaggagcttctgcagaggcgcctgggcaagtacgagcacagcatcagcgtgcggccccagcagctgtccgggaggctgagcgtggacgtgaatatcctggagagcgcgggcatcgcatccctggaggtgctgccgcttcacaacagcaggcagaggggcagtgggcgcggggaagatgattctgggcctcccccatctactgtcattaaccaaaatgaaacatttgccaacataatttttaaacctactgtagtacaacaagccaggattgcccagaatggaattttgggagactttatcattagatatgacgtcaatagagaacagagcattggggacatccaggttctaaatggctattttgtgcactactttgctcctaaa

SEQ ID NO: 151191 - DNA, 436 bp, Homo sapiens
gagcgtcccgcagtggctggagccctgggcgctgcaaagcgtgtcccgccgggtccccgagcgtcccgcgccctcgccccgccatgctcctgctgctggggctgtgcctggggctgtccctgtgtgtggggtcgcaggaagaggcgcagagctggggccactcttcggagcaggatggactcagggtcccgaggcaagtcagactgttgcagaggctgaaaaccaaacctttgatgacagaattctcagtgaagtctaccatcatttcccgttatgccttcactacggtttcctgcagaatgctgaacagagcttctgaagaccaggacattgagttccagatgcagattccagctgcagctttcatcaccaacttcactatgcttacttggagacaggtgtatcagttcgcccccgagacattcgcccccgcgag

SEQ ID NO: 151192 - DNA, 549 bp, Homo sapiens
aaatcactaatcatctcaacaatagtttgcaaaatcaatcacaggcagagacacagatgctggcagagttcctaaaattgaaaaaacacaaaattaagcctatatgaggcttaatttagagttcagagtaaatatcaataacttattccattttacacattctcatataaatctgtcttatattggcatttattcccaaaagttacggaagggaaaacatgtttttttgtgtcttactacatactcatcttaataaataactatccttcccatctggtcttaaccattatgagctcccttcctgagaaaatgtgtctgtgtttatcttgcttaacaaagcaaataactcttgcactgtgccatttttgaagtttctatttccttatcaatatcttttttgttgttgttgtttttagacaaggtctcactctgtcacctaggctggaggacagtggtacaatcatagctcattgcaagcttgaaatcctaggatgaagtggtcctccctcctcagactccccagtagctgggactacaggcacatgttat

SEQ ID NO: 151193 - DNA, 750 bp, Homo sapiens
cagtatgtattagggaacatgaagaaaatctgcagttatcactaacagctgaagctgatgataggcttgaataaaagaaatgtaggaagcagtgcagtttgcctcaacaatataaaaacaacccaagaatatatcctcataaagcataggcgtggactctgttactgactgagttgtgtcctccccgaactttatgttgaagcctaactcccaatgtgactctacttggagatatgccctttaaagaggcatttttggttaaatgaggttgtacaggtgaggccctaatccagcatgactggtgtcctgataagaggaacagacaccaagggatgtgcatacacagaggaaaaggacatgtgaagacatgacaagacaagaggcatctgcacgccaaggagagaggcccccagagaaaccacacctgccaacaccctcctgaaattaaacttcaaaactgtgagaaatacatttctgtttcttaagccacccagtatttagtattttgttatggcatctctaaccagaaccctgactaatgcagaccctaataatgggcatcaacaaattaagatttgtatatggattatatgatgagtttttgttctgccattaattaccagagtgatttatgggaaggtatttaatctctatgggtcatattttcctgacctttgatgaaggatgaaaaaagaactaaaaaatatctgtaaaatagacacaagtttaaatgtaatgggaataaagaca

SEQ ID NO: 151194 - DNA, 267 bp, Homo sapiens
agccgtggcttagggttgggaagcagaagagagggagagaaggaggtgggttcaggacatatttctgagcaggaaagaggcagtgagggaaagaggggcataatggagggttggcttgagcctctgcatgacggcgagccatcgatgctctaaggcaggaggaagagcagttcagggaggaaatcatcatgagtcctgctctagccgtgagaagttggagatgcagattctgcattaagagaggatgttgagtcgggtaaaaatctg

SEQ ID NO: 151195 - DNA, 314 bp, Homo sapiens
tgagatgcagtctcactctgtaggccaggctgaagtgcaatggtgccatctcggctcactgcagcctctgcctcccgggttcaagtgattctcctgcctcagcctccccggcaccaacacgcccagctaatttttgtactttttagtagagatgggggttcaccatgttggccagactagtctcgaactcttgacctcaggtgatccacccgccttggcgtcctaaagtgctgggattacaggtgtgagctgacgtgcccggccagaagctgtgtgctttgaataagccacttcgcctctttgggcctctctgt

SEQ ID NO: 151196 - DNA, 264 bp, Homo sapiens
ttcttttacgtctctcaccgtctcgcttcgcccgttatgatgttcggccgcatcatagttgattttattggaaaaataaaggccagcaaaagttctcatttggcaaatatcaggtcaaataacttaaaaatataatttcctgcctgactttctttttctcaatgtgaggtgttcttgcctttcttggttgtttgctttctctctggtgcttcttgggtttccttttcttgtgctacctcttcttctgggaccagtgacttctgt

SEQ ID NO: 151197 - DNA, 342 bp, Homo sapiens
gtgtgtgcatgtgtgtacagaagaatgcatatgaacctgtgcctattacccctgcagacagcatgctatcccagtgtcatggtggaagaacaaggaacaggacattcaaacagtggatgaccaggtccctacttcccaggactcggctttctttggagggaagcttatccatgttccccgaggacctactacacacgtgatttcagagtggactgttcagtgtggcttgtctgggacttatattctcaatctcatcattgcctttctgtgtccaaaaccaaagcatcagaggtacaagaaggcaaaactccatttcctctgtgagcactgttcctgtttgac

SEQ ID NO: 151198 - DNA, 431 bp, Homo sapiens
cttcccccatatgtgttcaaactttgagggcaaatgatcatagcttaacctaagatttaagacagattagatttcctaagatttaacaacagtgaaatcaggttgaaataaatcacacaggggaaaaggggacaccttgggatggaaagagatggggatatggtgaaggaggcatgagtgggcaatagaaaccatccggttttgccttgtggggtgaggagagaatgatggtctttgttgtggtgagtgaagtcttgctgggagccaccagctacactcctcttctaaaactcattccccaatccatccatttggggcgcagaaacgaaatattagacctagtattttaacttatgttttctcaccgaaagcccaagaaggaaactaagtttcaatgttatttattatgcaggttgagtctgttggtcagg

SEQ ID NO: 151199 - DNA, 396 bp, Homo sapiens
ccactttttgcccccttagaggaatataatcctgttgagaaggcacaccctagagtccaaaatctgggtttggatcctgctcctgcccttacttggaaaattaccttgggtaaattactgtctcggtgagctcagtttccacaactgtaaaaggggggtactgtccacctgacgggactacatataataaggtggagaatgttgacacctaatcaagattactcttctcccatctactctctgcttgcagcctagattcagccctcagaagttagtcttgcctaaacttggcccaggctttcaagtctgccccttcttgctctttactttatatagcctgcccttccctcctgttctcacctgctgtacactcttctcatggaagtccagcgcatg

SEQ ID NO: 151200 - DNA, 589 bp, Homo sapiens
ccagcgcgttaccggactggagatgtctgagcacacggatgacgtttaagaagtagccatggctgggcgctgtggctcacgcctgtaatcccagcactttgggcggccgaggcaggtggatcacctgaggtcaggagttggagaccagcctggccaacatggcgaaacctcgtctctactaaaaatacaaaaattagccgggcgtggtggtgcccgcctgtaatcccagctccttgggaggctgaggaaggagaatcgcttgaacccgggaggtggaggttgcagtgagccaagattgtgccactgcactccagcctgcgtgacaggagcaaaacaacatctcaaaaaacaaaacaaaacaaaacaaaaatctaactagccccaaacagtgctcccgatattgtcctaatcctgtgactccttcaaaattcgccactgcagtgaatgaatagtaacttcatctttccagctcctcagccttaaaaccttgggagttatccttatcttttttccacaccctacacttgacagcaaacactctatcttcaaaatatatgcccaatctgactgcttctaccacctcctctgt

SEQ ID NO: 151201 - DNA, 475 bp, Homo sapiens
gcccaatgccgacatacacatatccagtttgttatctggtgacagattggatacaccctgggagctcgctgacggtattctgtctataatttcaatgcaaaatgtaattcagagttgatgctgatgagaagtgacagtacagctaagtcaaaagcataaacactggatagtctttggaaccttggatttgcattctgttatagcacaaataaccctttatatttggatttgaacttctctctaagcacatgactgatgatgaatctgaaaagacatatttataagtaaaggagcaggcaaacacagtttatggaggggatcatttcaggaaaggcaagtagttccaggtcattggcactgtgaggcaaagcctaaaagggaagaagaatcagatgaaaggccttttgtatgctatgatgtatttgggttttatcaaggtaaagagaaaatattatttaattatttgactgacaag

SEQ ID NO: 151202 - DNA, 208 bp, Homo sapiens
tatgtcttaattagtggcctgagaacagactaatacaccatagcagcacttcaagtcctacagattaaacacatctatctatcaattaccatttgccagctgtttttctttaagaattttttaacaattcatcagatatctttgtgcatttccaacttgtttgttaagaaatctgctcagtatcttaagagcagattgaaaatcataa

SEQ ID NO: 151203 - DNA, 438 bp, Homo sapiens
agcaacaacaacaacaacaacaacaacaacaaagttcagattccaagaaagcgaagaagaaatagagatgctgggggagtccatttcttagtaagaaatggttgtcactagctccattttttccacctagtagaatcacttgactgtctctcaagctcttcaaacttgacatatctgaaaagaaaagctcgttttctttcccaaacctgttcccctcacttcacaatctcaatctttggtatttcctccatgatgcattcaggcacccaggctgggagtgtgggtattgtctatagtcctattcttcctcactccccattggccacatccaatcaatcaccacatcatgaaatttttaacctccagacatttttctctattctattctgcctcttcatcttcctccatactgcagctccctagcttaagcctttatct

SEQ ID NO: 151204 - DNA, 612 bp, Homo sapiens
tgtagatggagttttgctcttgttgtccaggctggggtgcagttgtgtgatctgggctcaccgcaacctcctcctcccgggttcaagcgattctcctgcctcagcctcctgagcagctgggattacaagcatgtgccaccacacctggctaatctttgtattttcagtagaggcagggtttctccatgttggtcaggctggtctcgaactcacaacctcaggtgatccgccacctcaccctcccaaagcactgggattacaggcgtgagtcactgcgcccggcctaatcctgccctcttttagcagaagtagagatagagactttagaagttcagggactcacctgggatcccagggatatcccagccacgcctcggctggggactgacctaaacccatgcacagctgcagagctaccagcacatgcctccctggctctggaaagagactcgggctgtcactgctacctgaggacagctggcagagcgtgaaatcccagaaagccctcttttcccacgcctattctgatcttgccagctctggttctttctgggggcactgggacacggtcctcctgaacagcagcctccccctccctgccagtgcggccgc

SEQ ID NO: 151205 - DNA, 300 bp, Homo sapiens
aaaaaagaaggcaacttcctcaacctataaagagcatccacagaaaacctacagctaagatcatacttaatggtaaaagactaattgccccctctaagactggaacaaaacaagaatgtccactctcaccatttttaattgctattttactgaaggtcgtcctaagcagtggaataatgtaagaaaaagaaaaggcatccagattggaaaggaagaattaaaacaggttctattcacaaacatcacacacagtaaaaaacaaaaaaaaactacaataaagtaactggaactaagaagtgg

SEQ ID NO: 151206 - DNA, 565 bp, Homo sapiens
acagcgtcttataatgaggtggccaggaacagaaagttagcacctgtctgggtttgtagaaatcagtttatcttttttcagctaggaagaaatagttctttgatgaagagcccatgaaagtctgggtaattagtattgtttacttagaaaagctctattgaattcttcctgccacagtttgatgaatgatcatgaatgtctttgtggccactccctgctcaccaccagattgtctgggttcatttccagttggtttggatttggagatgggagtatgctgttggaggcgggggccttcggggagtgttgagggactgtgtttccacggctgttctctcagggagtggcctcctggctgtgctctctcaggcagagaagctgggctaaggtggaatgaacccaggatctccaggatggcctttgccgctgccctaatactggtcctggcctgccctttcccaagagtgtttccaaaaactgtattcttttcctggggtgaagcccagcactgcttcatttggttattagcaaacacttacacgttgcttgaagggtctggtttttg

SEQ ID NO: 151207 - DNA, 156 bp, Homo sapiens
tggcaggatagatcttgattctcttcaaggcaccagatccaccaaggtgttgcctgttccttctgcaccagagaaagttaggatatatataatataaatggctttgacgacatgcactaacgtgtgagtgatcaatgccccttaattccctaaata

SEQ ID NO: 151208 - DNA, 674 bp, Homo sapiens
tgcagaagcctacttttatttttaaaaagttattttcacaaaaattaatacccccttcctgcctccacacatccataatcccaccccttcagaaaagcagggctgtcttccagcctctgtctcgcaggcattttactagtggggaggatgaaaggttcaagaatcaaggacatcacactggctaaatgcccccaaaagtcagtgtaacatctcccatctcagaggcatcttcttggaaatgaagcaaagcaggaaggcaaaggactgggggtgactggccgtgtgaccttgggcaagtgacttaacttgtctgagcctcagttttctctctcctaaaatcagagaaatcttaccactgacgggggaggaggtggtgaattcctctctgctcgtgctttctgagctactcttccaagccagccattgtcacatttatcatatcattcaactctgatgagaacccagtgagaaaggaactattcctttctttgagaaatttggtaagtgtgcataggggtgaagtgacctgcctcggggcagagacctggccagttatggagctgggggcccaggtttcctccatggctgacacgctttccaccacaccacagctgtctcctgatgggcgggtgtcatgcacactcagggcctttgggaagtttgagggttgcgga

SEQ ID NO: 151209 - DNA, 475 bp, Homo sapiens
tggcagcatgtattcctctgcttctggatagcagaaaggggaaggggaggccgacaaatgagtgttgcttatgcaccctttattagggccagcaggtggcagtaaggggacttacattgggaaggttttggtggttaaagaggttggataatagtaattctgccctagttagatatgagaatctggagttggtggatttctaaactccatatccaaatagactcaagataaaaatacataccctatctacccacacttaactttcagaaacttatgtttttataacacttaaagcatgtattttaaaaatatatttttagacggcttcattcagtagatcctcttagaagggggccttgggctgaaagaaagttggtgtgacctggtctactgctgacctgccttctagccctgtgaggtctgaccccccagcccgccccacctacctcacctctctgtccaagagagggactta

SEQ ID NO: 151210 - DNA, 417 bp, Homo sapiens
cagctattcgggaggctgaggcaggagaatctcttgaacctgagaggtggaggttgcagtgagccgagatcacgccactgcactccagcctgggagacacagcaagagtccgtctcaaaaaaaacaaaaacaaaaaaaaagttacaatccaaaaagtctcagcaagcaggtaggagtcagatcacggagggctaagcttgcacagtcatccaaaaacatctacctacaggcccagacaggatacctgaaatcatgtctgaaatggcagcctcatgtgggcaagagctagggcatcacgctggcctaaccagaaggaactgtgccaagaggactaagagttttaccccaaaatgatataacctaccatttgctagggcagcccagatgcacaggcactaggctttctatataagcctt

SEQ ID NO: 151211 - DNA, 289 bp, Homo sapiens
tccaagcagaattcctatttttgtgggctagcagatgactgacccacccagaggacaaagacaacatagaacacagtaatttatgctgtgtttttctgatttcaaatggaactatgttccaaagtcattctgttccaatcctttatatgtcgtcctctcccaaccacgtggtcctgttgaaagccacatagcacaagagataaatacttgttccctcagagacctgtttttatattcaatgaagccccatgttatttttattcttttagcaccagcatttcagtgaatg

SEQ ID NO: 151212 - DNA, 310 bp, Homo sapiens
gagacccagtacagtgcaatccaagctgctgcagccatgtggagagactcctgcttgaggaaaagagagggaagaagggactttgtctcgaagcttgattagcagctcagccatagtggggtagccgtaacaaggtagctcctgaggtctctgatttcaggccttggctcctggatgacatttctggaaccaccctaggtcagaaaaaaaacccacttcccagccgggcacggtggctcaggcctgtaatcccagcactttgggaggccaaggcggtcggatcacgaggtcaggagatggagaccatcct

SEQ ID NO: 151213 - DNA, 342 bp, Homo sapiens
ccatgccccggaagcaatcatgtgacccagacctggccaccaacaatattccattgcccttgccacagtgactggttcacagatgggtgtgagacccaagccaagccaaccaaagtcctttctgggacttctggtgccgcaggaaggacactggctctttccttagatcataagccatcttgctgctacctagagacagcctgtctagggaactgtgcagggagaggcaagtggacgagacaggaaagagagacacagctctatgaacattatttgaacacctggatgcagctgtgcctgaactccacaaatgtaaatctgctttcccctgagatgatttgg

SEQ ID NO: 151214 - DNA, 657 bp, Homo sapiens
ctttggtaccaggatgatgcgagcctcaaaaaatgagtgagggaggattccctctttttctattgattggaatagtttcagaaggaatggtaccagctcctccttgtacctctggtagaattcggctgtgaatctgtctggtcctggactttttttggttgaaacatgttccaaatcaagtatcgatattgagaatgggtttatttctgaatctcagtatatatatgacttacataaacaagcaaaatatcaatgcaaactaggatatataacagcagatggtgaaacatcaggatcaattacatgtcagaaaaatggatggtcagctcaacccacatgcattcccccatgagatgtacttaaagaagacttggaagaagagaaagacaaggcattatctgtcagcagctgctggtaacagctgagatcaccaacagtagctttccttgcttctggaagttttcctgagaaacatccactgcagcaccatggataattagtgagggcatcactaagattcctgaacttcagaattttctggaaatagcatttctgacctttgtccctcaatgcttccaatagttgcagaagcctttcattccctgtattaaaactctctttacttaaaaaataagaaataaaaatgtatcggcaagc

SEQ ID NO: 151215 - DNA, 794 bp, Homo sapiens
caaggtgtccaagtcacacagaaccacagaatctcacaggtgtctcagaattccttctcctgggactctcagaggatccagaactgcagcctgtcctcgcttggctgtccttgtccatttacctggtcacagtgctggggaacctgctcatcatcctggctgtcagctctgactcccacctccacacccccatatacttcttcctcttcaacctgtccttggctgacattggtttcacctcggccatggttcccaagatgattgtggacatgcaatcgcatagcagagtcatctcttatgcgggctgcctgacatagatgtctttctttgtcctttttttttcaattattattatactttaagttctagggtacatgtgcacaacgtgcaggtttgttatatatgtatacatgtgccatgttggtgtgctgcacccattaactcgtcatttacattaggtatatcttctaatgttatccctccctcctccccccagcccacgacaggccccagtgtgtgatgttccccatcctgtgtccaagtgttctcattgttcaattccaacctgtaagtgagaacatgcggtgtttggttttctgtccttgcaatagcttgctgagaatgatggtttccagcttcatccatgtccctacaaagtacatgaactcatccctttttatggctgcatagtattccatggaagacatgtctaatgtttaaaggttgtaaataaggcaaataactcataaataaaacatgtcctgttctcttatcttgatacatataccttaata

SEQ ID NO: 151216 - DNA, 421 bp, Homo sapiens
agcgctcagggagttggggtgggttggtgcctctggagcttctgtagaaattgctaaggtctttggtttgcttagtttcctttgaggaaactggcctggtatctagactaagggcttgataccatagatataattcagcctgtccccctgccccccgcactcctagatagctgggtacagaccaaactgattgctaggacattttggaatatgcaagtttcctgtattagactgagatccttgagagaggacaccataccttggtcatagctttattctctgtacctagtacggtgcccgatacagagaagttgctcaagaggtacttgtcatttgcttgccaaatgaagaaatggaacctcctccaccattaatgggtgaaatgacacaaaataatgctagctaacatttcttgaacaca

SEQ ID NO: 151217 - DNA, 771 bp, Homo sapiens
tctccttagggaacaagaatacttggacacaattcaaagaacaccatcagatacctgaggtctagcttctggtcccaaatctgtcattcagaagtgtgtaacttgacaatttgttgaatctcactggattttatttctgtcaagagtaaaattaaccagataagaattatgctgagacatagcagtacctcaaaaagtggtggaggtaataagctgcaaagttggaacttgaatcccggacctcaagctccaaatccagaattcctcactttccccccgctacctgatacagaactggagaaaaataaatttgatttaattaagtgtagcagatcccaggaactattttatgtttaatgattactttcaagcttaatttgcctctatttaagtgtaactaacacataatctttaggataaacatctcggaattctttccgaattatccccaaattttaagtttaggtgtgcatttgacaatctgcattgctgccaacagtagttggaagattactacctgaaagctgaggaagtttgcttcagctactacatgcccttccttgtggtaaatgtgcaagtcacggcacaataattgaggaaataaatgttggtgccttaaaataaatgttgatattcaaatttgtcctattttaccctggtaaatgtgtaagtcatggcacaatacttgaggaacttgagcagataagtttggagtaaataacctgtgttataaaatgcacaacactcaaaataaaatgaaacactacaact

SEQ ID NO: 151218 - DNA, 325 bp, Homo sapiens
ctggtctcaaacacctgggcacgagtgacccacccaccttggtctcccaaagtgctgggattccaagtgtgagccaccacactcagccaacagtttctctaacatatttttttttctctagatcttaaaaacatttggtcaaggaatttagatatggactttaagggtacataattcaggataataaaaagctcagcttcatcttagctcagtgttcccttcttcctccacactttacaactaaatgcattcaaaggaatacgctattgatgtgtgtacaacaaagtggtcttaaattgaattctgtcaatggccatatatatta

SEQ ID NO: 151219 - DNA, 213 bp, Homo sapiens
tcagtttagcatttgccccagatttctaaattttttaacaaagtattattattaaaactgcattaaaatgagccgtgatgagtttgggcttccatattatccacccaacttcttctagctcttgtttaccagggaacagttatctcttaacacatggttaaatctttaagttgatcataaatgaatctctcattttccaacacttttcaaatg

SEQ ID NO: 151220 - DNA, 540 bp, Homo sapiens
gctaatttttgtattttttgtagagatggggtttcgccacgttccccaggctgttgtcaaactcctgggctcatgcagtccacttgcctttgcctcccaaggtgctgggactagagcacccagctgcatttagctcttacatttaagttttgatccatcttaagttaatttttatatatggtgtgatgtggggtccagtttcatttttttatatgtccagttgtctcagcaccatttgtagagaatactattttccctctattgaattgtcttggcaccattgttaaaaccaattgatatatatgtaaaggtttgtctgggctcctaattctattccattggtctctagatctatcttatgccagtaccacatttgttggattactgttgctttgtagtaaattttaaaattaggaagtaggagtcctccaaccatgctcttcctttgtaatgttgttttggctattcttggttcctggcatttccatatgaattttaggatcaacttaccaatttctgccaaacaagacaactataatt

SEQ ID NO: 151221 - DNA, 342 bp, Homo sapiens
acagtaaatgccaaaaaaatagaagtaacaataacatatctgatcactatgcaatacaactaaaaaatacaaattaaaagactaaaaactagaaaataaaactccaccattgggaaattttaaaactccccttaggtcaacaagaaaatcaaaaccaaaattctaggccatgtagaaaatgatgtgaagccctgtttctactaaaaatacaaaaaattagacaggtgtggtggtgcacacctgtagtcccacctactcgggaggctgaggcaggagaatcgcttgaaccgggaaggcagaggttgcagtgagccaagatcatgccattgcactccagactgg

SEQ ID NO: 151222 - DNA, 106 bp, Homo sapiens
ggtgagaggctggatgttttctcccgagatcaggaacaagacaaggacaccactttccccatttctattgaacattgtactggaagttctgccagaccaataaggc

SEQ ID NO: 151223 - DNA, 158 bp, Homo sapiens
gggaagcatgatggagaaggcatcattttaggagagataatcgagtgcaaatgcacagcgtggactgaggtgaagacagaccgaaggggccacagtcttcgccattcttaccccacagtctgcgggtgatagaaaagttaccacagtcttcgcctgat

SEQ ID NO: 151224 - DNA, 272 bp, Homo sapiens
atttggtgcctttcttagcaaggacattgtccaagtttttattaaatgtatgctgactgtgtgttaagagttcatatcttaatttaagaatcctgaaatggcttgtctccttgatacttacttaaattaaatttagaaatattcgtatctgagatatatcacagtgtagagtaaatagcttaggtctttatttaaatcagcaatttaaaacctggggtctatgtatcacttataaactcctctcctgggagtgccagatgtatttagaatgt

SEQ ID NO: 151225 - DNA, 193 bp, Homo sapiens
tttgtagagatggggtcttgctgtgttgtagctgggaacacaggtgcacatgactctgcctggttaatttttaaattgcagagatgaggtcttgctgtgttgcccaggctggtctccaactcctgagctcaagcaatcctcctgcctcaccctctcgaagtgctgggattataggtgtgagacacctcacctg

SEQ ID NO: 151226 - DNA, 481 bp, Homo sapiens
gagcaggatgtgggtgtgctggggaactgagttccactgtggattcatctgccaagtggcagggtttgaacgcaggtccacatggctcagagctttcctccacgccacaatgcctccccagctgtgggcccttcgttgacatctgctgaagcctccgtgtccaggcactcctggggatactgtcttgtcacactcagcagccaagacttgagaggcccccctgggccttcactcctaatccagtctgatggaagggcaggctgggtgggggcacgggctgctttggaaagcatggaaacctgaacttgaatccgccagttaagtgctgtttcccagcctcagctcagcagctccccgcggccgacccatgggtgggacctgtcacaggttctcagttaatcagatgtgaagatattagctccccccaccctgcaacaggctgtaagaaactgacaggaacaaccttctttaccaacaagaa

SEQ ID NO: 151227 - DNA, 285 bp, Homo sapiens
ttgcctttcctctcctgcctagtctctgctgagtgagggtccctccctcctgtgtgacctgtcctggaccccacgggtagtgggaggaagcacaaagtgggccccggggcccccacctccccaatggctgtacaccagcctttcccatgggcctgtgcagcaggaaagatgcttaaaaccaacccctcccaccaaatgtggcctgaggctcagctcggtactcccaccaccatcgccaccaccacaagggacccatggcccagagcagacgctgacgctgagctc

SEQ ID NO: 151228 - DNA, 615 bp, Homo sapiens
  misc_feature (33)..(33): n is a, c, g, or t
gtgactctgaggatcccctcaacgctttatacnttcttatctccacactcactgccccccagcactacccttttcctatccccaagtctttttccccaatgttattttactccaccacatgaggaggctagcattatctttgcttgaaaactgtttattaatttgcctgtcaaacattctatagaacagtttacatcttactacagaaacctcctgggtacatattgacagctcagcaagtatttacacaaagctctgaaacatttggttccttcagagacgatagaagatgctgtgtcaagcacagaattatcaaacactgttccctctacccttttccctcctttataaagggaagcttccttcctctaatatacctaaattacacttctaaactactaagccaggaagagaaagaatggaaattcaggtgtgctggagaagagaaagaatagcatttccaggaccacgtgcaaagcacaccatgtagttttttaaaccatagcgatgagaaacaacaaatgcacctatgaaattgaccctgaaacgcagcttttcctcttccagtctcaggaacatttgcttctctctcagcaaaacttacagggcaagtcc

SEQ ID NO: 151229 - DNA, 299 bp, Homo sapiens
gaattctgtcccaatctgagcccctgcattgtgccttcaaatcctcctggactgcaagtccgtaagaaacgctcctggtttcttacttttctccaaggactcctagaaggaccccacccccctccccccacccctgctcctaggaggacaacgtgatcactgtattcagctccatcaagaatggtccaggttcttctagatgatctgcacaaatggttcctctcctcctgggttcacgccaccgcactccagcctgggtgacagagcgagactccatcccccccaaaaagaaaaaagac

SEQ ID NO: 151230 - DNA, 320 bp, Homo sapiens
ctggctctggatatgggggtcacctcctcacaaagacagacaggttgtatgtgcatacacagaaagattcagaagaaatatgaagacttttaaaatcagtcggatgattttaactttcttctttgtagttttctctagccagttttaaaaactgtaagttgtaggccgggcgcggtcactcacacctgtaatcccagcactttgggaggcggaggcgggtggattacctgaggtcaggagttcaagaccagcctggccaatatgatgaaaccctctctctaccaaaaaatacaaaaattggccaggggtggtgccgcatg

SEQ ID NO: 151231 - DNA, 530 bp, Homo sapiens
tgataggaaggcaccatgcacttaaaaggagtttacatgcaactggcaatttgggaaagacaaaggctcttggttttacttatttcatgctgtgaacccagttgagtccctttattcatacaccacttattgaacaatctatgcacgtgtaagtaataagtacaaatatggactctggtctaattaaaattactcagtaagtgccaagtataacctttataatttttctccagtgcttatgttctttgaatctagtatgtgtttgtacatggtttggtttcagaaagacggcatttccggaagatataaatactagctgatgtgttatttcttttatttctcacggctaagtcagatttttcatctgcactgctagaaaatcatccttgacatctatattgaaaagccacagagtcaccctgaaaaacattataaacgtctctgaattgtagcttttgcatctatagaatgggaataatattcttgtaccccatagtgctgtgggggaaagaaatcgtttaacattcatg

SEQ ID NO: 151232 - DNA, 301 bp, Homo sapiens
gacagaaagacttaacaactcaagtgagtcataggctttaataattaagttagccttgaaagcagacatgtacttttgtaagtggcaaatttcctactgattcctttcctgttatgatgtctacctggcgaccgctagtcagtcttcaaatagaccccatatacaaatatttctagaacactgaacatatttgttactacctatataagtccaatataaaagaaaaggttgagaaaaaaaaagtctgtggacttgttttaaaacttgctgcacttgttttaaaaactgaataggatgtatg

SEQ ID NO: 151233 - DNA, 1043 bp, Homo sapiens
tattttttatttatttatttttgagatagggtctcattctgtcactgaggctggagttcagtggcatgatcatggctcactacagccttcccagacttcccaggctccactcatcctcctacctcggcctcccaagtagcttgggccacaggtgcgcatcaccactcctggctaatttttgtatttttggtagagacagggtttcatctctcaaactcctgagctcaagcagtccacccgcctcagcctcccaaagtgctgggattacaggtgtgagcctccgtgcttggccagcccctttttcttttacttactatgattttgagattcaacaatgttgttgcatcagtagttcattcccttttattgctgaataatgtttattatatggatatgccacatttgtttatctatttacctgctgatggacattttggtctgtataaataaagctgctgtgaatattcttgttcaggtctttttggggacatacactttttttttttttgagtaaaaattcctgagtggaatgccttggtcatatgtcagtgtatgtttagcttcctttcctttctttttttttgtggttgtgggacaatccatggaaatgcatttaaggaactgagaaactgccaaaagtggaggtactattattttatgatctcatggtactgtaggatagattctgttctgctacatacttgtcaacatttagtatagtcttttaaagagttggggtatgtgtcccctctaaatctcatgttgaaatgtaatccccagtgttggaggtagggcctcgtggaaggtgattggatcatgggggcagataacttcacaggttggtgctgagttctctcaagatccggttttttaaaagtgtgtggcacctcccccaaccccgttgctcctgctctgccatatgagatgcctgctgcctttcatcttccaccattattataagctccctgagtactccccagaagctgagcagatgccagtgccatgcttcttgtacagcttgtccaataaaacctcttcattat

SEQ ID NO: 151234 - DNA, 480 bp, Homo sapiens
  misc_feature (21)..(21): n is a, c, g, or t
agttcgacggagactctccangtataatatcttatgtctgttaagaactgagggcttcttaaaggcttgccatgtttttcacacttgtggggttttgtacagtataaattttttttgagacggagtctcactctgttgccaaactggagtgcagtggtacaatcttggctcactgcaacttccacctcccaggttcaagtgattatcctgcctaagcctcccgagtagatgggaatacaggcacgtgccaccacacccagataatttttgtatttttagtagatggggtttcgccatgttggctgtgccggtctcgaactcctgacctcaggtgatccacctctgtgtagtgtcccaacctgacccaaacacacatagagatgcacaaacacacacacacacacaccctccatgaagcctctcctgctgcagcctaggtcccctctgtgcaatctgtacatggcagcagtgctcaggcac

SEQ ID NO: 151235 - DNA, 400 bp, Homo sapiens
catttgtactctctcatttaacagttgttaaactgaggcatagagaggctgaatgtcttgctcggagtcacacagctagcaagtagcaagctgcggtctgaaacttgggagccccattctagagtttgggttcataaccactgtagctactgtggtttttcagccacaggtggttgcttcctccttgcacttccctgcccccacttccctttatgtacatctgcatcgtggtgtttcatatgccctgttccaattatgtattaaatgttgttctctcctgctaaacagtgagccccttgagggaaggcctgcctttaattcatgcttatatccctggaatgaagagttggttgttttcagttgtttgcatgacttaaaaaaatatgacacacattatctt

SEQ ID NO: 151236 - DNA, 663 bp, Homo sapiens
tctttgcctcccaaatgtgtcacctgctgacatgtactctcatagtaagacccatcatagcaatgccacttgggcattcagtattctcgacctaacactaccttgacacaggcttttcatagcactgcctctctgctcactgacattttcaacacagtactctacgctcatgcggccccttcccatcggaagacatctggggacttaacaagcccccccctaatcacatagcagactgggccaattaacgccccagccactggctcattctgagcaaacagcctcaggcacagaatgaacaatgtgacctcggctgtaaccaactggccatcagcggcccaccaggcagggtcatcagaacccatattcttacaaaagtcctttcctaagagtactgagaggtgacctgggtgcgtcctttcctaagagttctgggaggtgacctgggtgtgtcccttctttgcaatgtgaaatgatgaaaagagcatgaaataaggaaagacgggtgtcagaagggggtgagccacagacaggaaacgcatgggggtttctgctaaacccgcttcagataagcctggactggagcagggcggaccactcagcagtcccctggaagacagtgcctgtccgggacccccaggccccacttgctccctccctctg

SEQ ID NO: 151237 - DNA, 250 bp, Homo sapiens
aaaaatacaattaacaaacttaaaagcaatagtatgaatgtttacatccctaaatagagaatgtacatttttatagtaatagaacatgaacaaaaatctaccaggtacctattcacacagaaatcataaacttattcaaaatagcgtggctaatgctcttttatcacgattccaaaaatcagaaataaaagtaaaataatgatgaaaagtgttaaaacacttaagaattaagaactcattgatagtatgg

SEQ ID NO: 151238 - DNA, 499 bp, Homo sapiens
ggtttctggtctggagggttggatggataatggcatcattatcatcgttaggaaataatagaggaaagtcaggaatgagaagcaagatgaaaagtcgcattttggacatttgagctgcaggtaccaccaggacctccaaatggagctgagtatagaggttcaggctggggatgagagaacagagagtgaatcaggacaaaattggtatgtgaatgcaaggaggtgggtgtggtcttcagggtaagtcataaagcaaaaaacaaagcctatgacaaatcctcgagaaatggaatattttagctataggccaagaaagactcagccagatgaataagaggaaaatcatataaagccactatacattctctatatggcctatctcaggcattaaatttaaaccaatctggttaaatgtcctaacttcggttacatgaaagttggatgcaatcctgatatagctgggtgccatgaaattctaggaaagagaatatttcaaaaa

SEQ ID NO: 151239 - DNA, 525 bp, Homo sapiens
tagctgtagtctcaggtcccggtgggcaaggggcattatctaatagcctaagtgatggttaagtatgtcttgggacctattagtcctaaccctggggaaaggctgctcagccctgttgattatagaccagctgtgcctgaagtcacaggttcctgccctatgtgagcctgtcagctttgtttttaccacaacctggatctgtggcttttaccccaaccagcctcccctaaccaaacatgactgtggcctccaaggagaccacttaaggagagatgaatggatttgcacagaaccatcactgatctggaaaaccactcaaagccagctgctatgtctgaagactacacagtcgtggtggtggggaagtgtgattgcatggagagggagtggggagtgatagtctcatggtggggtagtttggtctgtgaagcattctgggcctcataaatggcgcctagttcaggaaaattacctgacttacttttaccaaatccattaattttttaaattattattattattgtt

SEQ ID NO: 151240 - DNA, 208 bp, Homo sapiens
cgagctcggtaccagttcgacggagactctcaggtcctctgggcatctgtggctcctaaacactagtttggcccttatgcctcaatgatgccacattcacatctttgcttgtactgtttccctagcccataatggtcacccctcatcctctacaagtcgggttctacatattcttacagacctggctcaaatgctgcccttctctatg

SEQ ID NO: 151241 - DNA, 162 bp, Homo sapiens
ggctgcagcatcttgggcacatgcactctctccagacctcactttccccacctgtgaattgaaggtgttgagtttgctccctgaggtcattcctatggctcctgggcctctgaggatctgtcaggccccagagctgagttggggccaggccacctccttccc

SEQ ID NO: 151242 - DNA, 400 bp, Homo sapiens
catagaatacccaccagagaggatgagctaggaaaagccaggaaggtgaggcccaagcaggttattgctggcctgctagtattccatgaagtgtttggaagaagtagaaacctgatgactacaatttcctgacttaattggaccatccagttataaacagagaagagaataagggtaggagatggaatttggaatgatgcttgactttttttccccaccaagttagaacaattgtattacttaacataataccaatgtatagacattatcttcccaaataagaaacaattcaatcccaaagtttaaaatgtagtttaaaaaaatggatccttattgtaagtctgaaaaaaagtcctgcaaattagcataagcttaattttacccccttttttttgagacg

SEQ ID NO: 151243 - DNA, 418 bp, Homo sapiens
ccgggagaggtatcagtgagccgagatcgcgctattacgctccagcctgggcaacaagaatgaaactccgtctcaaaaacaaacaaacaaacaaacaaactagacattggtttttccagggtacaaagtttattggccctgcagattgagagttaactgtccgaattcccctagatactcgcttctttcccctcccaaccactggggggctgcaaagagctctgttggctgctgatttttttttcaagataaatgtgtaatatttgattacaacagagacatttattatgacactttagttagtatttacaggactgactttccttataacaatgcacttgcattttatgtttccaaatcatatgatctctgaagaatgtttgaaatgataaagctgtatgtttggtgtataatgcac

SEQ ID NO: 151244 - DNA, 444 bp, Homo sapiens
atcagtcacacccattggcccctaaggcacctgccagattccaggttcagatatttggtctggaaaatgtgatcactataacttagaggtaagcaagaagacaatggatttactgagttattactctacaccagaccccaagcattgcttttcatgaggcatctcactccctcctctttgccccactgggaggtggctacaatgacaacctggcttcccatttcagtgaagagacagacaccatcagaaagtgcttctgcaagccccctctaccccttctatgccggctcatcttcccacccatccttcccacctaaagccagccctctgcctatgcaccagacattggcttctgcctactcaaggatgtgtccagcagggcttgcttctctcgcctgcattgttcatttcccctttgcaggatcattcccatcagatgcatgg

SEQ ID NO: 151245 - DNA, 337 bp, Homo sapiens
gcctgcccccctaaaatcaactgtcttatgttcacacacacctttcctctgatttcagtgtaacaagtgtccatctttccattgaaaatgaaataatacctccatttttactttgcctcttattttttctcacttctacaaggactctgttccataaatcaccccatatttctcctttattttcaactctctgattcttaccaacaattctacatggctaaataccgtccattaaataaacaaaacaaaagcaaaaacctcccttcacccgctgttgccttccagatcctatcttttctctcgattccaatccagtaagagagtcatctataaagga

SEQ ID NO: 151246 - DNA, 458 bp, Homo sapiens
ctagaggatcgcttagcgctgatagctccaggcctgtgtgatacagccactaaggctgtctctttaacatctcatttgatcctaatgtacaaagtctctcctgtctgtggcttcgtgacatggagcacccaacaacacaacactgtctcccaagtgagagtctcagccctcagcagaagcataaccagagactcccacagctggctggccttatccaagcagaagagacttggggctcattccctggaatgcttcagcaaataagggtccttcccaaggtttggcaagccccagaggactcaatcccaaaggctgagtacagctaccttgtgtctgttgctccagctgggccttcggggaggtcaccagggggaaagggaaaggaagttgaagctgaggccgaggccccagtgctggggggaggctatcaggcgcgtaaaacgcgcccatagccccca

SEQ ID NO: 151247 - DNA, 263 bp, Homo sapiens
cacaaatcacacaacaaaaaggagaagagatattttgggttcaaaaaaagtaaaaagacaatgtagctgcatttctttagttattttgaaccccaaatatttcctcatctttttgttgttgtcatggatggtggtgacatggacttgtttatagaagacaggtcagctgtctggctcaatgatctacattctgaagttgtctgaaaatgtcttcatgattaaattcagcctaaacgttttgccaggaacactgcagagacaat

SEQ ID NO: 151248 - DNA, 375 bp, Homo sapiens
aggaaaggtcagggcacatggctgctacagtcctctattaagcaatgtgccacagcaggggtccctgacccctgggccatggacatgtactggtctgtggcctgttaggaactgggccacagagcaggaggtgaatggtgggtaacaactgaagcttcgtctgtatttctggctgctccccattgcttgcattgctgcctgagctctgcctcctgtcagatcagcagcatcattagattcttacaggagcatgaaccctgttgtgaattgcacacacgagggatccaggttgcatattccttatgagaatctaattcctgatgatttgtggtggaacagtttcatcccaagaccattaccatcctgcgccccatc

SEQ ID NO: 151249 - DNA, 312 bp, Homo sapiens
ctcaacgctttatacttccagatcatctgagcctgggaatatcaaggctgcagtgagccatgatggcaccacaacactccagcctgggtgatagagtgagaccctgtcttaaaaaacaacaaacaaacaaaaccataaaacaaaatcttgaaatgtggctaatctggattgaattatgctgtaaatgtaaaatacacatcagatttctaagacttagaatgtaaaagagaatgtaaaatatctcaccagtaattttttaattgatcacatgttgcagtggtaatatttaggggtatattgggttaaataaag

SEQ ID NO: 151250 - DNA, 137 bp, Homo sapiens
gtgggatttttaaaatgccaactgaattccatttaagagcttgaaataccaccaaaaagtggtagcgaaaccttattcaggtagaagcctgttgctatggagaagttccatgggatgagggtgtatcgtggagaaaa

SEQ ID NO: 151251 - DNA, 335 bp, Homo sapiens
ttatgccgtggtgctttatgtaacatgtgcctatttacagaacattgatataacatgttggtctgcaaccaggttgttatcagcaataggaaaagcattacagagttcatatggaagtagaggagaaacaggtctaatttgggtgtgatgccctgtattagtctgttttcatgctgctaataaagacatacccaagcctaggtaatttataaagaaaaagaggtttaatggactcacagttccacgtggctggggaggcttcacaatcatggtggaaggcaaaaggcatgtcttacatggcagcaggcaagagaaaatgagaggcaatcaaaagg

SEQ ID NO: 151252 - DNA, 634 bp, Homo sapiens
tttgaacacctgaataacatttaactcctgagaccttctcggtgtagaggccactgcttccccctgctggagatggcatttcattgaagggcctctcgtggctttccctgcccccggctgtctggcctgaagaaggagaaagaaccaaactgaactatgaaaagttaccactctgaggagacctctcttaattaacacttggggccatgtttgctgttgttgagaaaggaagttggtcttcaaaactgtgactgtggatgggggatatgtgtctacgaaaaagggggcctgtgacagtataatagtatacatcgtgatgacttcgtatgatgatgataattaacatacctatcattgaggaccgatgactcatttctttatggcaacaagcaagagcagctctgagatcatgctggccctacgcgaattgagtttctgtggcctaattggatttggagaacgccttccctggccccttttcctcagacagatctgctctgataggaaccttttcaagaaagttactgttgtttcaatgccactccttacctgtatagaacatttccaatacattcgctcattgaacttaatccttgcaactgtgactggggggtagatggctctgtttgcatac

SEQ ID NO: 151253 - DNA, 576 bp, Homo sapiens
  misc_feature (533)..(533): n is a, c, g, or t
ctcaacgctttatacttcatcttaacagcagaactatatgcacacacagggtgcacacacatatatatatacacataaagtttggtgtaaataaaccatgcatggtatgctcaatttagattctgttcccagcagtttctctgcagcatgctgattgctctaaaagatggcttttgtttgctagttttgaggatttgtgaggccttacttctccattcaatttagacatcattttggacatcctacattctcctactattggaatgggcaacattctttgtggttttagcagttcttaaaaacttcccttcagggaagtataaagcgttgagctcaacgctttatacttctagatattttttatatttgggtaggactttgatccttgctaaggcaaagctatcttaaagctaccagactagccaaagtaaaattaaatagataattcactaaataaaatgggttaattttagcttcattattaagaacattagacacggcagagaatgcaaattaacattctgaataaagancttaaatcaggttattaattgctggtaaggcacatgaaattag

SEQ ID NO: 151254 - DNA, 607 bp, Homo sapiens
ctcaacgctttatacttcatcttaacagcagaactatatgcacacacagggtgcacacacatatatatatacacataaagtttggtgtaaataaaccatgcatggtatgctcaatttagattctgttcccagcagtttctctgcagcatgctgattgctctaaaagatggcttttgtttgctagttttgaggatttgtgaggccttacttctccattcaatttagacatcattttggacatcctacattctcctactattggaatgggcaacattctttgtggttttagcagttcttaaaaacttcccttcagggaagtataaagcgttgagctcaacgctttatacttcgcttaagccagtgtctcaaccatagtatggtctctttaagtcttttaaatatcactgatgtgtacacagggtcattatatccattctgtatttaaaatttacaatatatggcctttttgcccttcataggacaaagtaatatatgtgtgggcattctaaaattgtgttgtcattggtaaatctgtcactgacttcagcgaggtatacacgtacgcagtttccatgtccttgtcttagagagctctctagtctaacgg

SEQ ID NO: 151255 - DNA, 218 bp, Homo sapiens
ccaccaccaccaccaccgtcaccatcattatcaccaccatcatcatctttttcacttcttgcagcttgcaggttcccaaacaagtcccggaccagctgatcagatgggatctccccacagggctgcatacctgctgggcctcagacattcagctacttcacagagctgctttattttgctttgctgtttcaattctgcatgtgatcgtgggattctca

SEQ ID NO: 151256 - DNA, 413 bp, Homo sapiens
cttgtatttgatcctgctaagcattcattgattcactctaacatttactgaatacctattaagtgacagactttagagtgtgctggaaataaaagtaaaaagacagtccttgacttcaaggaattcacagtctagagctgggttttccaacttcagcactattgacaccttggacttgatcattctttgttgtgggaggctgctgtgtgcgttttaagatatttaccaatatccctggccactactcactagaagacagcggcagcaccccaactgtgacaaccaaaaatgtctccagatactgccaaatatcccctgggtgattctgtcccaggttgagaaccattggtctaaaagaataacaagcaagtgacaaattgtaattcaaaatgtgatgacagctatgattgagg

SEQ ID NO: 151257 - DNA, 532 bp, Homo sapiens
tgttccagccacagcaaccttttaaaggtgttcctcaaacaggccaagctcatcactgcacctcaagacctttgccttagaatgcagatcattcaggtctcagctccaatgccacctcaggcctcccaaaccaacctaagaaaaatgcccttcctccattcctctctgcacatccagagacaaagtcttgagatggtacaagagacactctgattggctatgagactgaaattttaatttggaataaccagacttttaagaaaagcccaggaaagctataggatctggctgaaatgtcaacatgaggaagaaaaagaacattcaacaaaaaatagtcaaaagcagttttttggggaaaaattattttctgttgtaaataagtgagtaaaatagtggctccaccttccgaacactttttttttttgagacagggtctcactctgtcgtccaggctagagtgcagcagcataaacattgctcactgcagccttgatctgtgctcaagcaatcctcctgcctcagcctcccatgt

SEQ ID NO: 151258 - DNA, 447 bp, Homo sapiens
ttcaagaccagtcagaacaatatggtgagatccccttctctagttctttctttcttatttttttggtgagagggggactgagtctcgctctgtcgcccaggctggagtgcagtggcacaatctcagctcactgcaacctttgcctcctgggttcaagccattttcctgcctcagcctcctgagtagctgggattataggcgcaagccaccacgcccagctaatttttgtatttttagtagagacaggatttcaccatgttggtcaggctggtctcgaactcctgacctcgtgatccgcccgcctcagcctcccaaagtgctgggattacaggcatgaaccactgagcccaacctcatttttggatattaaaaataaagctgatgtgaatatttgtgtataaatctttgtataaatgtatacttttatttctttctttttaagactgg

SEQ ID NO: 151259 - DNA, 906 bp, Homo sapiens
cttgaggtcaggagttcgagactagcctggccaatatggtggaaccctatctctactaaaaatataaaaattagctgggcgtggtggcaggtacctgtaatcccagctactcaggaggctgaggcaggagaattacttgaacccgggaggtggaggttatagtgagctgagatcacgccactgcactttagtctgggcaaccgagcaagactgtctcaaaaaagaaaagaaaaagaaaagaaaacatcttatgatctaaggacatccttgctccttggaagggatgcaggtcccctttgtggagttcagcgtggagcctgggggcaccagggacctcctcttcccacttccaacaaagtagctccatccttacctgacttttatgtcgaggttcccagttaaaagcatgcttttgaaacaatttgcagaactgctgacctgcagcaagcagtgctttgcctagactgaaaatgactgcttatggaacaaagttgattgacggagggatttctagcttgcccctgtctaggctcttaatccgtcctcccatccgcctccttgaatgatcgccttctgccctagggaacccgctggaggtgggagtgccaacaaggctcagcgagccagctgttccatctcaggcacctgacctctcgtgcagggacagacaaggggcagagccccggagagctgacattacaactcggcctctctctccaagtcttttctgaatttgtccttctaattgtgctcacggttatgaactacatgatcaataattgtaacagctaattattgatcttcctttatgataacagattacttattgagccaggcatggggctgagcacattacacagatgagctcatggaatactcagccctataaggtagcttttggcatga

SEQ ID NO: 151260 - DNA, 319 bp, Homo sapiens
attttaagcatgccgttcatgacgcagaaatctatttaaattggctgaatttaggaacagtgccacagaggaagtagtggcctacacttgcatgatggctatcctgcaagcatgatgttaatctcagatacttagagcctttggtgccctgcacaataccgcatatgtagtgggtactgaagaaatatttactaagtgactgaatgaatgcctttgtagtcttgccctgcttttttcagaagagcttgaattattgcccagttcttctctgggggaacctagggtttactggccctgttcccatctcatccattgtaaa

SEQ ID NO: 151261 - DNA, 312 bp, Homo sapiens
aacacagtatttataagaacataggcaatttagtggccattgtttttactagttttaatcatgtgaaattgccatttttctaatatccacaaatgtgtgaatataagcaattacgttttaaactaaatatcagtacagaaaaaatctgcatatacattaactatcaagcttttaaaacactaaattctttaggaaactttaaatatgcacatttgatttacatcaaacatcttttgatagggatgatataaatatccagttgcctttttgatcaaattttgcatagtaaggattttgcatttgaacaaatgc

SEQ ID NO: 151262 - DNA, 874 bp, Homo sapiens
atgtgataaataactagcatcgagccataacagtaaaaacaaacttgagctaaaattaatattacataatcattcattgttatttacatcctcagtgcatttttccagagcttgttgtggcatcaagttatacagcactttctttattgtgaaactagaatatatgaaattatgtcaatgaaatattacagataagtaggggtcaaggtttatatacatatagaggctttgagtcgtgaaaaagccttatattttaaaaattatactcattaccctgacaaaacttcatcttgcttttcaagtttaacctggagaagaaactgagaaattacaattatatggtgaagtttgaaaagtaaaatctttttcacatacatttggatgtatatatacatcaagatatttttattatttttaatgtaattgagatttcttgggactgaagtacattccacaaatgataagagtttaatgttacacttaggatgaatttaaatgtctttaccagatgcttttatttgggaaagaaaaattaattatgaaacgttagcataaaaagataaattattcagaatggaataacacacatttcttagataacgctaagtttatttgaacatcatagaatgtagaataaatttaaaatttcaaacataatcataattggtagagatgatcttcatttttctgggagtcaggtaaactttgtagctctttcatcctgaagcagatttcaaagtcaatttgtaattggcaaagaaattgggtgagtagtttcaactcagaggcttccaggaattacgtcattattcttcaacagttattcattcattagatttgttagtccttactaaatttctgagaattcaataaa

SEQ ID NO: 151263 - DNA, 958 bp, Homo sapiens
  misc_feature (1)..(1): n is a, c, g, or t
  misc_feature (11)..(11): n is a, c, g, or t
  misc_feature (25)..(25): n is a, c, g, or t
nctgccccccngtgcagctaccagnctccaggctggtcctcgggaatgtctgcaaaggatccagtgatacgacctatcttcaagtctcccagcaagattccctgctctccttcttctctccctgtgtactacccattgccagatgtattgaagaaacaaacgtgtggatggaatggtgactttgggaagatgcttgcattctttcagctgtagagaatatgtggaaggcactgactccagcagctctctgcattgccatgggacttatgaaaggacagaacattggatttcctgcctagaagcccagaatgtcagcttatcctgtggggagcagttattgcagatgaaggtggcttatagggaagatgaattggcaatgaataggtgggagtggacagcataaacccttcaggctcaactgaatttggaaagaagagaacatttagaaaatttgttgtaaggcttttctgacaactagatttgtaaaaaaaaagataagctttagtgttcttaatggcacttttggggcaaatgcagaaatcttcatccatgtccctaaactcctgtggctgctgtagggctccttctacttgtaaactctactagctctttcctggatcctccttttcttctggtaccacccatttttccttggcatatttctgctctcattgcttagggccccttcaaaaatgtgtgttgacgttgattatcttttgggaccagtgccttaagtttcctttcttcccttttgtctataaccctcgttcggtgatccctgaggaaggttatggctttaatggttgttttccaaaatttcccttttctactctcacaaatttaaaatgcagttatgttaagaagaactaataatcaacaaaagcaagggataattataaacacagtgtggcacttacactatcaataaaaacatgggcattctgacattctaagctct

SEQ ID NO: 151264 - DNA, 936 bp, Homo sapiens
  misc_feature (46)..(46): n is a, c, g, or t
  misc_feature (59)..(59): n is a, c, g, or t
  misc_feature (62)..(62): n is a, c, g, or t
agcggaaggtgagaaatgatgtcgggggaaggaagggcttagctgnacgactctcttanttnccaccgctacagattccctgctctccttcttctctccctgtgtactacccattgccagatgtattgaagaaacaaacgtgtggatggaatggtgactttgggaagatgcttgcattctttcagctgtagagaatatgtggaaggcactgactccagcagctctctgcattgccatgggacttatgaaaggacagaacattggatttcctgcctagaagcccagaatgtcagcttatcctgtggggagcagttattgcagatgaaggtggcttatagggaagatgaattggcaatgaataggtgggagtggacagcataaacccttcaggctcaactgaatttggaaagaagagaacatttagaaaatttgttgtaaggcttttctgacaactagatttgtaaaaaaaaagataagctttagtgttcttaatggcacttttggggcaaatgcagaaatcttcatccatgtccctaaactcctgtggctgctgtagggctccttctacttgtaaactctactagctctttcctggatcctccttttcttctggtaccacccatttttccttggcatatttctgctctcattgcttagggccccttcaaaaatgtgtgttgacgttgattatcttttgggaccagtgccttaagtttcctttcttcccttttgtctataaccctcgttcggtgatccctgaggaaggttatggctttaatggttgttttccaaaatttcccttttctactctcacaaatttaaaatgcagttatgttaagaagaactaataatcaacaaaagcaagggataattataaacacagtgtggcacttacactatcaataaaaacatgggcattctgacattctaagctct

SEQ ID NO: 151265 - DNA, 942 bp, Homo sapiens
gagcagaaccggttaatagtcaagcgccggaaggagagaaggagttagctgcaacgatctcttatctaccaccgctacagattccctgctctccttcttctctccctgtgtactacccattgccagatgtattgaagaaacaaacgtgtggatggaatggtgactttgggaagatgcttgcattctttcagctgtagagaatatgtggaaggcactgactccagcagctctctgcattgccatgggacttatgaaaggacagaacattggatttcctgcctagaagcccagaatgtcagcttatcctgtggggagcagttattgcagatgaaggtggcttatagggaagatgaattggcaatgaataggtgggagtggacagcataaacccttcaggctcaactgaatttggaaagaagagaacatttagaaaatttgttgtaaggcttttctgacaactagatttgtaaaaaaaaagataagctttagtgttcttaatggcacttttggggcaaatgcagaaatcttcatccatgtccctaaactcctgtggctgctgtagggctccttctacttgtaaactctactagctctttcctggatcctccttttcttctggtaccacccatttttccttggcatatttctgctctcattgcttagggccccttcaaaaatgtgtgttgacgttgattatcttttgggaccagtgccttaagtttcctttcttcccttttgtctataaccctcgttcggtgatccctgaggaaggttatggctttaatggttgttttccaaaatttcccttttctactctcacaaatttaaaatgcagttatgttaagaagaactaataatcaacaaaagcaagggataattataaacacagtgtggcacttacactatcaataaaaacatgggcattctgacattctaagctct

SEQ ID NO: 151266 - DNA, 415 bp, Homo sapiens
cggatacctgacactctgttgactcccttgagcacagtctacactgcccctaaactgcctacacccatttccccaggctggtctcaaactcctaggcttaagtgatcctcccgcctcagtctcccgaagtgctgagattacaggcgtgagccactgcacctggccccttgtccattttctacactgccttaccattgtctacactggctctcctgggccacagacagcactaaccccattgtctacaccacctattttggccaccagctgtggggtgttttcactgtctcccatagtgtctacactggctcctatgaccactgtctatgtaaacaccccactttttctacactggttctcctaggcactctctaaagtgccccctgacactgtctacactgactccctggagaac

SEQ ID NO: 151267 - DNA, 330 bp, Homo sapiens
tcacagggtatcagcttgggaatctcatggaccagatctgtggcgatcaacccttgcaaagaagcacagcgataggacaacttccctaccaccgaacagtttacataaatcaaatatgtctcctacctgtgatggacaaggtcttggagggagcgcaggtggtgggggtaacaatcctgacttggtagctgaaaagaaaaacacatactattaaggatcaccccccaaaaataaacaacaaaaaactcttatgcttgttaacttggaatggcaatggcatttgcatttaacatctttaagtttttacagtccttctgaaggcttaagaaa

SEQ ID NO: 151268 - DNA, 454 bp, Homo sapiens
acgggtgtgctgcaggaatcaatgtccctctggaggtctggcctttggaggttttcaatttccccagaagcggcggctttcagcagggcctttatgctttcatcgattgcctgtgtaccgcaagctttgtttccctgatacgtattatttgataagaaaaccggagaacacagagtctggagtcaaggccaagtccccagcatccttgcaatagagccagaatccaaaggtgtgtatctgacaagaacattagagccagtgggggcttctgagaacgtgcagagcagcattcttgttttacacatgggaaaactgagtctgggatggggatagacttacccaaggacccagccagctagagacagacaccagtattattacctccattttacatgtgcataaatggaggcatggggagagggtgagaacccaggagctctgaatcccagccatg

SEQ ID NO: 151269 - DNA, 214 bp, Homo sapiens
gactgtggctttagagaagaagcacacaccggttccaaaagaacagagactatctcagaccataaactaccgctgtttgttgtgcggcaccacctgaaatatccctgtgttgttttcttcccaaccagctagtacagaatgtatccgggctgctcaacttatttacggctccagatgtttttctgtatttgaagaaactccaccttagcagcca

SEQ ID NO: 151270 - DNA, 426 bp, Homo sapiens
ccctgctcggtattgccaccacgctggggtgacagcttgccaaaacagtgggacacagccccgatcacccatccagtcttggcatcctcaccagcgcaggcatgagctgcagaacacctggcaggaaagtcaggcaggaacccaagtgggcgctgggtcaagcttctgagttctgctggtgatgtggctccaaggagcaggcatgctgaggcagacttggcctgattagggccttttgtcctagtgggaattctgagccttccccaaagtggcagatgctggaactcccagcctcagccgatgttttcaggtgcagagggctagttcaatgaaaaggtgagcaggtctcacctgccagctcctggggacaccacgccagggtccggatgcatgagttagccaggctgtagtcccaatgacgtctcc

SEQ ID NO: 151271 - DNA, 791 bp, Homo sapiens
cttctcaggctcttcactgaaaagaatgccaaatgcctctggaagtaataaagagactgaactaatctaaaattgtttgaaacactcaagtcatttggaaccaatatatgttgtcattatcccattccagtctatcctcattcctgtccatcctcaattaccgttcagagggtaaatgtgcagatttgttatgtaagtaaattgcatgtcacaggggtttgatgtatagagaattatgttacccaggtaatgaacatagtacctgattggtagtttttcaatcctcaccctcctcttaccctgtaccctcaagtaggccccagtgtctgctgttgccatgtttatgtccatgactacccaatgtttagcttccacttataagtgagaacatcctgtatttgcttctctgtttccgtgttagtttgctaaggataatggcctctagctccatccatgttgctgccaaggaaatgatttcattcttttttgtggctgcacagtatttcatggtgtatatgtatcacattttctttattcagtccactgaatattttgaatataacccctgcctatacacagtacttacaaaatctatatgaatgcaattgtaattgtcacatggaagaccatgttaaagcattaataaattcactatagctttttgatagcatgtagttgttcaacaaaagggtacaaaaatggcaagtattaattttcctgtttatatttgtgtttcttataatctaattcttcccatggcagccaaagtaaatatattaaaaataaatcca

SEQ ID NO: 151272 - DNA, 785 bp, Homo sapiens
cttctcaggctcttcactgaaaagaatgccaaatgcctctggaagtaataaagagactgaactaatctaaaattgtttgaaacactcaagtcatttggaaccaatatatgttgtcattatcccattccagtctatcctcattcctgtccatcctcaattaccaaattatttggctgtaaagccagcaaagaaaaggaacagagcctacatcagagcttttacatgaaggaaatactgaaattggatacgacacatcaaaaatatttaaatatgaaactacagagactctggctgagttgcagcctctccagttcacatgctctctaacagaactcagtcttgatgagtgtttgcagaaaattgtcttcattgtcaaccacactccacaaaatgatggctaatttgacttttacagatttaaaaatttggaaagcatttgagattgcctgccaactccacagaactcttttcattaatcagtaaataaagttttatttaattttttcacaaagagaactttgtggtcatgaacgcctgctgtctgctccattaaaaataaagaagtcttctaaagagactctctcaaacatattcaaatacaggacttgggaagatatttcattctaatttaggagtacataattaatgtatttctttgcagctagcgtttaatgtcattgcttttatggcttatgatgtagtttgtttctttttatttaacagaaaggtcaatgtgactaataattagaactatgactgagagaagaagactgtaattagactat

SEQ ID NO: 151273 - DNA, 592 bp, Homo sapiens
cttctcaggctcttcactgaaaagaatgccaaatgcctctggaagtaataaagagactgaactaatctaaaattgtttgaaacactcaagtcatttggaaccaatatatgttgtcattatcccattccagtctatcctcattcctgtccatcctcaattaccaaattatttggctgtaaagccagcaaagaaaaggaacagagcctacatcagagcttttacatgaaggaaatactgaaattggatacgacacatcaaaaatatttaaatatgaaactacagagactctggctgagttgcagcctctccagttcacatgctctctaacagaactcagtcttgatgagtgtttgcagaaaattgtcttcattgtcaaccacactccacaaaatgatggctaatttgacttttacagatttaaaaatttggaaagcatttgagattgcctgccaactccacagaactcttttcattaatcagtaaataaagttttatttaattttttcaaataaaaaacaagtgactgagtgtgactagaatgtactctacatgagtggaaccaaacaaaatcaaatgggcccttttggcccca

SEQ ID NO: 151274 - DNA, 712 bp, Homo sapiens
accttcacatcctgaactggagagcagtgagttaaatactgtgtatggtcgttcgtgaatacattttttctagatgctgcccttattatttcaggacccttagtgctttttgtttaatgagatgttctgtgggtttgaacccttgtagtctttcatttgtgtttccttctccctcccttagtttactgagcaccttaagggatgagtttgtttgttttttttgtagaacttatttgactttacatacctataagatttcattctttcaagaaatatctactacgcatcttttgtattcctgcactgttctaggtgcctgggatacatcagaataaaacagacaatgatccctgcactggagaatctttcacgggaaagaaggactgagataaagtcaacaacactcacaaaataataaatgagctaatgatatactagacggttgtgaggaaaaaagaatgtaaggcaaggtagtggagaatgtgaggctgaggggtgcaatttaaagaggaatttaggaaagtcttcatggtgaaagacactttgagcatagacgatgaaagggagggaattggccataggaatatttccaggaagagggagtagtccatgcaaaaggcattgggcaggaacaggtatcattctatcattctgaaaacttcaggtaagaccatgtggaaaagtagtgaggagttcaggatgtgagaccagg

SEQ ID NO: 151275 - DNA, 333 bp, Homo sapiens
gttcttcccaatttctgtttgaggaaaggccctacattggctgtatctatacatgaactgtttctttgacttaatgcaaaacagcaacaacgacaacaacaaaacccctattaactagttgcaaagtgcgcagtgggaagaagcagactggaaagtttctagaatccaaaaggtcgactcctaaatattttttgaggaggaagcatgtgcatgtttcgtgcctgagaacatgagagccaggcagaggggcgttgggagggctgaggcaccacagggcagattggagaaggcaggccgaggctctcggcagcaagggccagcacgacaaatggc

SEQ ID NO: 151276 - DNA, 358 bp, Homo sapiens
taccacaaagggttacgacagctcatgaggtagacacagaccaccacttggaagctttctcactgctacgaatcagtaccattcgcaatgcttcagcagttcagagaggtctaaggcaaattcccatactaaatggaaagtggcccaatgacagaatttcttcttcacatggtagctccaagaaggtgacaggacactgcagtatcatttatatgaaagagactgaaaaaaaaaaaactgaaaactagacatgagcgatagctctgatacagcagctccactgtatacagaacagaaaatgtagaaaataaattcatttattgacattgcacaccacttggtccccttcccactccct

SEQ ID NO: 151277 - DNA, 520 bp, Homo sapiens
gtctcagaactgtcatggcactggcgggtgtgtgatttagtatgttaatgagcatataatgagggcctaggtaaaacctccatccaatccagcaccacgttgggtccactcagccttagccagcttggtccacaccctggtttttcagcgtcttaacagcccacagcctcaagtcatgtaaatctgctgcctagaatttgttatcctgtgaccaccctgtagtattcctgtctgaaatctacttgtaaatattcaaatggtctttcacttgggcattccaactttgcttacttcacagtgtttcctgcgtaatatataagaaaagatgatccagacatttgttaaacatctcaaataagatgtagcccaggtatttgtgtcaaatttggattattttggtttcgtctttgcagaatataaaaaactaacatgaggtaagcactaaggtgtggagatggctgtgcaagagatgacaaagtccagcaccacgcttgagagtgtccaatcatctcttctggga

SEQ ID NO: 151278 - DNA, 305 bp, Homo sapiens
tagacggaccgtgagaatcctcctcattccttcattaagcattgtttgttgagtcaaagctagggccaaacttctctgtccgggacacccccggatgcctgcatagaaataagagctaaatccctgaactcgaatgagctcatccagagagtggctgagacagagaagggcaactccagagggcaggtcccacaaacacacctgcatttggggggccagcagagatgggatggggggattagccacaggagggcaggcggcacagtgcagccttgtgaagcccagagggagagagagtttcgaga

SEQ ID NO: 151279 - DNA, 239 bp, Homo sapiens
cctggctttagggaggagttcatcaattctacagaggagatttcacatctttacacaggtacacaaactacacaaagagggacattcaggaggggaaacactgtggtcgctagaatccctatgtgacaccatggtctctctagagtgtctgtgtgacaccatgttctctctagagtgtctgtgtgacaccgtgttctctctagagtgtctgtgtgacactgtggtctctctggagtgcc

SEQ ID NO: 151280 - DNA, 206 bp, Homo sapiens
ccagagtccaggtggagacaagagattcaaaggaggaggggccggcacagggccagtgagtgggccgggacacagccccatctccagccctttcgtcctctctctcccaccgcagcagttacaggagaatccgacatctgagaactggcaggacagccagtcgttcacacagtcttaacacatcataatgagactgctggctgggc

SEQ ID NO: 151281 - DNA, 387 bp, Homo sapiens
taacagtttctgcaggatacactggataccttatttggaattttagatgaaaattcccaaaaatatgggtctaaagtgtttgattctttggttcacataataaatttgctgcaagatagcaaatttcatcattttaaacctgtaatggacacttacattgagagtcattttgctggggcacttgcatacagagatctcatcaaagtgctcaaatggtacgtggaccggatcacagaagcagagcggcaagagcatatccaggaggtgctgaaggtgataacatgctgttgataacagcagagtctaacaaagctgttgcatgctgatgcttaaactaattggttcctctacacagacagtaatgggtgatgatgtattactgacatt

SEQ ID NO: 151282 - DNA, 511 bp, Homo sapiens
aaagttatttgaacctgggaggcagaggttgctgtgagcagagatcacaccactgtactccagcctgggcaacagagtgagactccatcttgaaaaaaaaaaaagtttatttcccttgaaatttctgggtggtaaaaaactcgtaactgttggaaaaatatcaataattgctgagatttatttagtactatcatgttccagacaccatttgcagcaaagtacatgtaacaactcatttaaccctcagaatacctatatgcaacagacagaattataattttcttttgtttgttttgggattttgttgttgttgttttgagacagggttttgcctaccgtcacccaggctggagtgcagtcacatgatcatacttcactgtagcctcaacctccctggctcaagcgatccttctgcctcaaccttccgagtagctgggactacagtcacatgccaccatgcttggctaatttttttttatttttggtagaaacagggtcttgccatgttgcc

SEQ ID NO: 151283 - DNA, 424 bp, Homo sapiens
gtggcttctccattgtcttttcctgccagttcagttctaacaggaataaacagacgctattcaaaagcttttcaagtctgaatgaagatgtacctagggttggtgttgatgaactttccctcactcttccttaaggaaatttgttctttcctgccatttgagagacatgttcttcctcttcttcttcaaagagctaaaatgcacctttatttgcataatgaagatagtgcagtgaagtactttcttgcattgtcaaggaaatgagctccaaaggaacttccttttagcatagagaaagctgctgtttttatttacttgcattttgcatatgaatatattttaatttagtttcaacaggtaactgaattagaaagtgaaattataaagtcatttctccaagaaagaaggtagagcttataaatat

SEQ ID NO: 151284 - DNA, 380 bp, Homo sapiens
agacaatgccttctagataaggacaaaaggccatattcattaaataccaaatagaggcaaagtcacttagggccatgagctgttttagtcttataatgcctgtgtactgtctcttgaaacagagcatggtctccatgaggtcaggaaaccaagccttcctgcagtgctcagccaggcagctggtcggctgggcctccactaggttgaccccagtccagtgctcatcgtcctccatccttcctctctcctgcaagacaagacccccgcctccaggccagcctccctcagctctacagctcaggaccaccttgccccatgacgctcttcttctcccacaggacagtatctcagggattcactcaaacaccaagaattcaaac

SEQ ID NO: 151285 - DNA, 416 bp, Homo sapiens
attgaccatttatatggttctttatagctcacagaggccttctactattctgaacaggccctctgatctgctttttaaatttacttaattgaatttactaaattactaaaatgctaaaactggatctcctctgacaaggtcttctggtcagagatatggatttcccctgatgctcccaggtaaggcaagggtcaggcaggtctcacagctgtggtcacaccagcattagacagtgcagtaagaacaggtatcctctgccacctctggcaggtggcagaagggcatgaaatttggtaggatacttgaactcacagttcccttgtctagtctcttcctcagtaaaaagtcttactatttggctctttgtttttattttcttaaacattatgccttttcctggggatatacgctatgct

SEQ ID NO: 151286 - DNA, 351 bp, Homo sapiens
acttctcagagcagccaggactttggaaactatgaaatgtcactgacatttatcatcaaatacaagcataaaatgtaagaactaaaaaatactcaaaagaaataactgcttagccctagcttctgagctaggaggatttgggctgtggaaacagggagggccagcaacctgtcccagcacaaaagaaaatagactctgaggtagataactgatcatacacagctgaccagacaagtacacagttttggaaggcaacttaatttaccattgcttttaagacatatgcaattgccttaataaaagagctttaataacagtgtattatcttatatgtactaaaatagaaataac

SEQ ID NO: 151287 - DNA, 401 bp, Homo sapiens
gtctgggcatctcagctggcacagctgggcacaaggtgggttgggttcatgaatgtttgtgccactgcagaacaagaggccccattcctgaagaggagaagatggggtggcctgacctggggagtctgcctcggacctggcactcacaacttcctgaagcctcactagtcagagtgacccaggaatggcaggtcagcagcttctgaagatgggaacatgggtgacttgtcaactcatacctcactaggtctgccgtgtgtcagcacaggactacgtgacccaccttctggccaaaccttcctctgaggcagggcgagcccagacaacacactgttggccctgaggtctgtccctggcttccaggatcatcttccatcccttctaaggacagagctgaggtg

SEQ ID NO: 151288 - DNA, 469 bp, Homo sapiens
ctgagtttagttggtaacacaagtgaagaactttttgcctcctgaaaacatctatttggaaatattccatagcaacttcatgctcgacatactcaaaactaaacatgctccctcaatgacctgtcctcgttggctccagatttcagcaagatgctaccttccactcagctgcccaagccacagacctggtggtcaccccatcctccctctcattcattctttcatcaaggtcctggtgaatctatcccatgatccagtttgatcttcaccaacactactggattactgaaaaggcctcctaaaagccctcccggcttccacactcaagtcaagacaactttaaaaatacacagtttggctgcgtgcagtggctcacacctgtgatcccagtgctctgggaggcagaagcaggaggaagaagatcgcttggacccaggatttgagacaagcttgggcaacatagcgagac

SEQ ID NO: 151289 - DNA, 474 bp, Homo sapiens
actggttcttttcctcctcccattgaaaatatttcctgtttagaaaccttttttaaaaatgagtttacagttgtttcatcacagggtcagataggtaaaactgagaaaaagatggtaattcatcttcctcctccctgcaactcttctcaacaaggaaatgactataaaatagtggagagaaaataccaaaatttggattattttcattagcattgtaatttactgtatatcttctgcctgctgtaaagcacatactgtctggaacatactttttggttcttccacattgaaatagctgtatgattgtttcttctttgcccaagtaatccatccaacttgtgaaatgttcctggcctaacctaactaatccatccaacaatgtgaaatgttcctgccctaacctaactaatccatccaacttgtgatatgttccttacctaaactaaataatccatacaccttgtgatatgtact

SEQ ID NO: 151290 - DNA, 495 bp, Homo sapiens
gactatgaggacccgaaaacgacatagaggcaggagaatcacttgaccccgggaggcggaggttacagtgagccgagatcatgccattgcactccagtctgggcgacaaaagcaagactccgtctcaaaaccaaaccaaaccaaacaaatacctagaactgagaaggtcccttttgaacaactggtccaatgcctccatggttaccgccccccaccacaccccgccacacacacacctatgcccattttacaaataaagaaactgaggtccctgaactcctggataaaacgttacatcagaggacacaaaaaacaatgaataacaaatgtttttttcttggtgattgatagtggaggtatttgaaaacattcctttttctaggatagacgagcaaagaactcatgggctgatggccctcagtattcatcctgttatcgatgacaaggcctgtgtcgtccctgcctctatcagcatgctagctcaattgctcagca

SEQ ID NO: 151291 - DNA, 631 bp, Homo sapiens
gcagttcagtggttcttagtccattcacaagttggtacaaccatgaacgctatctaattctagaacattttcatcaatccgaaaagaaacccagtacccattagcaatcacttaccaactcctccttcccctacatcctggcaaccactaatgtactttctgtgtctatggatttacctgttctgggaatttgatatagatggagtcatgcaatatgttcttttgtccagctttttcacttagcataatgttttcaaggtccatccgtatggtagctgtatcagtccttcattctgtgagcaaatagtattccatttgctactgtgaagtttgtatacaagttttggtatgggtataagttttcacttctcttgggtatctagttagtagtagaatttcctggattgtgtggtaagttctgtgtttaactttttgaggaactgccaaaccctgtcctacatctaacttaaaaaaaaaaatagcaaaaacatcaactaaaaccaataactttatggatattattagaaaatggttgattttttttaaaattttgatattgttgggctaggttatctggatcaactcttctgttgaagacatctaaaaactagataaactgtaaaaacagaac

SEQ ID NO: 151292 - DNA, 211 bp, Homo sapiens
tgggcacaaggatcttgcttccctggaaggctcagtccctcagtccctcaccccatccccacagatcttactctgccagtgtctttggctgtgttctcaattttcccttctcctacacttcatccttaatataggtttttgggcctgagtctccttatgtttatctgtccatctgtctccctggcccttcttcctgggctctcctcccctg

SEQ ID NO: 151293 - DNA, 142 bp, Homo sapiens
caagatggcactttcccatggcccacatgctgcctaagaccctgaaggctgactcctggacactgtccccagccatctgcctctctgcaactatctgccacccctccacctgccctgggacaactgcctccagatgaaggag

SEQ ID NO: 151294 - DNA, 374 bp, Homo sapiens
tatttttaagaaatcaagaggagtatatgaccaaagcctttagaattctgaaaggttggattagtaaacatggacttcatctttcccaagagtttttccaacctcaatgtatagctagtataaggaaagggttattaatagcgtaagcatttaacacgtttattttcattgtgcaaaaataattatgacagaatacttaaagttccaaaggcactgtgttcagtcctatgatatccttacaggaaatatatctgtatttttatggagggagattctgaaacataaaattgttaaagcacttgctcaaagtcatttgcccagtactttaaaatggggcttctcaacttctgcattattgacttttggggctggat

SEQ ID NO: 151295 - DNA, 310 bp, Homo sapiens
ccgtgacacatttgcacattctcagtagcatcaaccgactaaggaagtccatactttgttatgcaacattagattaagcattaatgaggctaggaaaattgtttatttaaggttataacctgaaattaaataaaacttcaggctggaagctcatattgaatactagaatcatttttaacctcttaatattaacagaaacctgattactcagtcttaaagccctttctcaatagcatttattctctgctgcaggaatatggtctatgcaaatgacattttgcctgaagaaaaaagtacagttaatggccag

SEQ ID NO: 151296 - DNA, 158 bp, Homo sapiens
tagcaggatcttaggcgcgtctgaactggggtaagcagtgtgaaagttacagttagaggtggttatctgttgtcagcagaggagggggtcacaaggtgcatggtggggagatcataagactcattgtccagaagaagaatgtcatgaggtcgatcaat

SEQ ID NO: 151297 - DNA, 320 bp, Homo sapiens
aatagggagtcattatcaagctatctttagttcactttaacacacacaattcccagaaacaatcactcaaacaattctgaccatacatataccacaactaatcattttagtggaaactatggtcaaataaaaacacaggtcaccactgtttacatgtttcttgataaaggaaacaatatacttcttaaaaatactactattgggtgggcacagtggctcatgcctgtaaacccagcaccttgggaggcccaggcaggagaattgcctgagcccaggagttagagaacagcctgggcaacatagagagaccccatctatac

SEQ ID NO: 151298 - DNA, 366 bp, Homo sapiens
aaaccgagtcaaatgcatggcacacatttttcttttctttcttccgaaagagccttcaggggtttctggagagtgagcacagcctgccttccaggcacctctgagctttcttggttgtgtgcctttcattttcatttgccctgagcggcccttgcacccactaagcccccaagggtgactttggaagacaagctccagcaaccttggtgtagttaagatgagttttaacactgaaggataaagcgaggccagaattgcagatatgctgcccaggtttgcagcccctgataatggtgaaaccttgaagggagcaaactgtgaggctgaggctgaattgatagctccaaatgttgccatggaggcttc

SEQ ID NO: 151299 - DNA, 546 bp, Homo sapiens
gtttcccatcctggctttctggttactcctggcatgactgttggtctgccccaagctgctcgatcacacacagaatagaaagtttactgagatctttctgaattctgcgtctactttgcagtgtcttagccatgtcttcctgatgtgccatctggatatatgttttcaatttgttaatacaatctgctgagaaacacgctaaagaggaagaggctagagtgctcttcgtgttgaaatcaatctattaaaaatggtacttctgcatctttgttaaaatcagttacttacttcccaaattattacatagctgatatttctcaatcttgctcataagaacaccatcaaatgccttgcttaaatctggatctgctaaacccaccacattaacctgaacctgctggtaacgtcattgaaaagacacctatacccacaaaaattaaacagtattaaaaaaaattaaagagaagaaagccaggaagccagcgcacggtgagtatctctgttctggggcagccacgtgtccctaggtcagctgtcaacaaagcg

SEQ ID NO: 151300 - DNA, 336 bp, Homo sapiens
actttgtctttttctttctcttaaactgtttacttatagccctcaacgacatgcaaaggctttcttttctgctagttcattttatttgtattttctgtgttattgtattcccttgccaaagcatcttgcagatcaaaaagtttggggaatattacagacagagatatgtttattcttaaagtcttagagtatgtattaattaggttaaaggatttataaaggtaccaatataaaaaataatcaagtattagtcttatttaaattcattaagtcttgctattccaagcaactttccaaaacaatcttcctactgttcaaacactactgataaacttc

SEQ ID NO: 151301 - DNA, 401 bp, Homo sapiens
  misc_feature (80)..(80): n is a, c, g, or t
tgccgatcccccttcgtggctagctccatcttcaatttgacagcttgttaaagcatcctgagtgttgcgaaggggaagtngcattttactactgaacatgtgagcccgatctcctaactctgggttgggagagggtcagggaatgcttcctggaggtagtggaaattgaaagggagagatgcaagggccacttaaaagagtaaggctggagtagtagactgcctggccacggggatgatgggacagaatggagaggagctctttgcttttaaaggggctccttcagtttcagccgttcagtgtaaagactgcatgtccccttggaagtattctgtggatggttgagaatgtggaactgaactagagggaggccggggccagattcagccctgaggggcagt

SEQ ID NO: 151302 - DNA, 237 bp, Homo sapiens
ctagaacagctctgtgacggcagagacttttgtgcttaggaccctggtgcaagtttcctcactcaatctcctcatctgtaaaatgggcatcagatgatacctccccactctactctgtgttttccaactgtgggttacagaatctgagcaggtgatgacatccaaccagcaggggagaaaaaagcatcaactagaaagtgatggagtgtgagcacacaataaagatgaagattagtc

SEQ ID NO: 151303 - DNA, 595 bp, Homo sapiens
atggtgctagcatctgcttgccttccagtgaggcctcagggagcccttactcatgtcaaaggcaaaacaggagcaggtgtatcacatggtggcagcaggaacaagagaaggggggaggtgccacacactttcagataatcagatctaaacaacagcaccatgccatgcatgagggatccacccccacgacccaaacacctcccatcaggccccacctccaacattgaggattacaattcaccatcagaattggagggtcagcatccaagctatatcaggctgggactgtgagaaatggaaggtcagagatttcaaggtcgtctagtccaatctcttttttacagataagataactgagatctggaaagagagatgacttgtctagggtgatacagctagtcactaaaatggatgtcattattgcatcatatggagatgtgtagattttaaagcactttcaccacctcactttattgcctcacaacaatcctccgagatgtttgtcgaatgtcacgtaagcgtgtgaacagttcccttttgactgtaccattgtagagggaactcatagattacgtaagacaaaccaaatgtcttc

SEQ ID NO: 151304 - DNA, 319 bp, Homo sapiens
atttttcctagtaagaaacccccttcaggaggttgagcttcagtttaaaggggagcatatcccaaaagagagaaaaagtaagatcacgtttgcaaaatctgcagttgcaggcaggtcataaggcttctttatatatggaagtgttctccaaggagctcaaagtactttacagatattcattaaattagtttaccaagtattctagcaaagcaggcactactgccataatttcacaaaaagaggacatcctgactccagtcaaaccacttgcccagaaatgcccaacttgctataaccagagtggaattagtttgctttg

SEQ ID NO: 151305 - DNA, 427 bp, Homo sapiens
agtgaggctcttctccataagtgataatttgcttctatattgagaaaggactttggagaaatatacaagacacattaatatgggcacctgggtggaaggagagggcaaattctgcacaggtgaggcacaaaaacagatgcatttcactatataactttctcaccttttaaaatttatgactatagaaatagttcatcaacataggttcaatttatgttaaattgataagtgaaaccgacgcattgcattaaataattgtttcaaaataatgatatcagaacgtacacatttatcatcctcaaactcagttcttttccttgacattttcccccctgggtaaaatcaataaaagaacattaaatgctaccatggaggaaataagtgtgtgaaacacgcagttcttctttacgaagtcgatttttggaat

SEQ ID NO: 151306 - DNA, 213 bp, Homo sapiens
gaattcatatgcagttcttcctaaaattttacaaacaagtagatagatcaattataatacattatagtgtattaattcatgtttaaaaaattcattgtacatatattcaaccaacacttattgaatacccatgatagaccagtgaacatgacagatatgaacagtcctatgagaatgaagagacaagaatatgagttcttcctgggggaatat

SEQ ID NO: 151307 - DNA, 297 bp, Homo sapiens
acaccaaaaaaggatcaatatatatggttgctgttgttattattaaaagttaatttgcatataccctgaatgttctgtagactgatattcaaagtgccgcctctggacaagcaacatcggcatccatcccctgggagtttgttagaaatgcagacatcagactccacctcagaccctatcaatgtgcatgttaacaaatgattcttatgcacattaaagtttgagaagccagctacagaggattattaagagcaatgaataccaactgtttctttctttgagacagtgtctcactct

SEQ ID NO: 151308 - DNA, 882 bp, Homo sapiens
gccgccaccaacacaaactctcacaccacttagtgcggtaagggacagtgcgattgccccaaagcctcaccatgttttctcgcgccccttggaaatcgcacggcggttatcccagtactttgtggctaataggccaatcccgttcgatgctaaccgagtcaggtttctgccaaccagtttcgaatttaacgccacggcctccttcattccccccgccacacctttgtgctgatgaccatggtcaccttgaaaggtgtgttgaatatggcagagccagaaaatgcaaggagcttcttctctggatcaccacttgaagaagagccacttgctcctcaggaaccctattttggactgacgtttaatacaacatggaagccaccaaggcttacagaatgtgctttccagagctgtgacctgaactgtacctggggccttttgagtgaggctggaactggagtggcctggatgcagagagcagtgtcctaaggctgtgcaggttgcaagaaagctcaagtagcctatggagaggatgcaaggcttccagctgatgccctcagccaggctcagtagcagccagaactagcctaccaacgaacctgctgatcatgtgcataagccaccttgaacgtcgatcctcctgcctggtggagccatcccagctgatgccacatgaagcagacacaagctgtccctactaagctctgctcaagttggatattcatgagtgaaataaatgactgttactaagtaattaatttttgggtggctgttatgtagcagtagataattggaacaaagcttattgacataatacatctatatcacatcctccaatccatttttttaagtaataaagttgatgtttgttttgattttcagtta

SEQ ID NO: 151309 - DNA, 356 bp, Homo sapiens
aatttagccaaatagtgagactgagaatttgaaacaggattctagatatgttgaatgagatagttgtggactgagatagttcaatttctcaattttaaatgtcaacagttatatgcaaatgtgaattaggagcagaaatacattcctagatcttgatcaggcccatgaagatattttatttttagtttctgaaatctgtgatactcagttataaaaatgggataaagttggtggctcatgcctgtaatgctaacactttgggaggcccaggcaggcggatcacgaggtcaggagttcaagaccagcctggacaggatggtgtaaccccatctgtaccaaaattacaaaaattagcc

SEQ ID NO: 151310 - DNA, 1103 bp, Homo sapiens
gtttcagaggaggcagaagtctaagctgacagctgggcagaagtgagccagcaaatggagttgaggatgagcagaggccctgggcagacacgcagcacatgcaaaagactgaagcaagacagtgcaggcacacagaaaaagtagtgggtgcaggagaggaccaaggaactccacgggaggtggggagcatcaggcaagcagggccagaccgccgagaacctaaaagccacacggaggagagcaagtctggtcttcaaggcaacaggggagccaccctgaggggtttaagcagtgaagggacctaattgatattttgttaagattcctctggcctgcatacagagcgggttcacaggggctcagagtccagagagggaggacaagcaggaggccagggcactgcttcgggctgcagaagtgctggtctcagcgggtcgactttcacccgtctgggagacagagtcacgtgcaggggtgtagcaggtgtgtggatatgctggtctgagcccagggtccaggcaggggtccagtgctccagcagccacagcagacaggcagaaactgacacaagaagaggggaactgtcctagggcacaggtgcagggtagaagacgtctagaaaccatccttcagccttgaagggaggaaatagcaagagcctgagaaccagagaccacagagcaaaagtaaccgagtgttcccagaagggagtagcctgcagtgacagggcaagatacagaaagaaaaagtatgtactgcatttatcaacgaggagaatggtttcagccaaagagggtcactggcttccttggcaagaacagtgcctatggaggaggcatgggaacgggtcctgatgtcctggggagtgagtgggaggcagactaagagcttcagctcttggggaggaggaaaggtggcaacccagggaaattcctgcagggcagacagggagtgctttttgtttttcttctaatagaagagaggggtgtttgccttggaaaattggagggataccttttccactgaaaggaagagaaagagggaaaggagaactatggatcatgatgaggacgaaggtctggcagcaggaaggagaaggtgcc

SEQ ID NO: 151311 - DNA, 304 bp, Homo sapiens
aactgcacccttcaaaaagattcagatgataaactttatgttatatgtatttaactacaatgaaaatgttatttaagacccccccacagccatacagtgtacaatacaaagaatgaactctaatgtagaatatggaccttagtcaataataatatattcatattgattcatcagttataaaaaatataccacactaaagcaagatgttaaaaatagtaggaactgactagggaagagggtatatggaaatctctactttctgctcaacttttcataaacctaaaactaaaaaagtctattaatt

SEQ ID NO: 151312 - DNA, 264 bp, Homo sapiens
attccacgtgctagaaaagtccctagcatgtggtaaactaggagtacaactccaggaagtagtctgtggagtaaaactgtctctaaattagattatctgattttttttttttttttttttttggaaacgggttatcactctgtcccccaggggggagtgcgggggggggactcggggctcattacagccttgacctccaaaaactcaggtgaccctcccactgtggcctcaggggaagcggtgacggcgggggtgcacacccac

SEQ ID NO: 151313 - DNA, 345 bp, Homo sapiens
agagtgaaaggtgaacacattgtaagcactcataccgtgggatattatgcagccattgaaaagatgtaccacacccactcaaatggctaacatttaaaaggctcacaatacgaaacactggtaaggatacggaacaaccaggccaggcacagcggatcatgcctgtaatcctagcactttggaaggctgaggtaggaggatcacttcaactgagaagttcaagaccatcctgggaaacatagcaagaccctgtttctacaaaaaaattaagaaattagctgggcccttgaggctgcagtctgccacaattgtgccactgcactccatcctgggtgacagaatgag

SEQ ID NO: 151314 - DNA, 370 bp, Homo sapiens
gtcaccattaacaattttgttttccccttcaaataaaacaaaatataacaaaaaaaagaccaaacaccaaagtgttgtcaattcatcggtaagtgtgttagaattgatttcagccatgaatgccttcaatggcatctacctggagctaaaacaaagtattcttgtagcccaaactcatgaaatgaaaacaaagcatctttcataacatggtgtaaagtaagtatccagcaaacgtgagaggtgaacccacataaatcggaaggaatttgttaacaaagacagagaacaaattttttaaaaatctgttttcacattgtacataaaaatgatataaaaacaagtgtctattttttccttatccagagtgctt

SEQ ID NO: 151315 - DNA, 479 bp, Homo sapiens
atttcttttctgaacattttgagaataaattgcaattcatggtaccctttacctctaaataactctgtgtattttaaaaacaagcgcattttatttaactatagtacaatgatcaaaatcaagaaactaacttggatacagtactgttgtctgtagatcatattcagatttcactaatcataccaataatgtccttactagagtaaattctacatcacaccttacattcacttgtcttagtctcccttaatgtgaatcaattggttactcctcttctcttgtatgacctttgagatgatatttgattaaaataggccagtatttttagaattgctttaatattgatttgctgctgcttcatgattaggtttgggttctatatttttggcagaaacactccaggagtaatattgtattcctctcagcacaccatatcaggaatcatgttgtccacatattccattaatagggatgtagag

SEQ ID NO: 151316 - DNA, 207 bp, Homo sapiens
actaactaaaagtgtaaacagctattttcactaagatagctattcatcttttaatatcatcgggcaaacctggaaaatgtgctaacatttctccagaggcgaacccataccactcgctaatacatatgaaagattttgtccctaatatttttactatctgaaaatgtgaatgggttatcactaaggtcatcctctttggtagttgtg

SEQ ID NO: 151317 - DNA, 470 bp, Homo sapiens
ctgtggtagtgtggagagggaccagcggtgggcagggccttagaactcccaagattatatgccctttgtcttccactaccagggttggtagggaaggaccattgggtgggggcagggctaggtatgtctgagctcagactctccttgggcaggtcttgctgcagctgctgtgggggatgggggtgagattcccaggtcactggagttgtgtacctaggaggattatggctgcctttgctgagtcatgcaggttaccagggaagttggggaaatacagcagtcacaggcctcacccagctcccatgcaaactgaagggccagtctcacttccaccgtgccctccccaacagctccaagtctgtttccaggaggagagtgagagggacttgagaactcgaccgaggctatttgcctcccagagtatttggggtgtctcctgggtcctgcagaagcaacccgcttccttcaga

SEQ ID NO: 151318 - DNA, 778 bp, Homo sapiens
gaaccttggaagcgggggttgcagtgagccaagaacacaccactgcactccagcctaggcaacaagagcgaaactctgtcacaaaacaaaacacaacaatattctgcttctcgtgaagtataagaacattttggtaatatactccatctttcctttcccatctttgtgctattgttgtcatgcgttgttgtattatttttttctttaaattcattttaaaagttttgttttagatagtttaaagcttttaagaaatcatttctgtttacctacttgtttactgttttcactgcttttcattcctttttatgtattcagatttccatttggtatttttccttacttttgttttgttttgttttttgatgctcaggggttgtttattttactttgttgttgattttagtttttgttttttttttggtttgaaatgtctttattttgctttttttaaaaaactcaactttttatttgtggtaactagattcacatgcacttgtaagaaataatatagagaaatcccatgtacccttactgaacctcccccagtgataacactgtaatggaatatcacaagcacagtagtgacattgatatagtcaagatacagagcatttccatcacctacagaacccagcatgtttccctttccaagcccacttgtgtccctgccttccccttaacctctggtgaccactgattctccatttctatgattttgtcatttcaacagtgttacgtgaattatatagtatgtaaccttttggaattggctttt

SEQ ID NO: 151319 - DNA, 485 bp, Homo sapiens
ttcgattcctcaaaatcctttagaaaacatttagatttagattttaaaatgtttagaacatatttttccctaagcaattgttttatctagttttttttccccccgaattatattatgtgtcatcagcgtgtgtgaggatggggaggacagctttaagaagctgctgcatttagtaccaattccttgtacaattgggaggagacttttgaaataaaatattctgtttccccagctcaagctggacatgaaaatcagaaacatggaaggagaaggggcatagccgtgacaggaaggggaaggaatttgatttgaggagcgcctggagaagcctagtctcacccaggacatcacctcccatggtagcacctttgctatcacttagtacattttctgtcttgagacggtgaaagctctttaagagcaggcaccgtgtctccttgctgtatttcagtgcctagcacgtatagaaggttaatgagtatttg

SEQ ID NO: 151320 - DNA, 957 bp, Homo sapiens
ccaggtccctctcaagacatgtggagattatgggaactacaattcaagatgagacttggttggggacacagccaaactatataaacatctaacaggaatccttggttagagcttctgcatctgcttgcagatgggagaagagagtgagaaagaaaagtggccaaattcaaatacctgtggcacgttcaagtgggaaaataaagaagaaaaagcccataccacttcagtcttttttgattatattaaatatccaggtttgtgtgacgcaatcccaagtaatattggtatcactgtactatgagctataagagaaatgttttaagcttcctattttaaggaatagttttttattatatcatggcttatagtttggttaattagcttgttttcaacacaagggttctattcagtggttgccaggtgtattccatgtaatttagaagagttcgcctctctaaataaatgggtgctactgacaaagactactcaacttgtgaaagtccaactcgcaagcatccttaatatcatttcaggaaaaaagtcacctagctaaatttttacatatataacaatataacaataataacacttattgaaactgcactatatgacacaccatgtcatgaatgaagcatatggattattttacttaagccttacaactgccatgtgaaatactgttttagtctttactacgacagttggaaatgtacttttttttcaatgttgggaacaaacagaacttcaactctgtattctacttgagcctttttcctttctccacttaactcttcattccactgtagcttatagatacttctttggagagttactatttggagacaagttgtaaaaaaagaatgtcactatttttcctgctgagaacatgcttttggttttgcaagtaaaaattcaaagttaattcccacaaagaaataaagattaaaataaaagtta

SEQ ID NO: 151321 - DNA, 667 bp, Homo sapiens
ccaggtccctctcaagacatgtggagattatgggaactacaattcaagatgagacttggttggggacacagccaaactatataaacatctaacaggaatccttggttagagcttctgcatctgcttgcagatgggagaagagagtgagaaagaaaagtggccaaattcaaatacctgtggcacgttcaagtgggaaaataaagaagaaaaagcccataccacttcagtcttttttgattatattaaatatccagagttgatgagctggagaatgcgactggcagcacaggcctagggcaccagagggcagactgtacagagacctgtgagaatggtcagaactccatggatcatgatggaatgatcagggacactataatagcgttcattttatgtattaagccagatttgcacaacaattccattgtaatacaaatgtaatctttagaagtaattttaaagcagcaaatgtagaaatgccaactctcaagtaaaagaaaacaattttcctaagccaaatgtcttttgtaagagatttcaatggtcatttgattttagtttaaagatcatctgaccttatgattcacccgattcttaaatgcacatctcaaatataattgtcttcatttggagttaatgtataaaaaataaaaacagtgaaataacc

SEQ ID NO: 151322 - DNA, 198 bp, Homo sapiens
ttattgttaacttctgttaaaaaaaaaaactcaggaatgcaaataaattttttttttttatttaaagaaaaaaacacagacttgaaacctactcagagctcaaaattggtttcatgggaacaatattttcccatgcttacatacctagaatctgttaaacagacctaagacaaacttcttggcaagcttaaatattgt

SEQ ID NO: 151323 - DNA, 249 bp, Homo sapiens
gagcttacatcccagaccctcacaggaattaagaattatgtgagtcgagcaagatgctgaaaacacgaaacaattcagaaataatctaaaaacgtttcagataaattataacataatttggtgtttctttgaagatgaaagtcgttaaaggtttttactgcaatgcattgtgctttttaaagtagtctgaaaagacaaatcaaggatcctagttttctgtctgattattagacccctcctaaaagccct

SEQ ID NO: 151324 - DNA, 359 bp, Homo sapiens
gtctcttcgatatactgatttcctttccttagcataaatgtatagtaatgggattgctggatatggtagttctatttgtggttttttgaggatgctccatactgttttccatagtggctgtattaataactggggaatctgggtgagggaaaatataaatctttttatccttctggcaaatttctctatatttgagattatttcaaaatgaattattaaaaaataattttaggtcagacatcatagctcatgcctttaatcccagcactttgagacgcagaggtgagaggactgcttcaggctaggagttcaagaccagccaggacaatatagtgagactctgtctttatcaaaacaaa

SEQ ID NO: 151325 - DNA, 578 bp, Homo sapiens
cagtatactccccagaaaaggatataatgtgcagtttgaccaaattaatttaatgttgttttttaggagcttgctggctagtgttctgaaaaacacagaaaataccggtccagtgaaaatgatacataaaacactcccctgtttttattttgccattgtctcagtttaaaagaaaaacaaaatgggatgtctataatggagaaataaagcagggctcataagtagggtcgataacaaaatttcaaaatcatataaacacaaccttgggtcctgctcaccacttacattgtgtgacttgacttaaaaattgcttccactttctcagcctcagtttccatatcagtcaaatgggaataatattaactgcctcttagggtaagtaggtgtatttattgagaaattcaagccaaatcatccagcagagtacttagcacagagcacactttgatggtcaggaactgctgcgtgagacactgatgggtgacagagggaggctcgttagggttagtccacggcagctgtgccttctgatactaaaacaaaaatatattcaacttcaatgtgcttgaaaaactaga

SEQ ID NO: 151326 - DNA, 640 bp, Homo sapiens
aaaaatcctccagtacgtaggtcagaagagctacgcagagctcaggtcagctctgtttccagggcgagattgctcaacccttctccctccgcccacaggccttatctctggcatcaacccagctccccattcctccaagggacggactcctccctccccccacagggacaaactcctctgagtctgcagaaccagaatgagaacacagaaggctggacttactgctaaccaagtgcaaccctgaccactctgacttctgacttcttcacttcgaacccaatccaaacgtaggggcgtggggtgggggagagtgaaagggagaggccaacatcaaacaccttttggccacacctgcgcacagacagtccgggccgcagaaatcaatcagtcactccaaaggggtggaagccctgggccactgccaacccaaggcccttctggaaaagctctggacttgttaagaagggttggccagggctgggtgcagtggtttacgcctgtaatcccggctcttggggaggccgaggtgggtggattgcctgagttcaggagttcgcgaccggcctgggcaacacagtgaaaccctgtttctactaaaatacaaaaaaaaattagccgggcgtggtggcatgcacctata

SEQ ID NO: 151327 - DNA, 582 bp, Homo sapiens
accaagaagacacagaactgggggcccagacagaagcaaatggttaggaatgctacaaaaccgactgacggtgaggaccccctcaaactcaatgctgtgggattttcctgggggttattacctaccctggtccccctgctgactcctagctccatctcccctcccacctgcatctctgcttcccacaggccctggggcaggagcagaggctgagcccacaccaggtgctgtttctctgacctccaccccaggagctaaatgtgaggagggcccaagaggccaatccgcccctggagagagggctgcattcgcctgcaggacattagacatcagcctttctccggaaccaaccaagcggagcccaggggaagggcttaactgaggcttaacacacatcctccatcccactagcaattaggcttcccttcacatccgtaactggctaacatggtgaaaccctgtctctactaaaacatacaaaaaattagccgggcgtggtggcgggtgcctgcagtcccagctacttgggaggctgaggcaggagaatggcgtgaacccgggaggcggaggtcacaatgagcc

SEQ ID NO: 151328 - DNA, 100 bp, Homo sapiens
ccatgggtatatccatgggtagagatggaccaaaattcaaagtccagggctaagaagagtcaggtagggcctccagtagcacaggcttctatcactgctc

SEQ ID NO: 151329 - DNA, 131 bp, Homo sapiens
cacatgaaatatgaatttctctgataaatgcttcagctcctcactcaagtagcccttttatgtagtatatagtatgtacatccgctgatgtatttcaagataatttagatgcctaattttcagttgtcttt

SEQ ID NO: 151330 - DNA, 257 bp, Homo sapiens
tccaggagccatctgggccccacagggggcggcatttcctctttttgttgaaacattccagccaagtgctggcttgggcttcatctctctgtcccactctccttcctctccccaacataagcctccttctacatcctagagctctttccattccccctcctgcagctctgggctcgctaatctcatgcttccctaagggagcttgacggctgcttctgctaacatttaataaagttctgcgtgccagaccctgtgtt

SEQ ID NO: 151331 - DNA, 213 bp, Homo sapiens
ccagaaagaagcaggaacttggtcgaaggtgccagaaccggatccaaacccacgcgtcctgtgtgccagaaggacctcctttcacctctcccatcataagtggaggggacagtcttggggccagtctctctcaacctcgggtacctttatagggacacctgtcagaactaatctgctccaagaagctacatgctcaaaggttaacccagaaga

SEQ ID NO: 151332 - DNA, 301 bp, Homo sapiens
acaatgccttgtgccagggagatatctttggcaaatacttgggaaaaaagctgtaaaaaattctatttataggctgcagggaaaaatacactcaatatgatttgaaaactattagctactcaattacaagccttgccatgttaaagaatgtcaggattctcacctgaggtgaggagttcgagactagcctggccaacatgatgaaaccccatctctactaaaaatacaaaaatgagctgggtgtggtggtgcatgcctgtagtcccagctactaaggtagctgaggcaggaggatcgcttg

SEQ ID NO: 151333 - DNA, 499 bp, Homo sapiens
aaagtcaccattaagtgataaccctgcaagccccaaataaatgaccctagaaacttagcaaagcaatacagggctatggttttataattcccctagtgcactctagcaatatttaacaagccctgtgtgtagtggtgtgggagggaaactaacccaggttaaaatcagctcagtggaaatgagcatattaacgacaaaaaggattcttcctccctcaaacagacattctccagtacgtctaaagtctgagacttttccattcttctaaataacttgtcgtaaccaatggcaaaggtattcgttagctgcagcgattatttgaatgtaggtcccctccaaaactcactgaaatttaactgccattgtaacagtactaagaagtaggacattctggccaggggcagtggttcacacctgtaatctcagcactttgggaaacctaagtgggcgggtcagttgagctcaggagctcgagaccagcctgggcaacatgttgaaa

SEQ ID NO: 151334 - DNA, 358 bp, Homo sapiens
tccagggctggagccaagcagagaattcgcatccccattcggatggctgcgctgatggtgcagccctggagggaggaggcggtagctgccattcccaagggaaggtgggggtcaagggcaggagagggagggctgcagggctcaggcctggtgactgcaggctcctgagagcagccagcgggagggtgagcttccttcagctcagggctgcacacctgccgcctctgttcccccacttctgctctgccaggctttctctgaaaaacctggcgcctcacgccccagccgtcctgggatttctggtgccccccagtctgggcctcctcccttcctctgcttgcagcaaaacacccgaatg

SEQ ID NO: 151335 - DNA, 288 bp, Homo sapiens
atctactaacaatttggacaatacagcaaatgctattgtccaagttttctaaagaagaatcaagagacctatcaagacctgtatccaggaaaagggctggactcttggtctgtcgtccaggatagagggcacggatgccatcactatcctgggctcaagcaatcctcccacctcagcctcctgagtagctgggactacaggcatgccccaccacattcggctaatttttaaaattttttttatgttgtccaggctgctcttgaaatcctgggctaaagtgatcctcct

SEQ ID NO: 151336 - DNA, 323 bp, Homo sapiens
atctactaacaatttggacaatacagcaaatgctattgtccaagttttctaaagaagaatctgaagtgaaatgacatcaagagacctatcaagacctgtatccaggaaaagggctggactcttggtctgtcgtccaggatagagggcacggatgccatcactactcactataacctcaaactcctgggctcaagcaatcctcccacctcagcctcctgagtagctgggactacaggcatgccccaccacattcggctaatttttaaaattttttttatgttgtccaggctgctcttgaaatcctgggctaaagtgatcctcct

SEQ ID NO: 151337 - DNA, 722 bp, Homo sapiens
catctccataatatcacaactgtctgaagctacttagctgccagaaaccttggcagacttcaggttgaataagtgcccatagtacattcaattattgttgcaaagatcattggatgcgaaaggtcagaactgtttgggatgcatctcagagttgatgtagttcatctctaactgctgcttgataatctttatgcatatatatgcatattatacatgtattaatctgctgattaatgtgaataatctcttcttctctccatatatatgtgcagagattaattagcagactctgctagaggtctgcctttccttccacatgtaccttccttcaggtgctgggttctgttggaagtttcttaagcctgagcctagaaggtctagttatgtgtagggaagtgttcttccctcagaagagaagagggatgataatattagctcctatttatcaagcctttttcctgtgccagcaacacagttgaatgcttttgcacaacttctcttactaaatcttcccaagtttctgcagtaagtgggattatcacttccactcaacaaaggaaggaatggagactgggagtcacccatcactcatcccaggtcactcagcgaggaagtggcagagtttagattccaaccagccagctcgactcctagttccttgtgctaaacctcctccttatcccatgccccccggcccatgcagtgtggcaatggctgtggcc

SEQ ID NO: 151338 - DNA, 192 bp, Homo sapiens
gcaccactgcacttcagcctgggcgacagagcaagactcacgtctccaacttgagttctagtggattagagaggcatagatacgtttttgtttttagtggaggtaacactgggaatgggatattctaacagtagttggttcttgctttttcctatttgtgaatttattgtcaaatttttttgactagagtgg

SEQ ID NO: 151339 - DNA, 351 bp, Homo sapiens
ttacggttttggtccgtgctaccgtatttaccccatgtgtggtggttggaaatgtcagggtttcttgattgaaaaaggaaataagagattatgccactcacagcacagaagtgggatgagccccactatggtgtatacgtgtgcgtctgtgtgtttatgtctgtgtcatctccatgtgtttctgtgccagtgtctgtgtgtctgtgcatatgtagtgtgtctgcgtgtctgtacctgtgtgtatgtctgtgtacatgtgtctgcgtgtatgtgtgtgtctctgtgtatgtgtctgtgcatgtgttgtatgtgtgtctatgttgtgtctgtatctgtgtgtgtgttgtgtgg

SEQ ID NO: 151340 - DNA, 377 bp, Homo sapiens
actctagatggatcccctgtggtcacgcaccgtgttgggccaacgcaccgtatttaccccatgtgtggtggttggaaatgtcagggtttcttgattgaaaaaggaaataagagattatgccactcacagcacagaagtgggatgagccccactatggtgtatacgtgtgcgtctgtgtgtttatgtctgtgtcatctccatgtgtttctgtgccagtgtctgtgtgtctgtgcatatgtagtgtgtctgcgtgtctgtacctgtgtgtatgtctgtgtacatgtgtctgcgtgtatgtgtgtgtctctgtgtatgtgtctgtgcatgtgttgtatgtgtgtctatgttgtgtctgtatctgtgtgtgtgttgtgtgg

SEQ ID NO: 151341 - DNA, 254 bp, Homo sapiens
taattcacaagcaaatgtcatacgatgttcacagtatttaagattcagcatatttcctgttcgcgtttttcctttaaagtctccaatgttgattagaggttttaatttaaaaaatagttgaggttagtaacctagcattgtgaaagtcagggcttgggaaattcaaacatgtaatcttttttccttttcttaaatgaaaagtctataataaggccttgtttctaaatctaacagccttggaaattaaaatgtaa

SEQ ID NO: 151342 - DNA, 291 bp, Homo sapiens
gtgactatctttccttcctctgaacagctagccattccctatggcattggcattgttttaaattacatgttcaaaagttatgagatataatagaaaagtgattaaaaaaaaaacagatgtgtgcaatttaaggactgattatggctgggtgcagtggctcacacctgtaatctcagcactttgggaggccaaggcagaaggatcacttgaggccaggagtttgaaaccagcctgggcaacacagcaagactctctctacaaaaaaatataaaaattggccaggtatggtgg

SEQ ID NO: 151343 - DNA, 451 bp, Homo sapiens
ttcttaagaaaggtttgagattatccagtccatgtgcaatgaatccttggagcattagctgtgtggccttcctactgataatctgcagttatcacagtaaagagatctctgttcctaggtcaggccttagcaattacaaatacaggaaataaaggggtactcaatgctgaagacttaattttgggtacctacaaagtcctgggaagggaaaaagaagaccttggcatttgtatttgcataaccagagatggaatgtttgaggcttttaggcataaagattaattagattttatcatataaagattagggcaaattatttttttttccagttcattcttaacatgttaagggacaaattttaatgaataaaaatttaaaggccttaaaactttcttttggattcacatttccactctggtataatccactctggtgtagtctgccctttatg

SEQ ID NO: 151344 - DNA, 412 bp, Homo sapiens
tggagatcacagaagtgggcagataatggctgatgcttctgttgcgaaccagaagtggagcagtgggcaaggagacatgagtcagaatcaagggctcaacacatgtggggactgtgggaagccaccttcagctctgggctgggcctgcaaaggaatgcacctggaaacaggtataggaaaggcaaaataaatgcaaagaagtagaggaaaaaatagtttagggaagagtaggaatcaatgagataggcaaaagcaaaaagtcaacaaggtcagcaatgctagatattggttcattgaaaagatgaataaaattggtcatttttgggtgagaatgttagagaaaaaagacacaactatccaaattgaacaaaaaggtaacaagttttgtttctagtgatggtggactaagtaa

SEQ ID NO: 151345 - DNA, 347 bp, Homo sapiens
agaataaatatcatagtctgggtagtttataaaaaacagaaatgtatttctcacagttccggaggctgggaagtccaagatcaaggtactggcagtttggtagggcctaatctctctgcttccaagatggtgccttaaatgctacatcctccaaggaggaggaacactttattctgacatgacagaaaggaaaaaaggaacaaactccctctgtcaagccctcttataatggcattaatccattcacgaaagcagagcccttgtgacctaagtacctccaaaatgccccacctcccaacagtgttgcgttgggattaagtttccaatacaaaaaattggggggacac

SEQ ID NO: 151346 - DNA, 427 bp, Homo sapiens
agtgtcaggttttagcttatagtcaggtccaggcaattagaatgtgtgagttcaggattccaagccagcagctttttggggcagcagttaaatctagatggggccagttatgggggcatgtgcctatacagtcccagtacttggaaggcagaggctggaggattgcttgagcccaggagtttgaagccacagtgagctctgtttacactactgcatgccagcctgggtaacagaaagagaccctatctcttaaaaacaaaaacaaaccttagatggtgtaggacctgacaatagtgttttaagtccaggcttgaaaacaaggcttttctaagctctgtttgcttgtcaatcttggagtccagattgacccactcagaaatatgtacttaggctagaaagtcatcagcctgtaagtgttagacatatg

SEQ ID NO: 151347 - DNA, 345 bp, Homo sapiens
tgggctttttctgcagaatacacggtctgtagattataccagtggcaaagcactgtgagtacattattacttatatctgctatatactgtgtgtgtgtgaactacttttatttgggggcttgtcacgcatacatgtgaaggacatgattatatataaggatttaattaaatctgtttataccaagaattatgtactgagcacttactgtgttctaatatgatgtttgggaaagggatatgaaagctagcagatttccaggcagtacaaggggcttattgcatttttattgaatctccaaactgagattccaggccactgattccaataattcaaaggtagattcc

SEQ ID NO: 151348 - DNA, 458 bp, Homo sapiens
caagcctttcacctgccctggacggctcggccaccatcccatttgatcacgtcaatgatcactatcgctgactgcgagagatcgctctttacgagccagagcgcggctgcctgtcctactggcagcttccactgcaccaacactggctataagcccctgtatatcccctccaaccgggtcaacgatcgctgtttgtgagctgctgcgatggcacagacgagctctacagcggcgtcatctgtgagaacacctgccccgagtctggccgtgtggagagagagtccctgccgcagaagtgcgcctgcggtgcgcacccaggcacacctcttgggaggtgccactcctgtccctaagctgtggcccctgctaatggagactcttcctctgggctctccctttagcgcctggctttggcccagtccctgggcagatctctgccctctgcagatggtccagag

SEQ ID NO: 151349 - DNA, 157 bp, Homo sapiens
aaacctctctaagccctttaacttctctaaactgaggatggtgattacaccaactttagaggtgtacttatgtgaaaaggcatcacaaatgtcagttactatagaaaggttagctagcctgcttccaccttttattagtaagaaatgacaagaaagg

SEQ ID NO: 151350 - DNA, 439 bp, Homo sapiens
agattcaaattaattccattaaaatccaattgggataaattgaaaactgtaacataagaactggaaggaaaaatttttaaattctacctatgttggaaatacaattttatgtaaaacccactttataaacatttttaaataaattctgagtatccatagaactgacaggtcttactgactaaaaaaaaagacaaatgaccaatacacatttattatacaactgatttttaaaataacttcaataataaaaacttatttttaaaattatttttcataaattttaaagattttaattaattcataaaaatattttcattcaccagctgacccaaactttaatgttcctagtactctacctcatcagggtaggctaatccagctaatgtttggattttcttccttcattttgacagtgtttttaaaagaaaaacatctgttc

SEQ ID NO: 151351 - DNA, 139 bp, Homo sapiens
ccagacatgatcctgtatagcctctgaaaatctgtaaaggtttttctcctttttaaaaaaattgctttggttcatatttggtgcttctgctctttaataggctttgtttctagtaaggtcatgcttatttaacttatag

SEQ ID NO: 151352 - DNA, 390 bp, Homo sapiens
tattcatcggcacctcgtctattcatcggcacctactatgtaacagacactgtgctgggctttctacatcccttgtctcagcacagaaccatggagtgatggctaagagctgagacctggactcagaccgcctgaaggaagtcgttcagtgccactgcttctggccatgtaactgcgggcaggtagcttgcttaattaacctctctgtccctccctgtctgtatctgccaacaggatgatctttgtacctgccttgctttggcgagaattaagttaaatgatctatttgagctgctgttgtcatcatcatcatccttacatcttcactgcaaccctgtgaggtatttttatccccattttacaggtaacaccaccgaggctcagatcctc

SEQ ID NO: 151353 - DNA, 278 bp, Homo sapiens
gggctggctgccagcaccttggagtcccaggctgccaggaaaagttcacccacacccgggctttgctggcgaagggtgagtcatatgatggccgggctcgggccctcagcagacaccaagtgtgttcccagagcagccgctcagcgcctgtaacctggaacaggccagcctttcggggcctcagttttctcatctgcctaatgggaatagcaattcccaccttccctgtgttggttgggttctcactagatgcacaggagacagcagcttgagaggga

SEQ ID NO: 151354 - DNA, 771 bp, Homo sapiens
catggtgttcagacagtgttatgaggactctgcctctgcatctttcatttctgcctcaacatcagctgctgcttcagtaggctcagaacgtgccacactgagacagcaacattactctatccattcagaatcaaaagggagtaaactttgtccaaaatttttagcaaagttcatgtgtgtatctcaagagcattccacaacaaagattctgcctgcaatcctccacttcaagccatgtgaagggctgcttcccctttgccttctgccatgattgtaaatttcctgaggcctccccaaaagctgagcagacgtcagcatcatacttccttaacagccgatggaactgcaaactgaagcagcattaatttcttaaaacagaaatttacacttcaataactaatgatgtttcaaacattccaagacttccagcagtatagatgctatgccacaaaatcctgacattgggccgggcatggtggctcacacctgtaatcccagcactttgggaggccaaggcaggaggatcaccttgggtcaggagcttgagaccagcctggcaaatatagtgaaaccttgtctctgctaaaaaatacaaaaattagctgggcatgatggcaggtgccattatgtagtcccagcttcttgggaggctaagacaggagaatcgcttgaatccaggagacggaggttgcagtgagccgagattgtgccactgcaccccagcccaggtgacacagcaagacttcatctcaaaaaaaaaaaaaaaaaaag

SEQ ID NO: 151355 - DNA, 230 bp, Homo sapiens
cgtcgcagagatgattattataataatccgatacgtacactacgtgacgcgtcgagtgtttattactaggtatggatggggatgagaaatgagaagattcaaacttctttttcagcattataacatttcttgtaatggtattacagaataaatctagaccatggtgctaaagtaccatcactgttcagtttcagccctgtgtgtttagagaacagctagtgaagatggcc

SEQ ID NO: 151356 - DNA, 558 bp, Homo sapiens
gtgatatcaactcaccgtaactccgcctcccgagttcaagcgattttcctgcctcagcctcccaagtagctgggattacaggtgcccgcaccatgccaggctaattttcctattttagtagaggcggggtttgccatgtcggccaggctggtctcgaactcctgacctcaggcgatccacccgcctcggattcccaaactgctgggattacaggtgtgagccaccatgcctgaccacgtcatacttacgatttgccggttacaaagcccactcacgttaccacgtcatctccccaagtagctggccttattggaggggactgaggctcagagagattaagcagctttctcaaggtcacacagtagtgtggtagagatttgaacctaagtctttaccattttattatacttcggaacccagggcaggctctaccactagcctagggcttgtcgtgtgtccctgaagtgcgttgaagccacgccctctttcccaccaaccctctggtctcatccacacagggtggctctttgctgtcccctcctggctaccagcggctat

SEQ ID NO: 151357 - DNA, 210 bp, Homo sapiens
tgcacttaggaccgctgagtggacagcggatgcctgtgtgactgtgctcactgtggcattgggaggtttggaagaattatgaagctgtgacctcaccaggtggctggtcaggggtgatgtgggcagaggcctggagactcagggcactgggaggtgatggggtgtgacttagaaggcagcaagtccctctgggacgatagcgctctagga

SEQ ID NO: 151358 - DNA, 479 bp, Homo sapiens
agccacataacaattattttagatactatatgtaatatattaattttcatttttagaggtattgaaatctgatatttcttactttgtcctgttttgatcatatatatgccagaggtgctatgtgtaatacattaattttcatttttagagattatatctgaaatctgatctctgtatcttactttgtcctgttttgatcatataagtcaccgggacagtctctaaaagaatgaagagtaataacacattgatacagagtatttaaaataaaaactttgtaaatacttttcatataccttttaaaatagctatacaaatgaggagagaaactagtatgtataagtggtttgtcagaggttacagactgagagccagacaagtatgtcagtctcctcacaggtctggattcagagacttccagtaatacattaaaaaaaaaaatttatgaaagatgaaaccataggctgggcatgatggct

SEQ ID NO: 151359 - DNA, 641 bp, Homo sapiens
tctattagaccagcactggtttagtcaattaaggaacccaaacaaaacaaaacaaaacaaaaaatctcagaacttttaaaaagaagtaaatctatatgctctgacttaaaaggatgcccattttacagggttaagagcttccagataggccgggcacagtagctcacacctgtaatcccagcactttgggatgccgaagtgggtggaaaaccttaggtcaggagtttgagaccagccaagacaacatggtgaaacccccaggcctggtggcgcatgccagtaatctcaactattcaggaggctgaggcaagagaattgcttgaacccaggaggcagaggttgcagtgaactgagaccgcgccattgcactccacctctgggtgacagagcgagactccatctcaacagaaacaaacaaaaaaagggccaggccgggcacggtcgctcatgcctgtaaccccagtactttgggaggccgaggcgggtggatcacgaggtcaggagatcgagaccatcccggctaacacggtgaaaccccatctctactaaaaatacaaaaaattagccgggagtggtggtgggtgcctgtagtcccagctactcaggaggctgaggcaggagaatggcgtgaacccgggagg

SEQ ID NO: 151360 - DNA, 591 bp, Homo sapiens
ggggaaatatcatttacaaaaacaatgccactcattatttagagggaaggaacaatggcttgtagcaactgcacagtgaaatagtccacagtccttatccccggcactgcatggaaagcagattcttctaagagctcattacatctttcttgatgggataaatcacatgctctccacagactagctggcctctttattcacagcaacactgacttaataaggaagaccaaagaggtggcaagatgatttaagtattcacaccgattgaaatactcttcctcaggataaaatattaaccacatgttaactctcaaatgaaaatacagcctctagcaagaaactttccacacaaagtatgagcaaaatgttccctaaaacagttggaaaaggtagtcagccacaaaatactggacacaaaggtgagtatttcaaataactttgaaaaaagccacaactcccttaccctctccatctcacttccaaatgaaaacatgaaatattttaagaaattcagaagcctatgggaccctcggcctcttcaggccctcaagcaactgagtatcatcatcatctgtacactctgcccactaa

SEQ ID NO: 151361 - DNA, 356 bp, Homo sapiens
agccttctgagacactcatctcctgtgactctggatatagacgccttcttctctggcaccaggaaaaggcacagacggggatgtcatccaggccttctcaagggaagaaaactgactgtcctctctctcatggctcataggtgtttctcatttgatgtgtgttgaatgcatctggctggtttcatcgaagctattccctgttctcaggtgccctatgtctctttagagttgaataaccttgagtttcatctttgactcactcaggagattaaatctttaatggccacttaaacacatttttaatgtaggtcagttggttatagggaaagccagcaagtcagccgataaaacactct

SEQ ID NO: 151362 - DNA, 137 bp, Homo sapiens
atctcactaacaggacagcctttgcccttctcgtccacgccctgactgtgtcatctgcctccatgggcccagattcccgggttcctacttctcagccccacctccagccatgtcccatctacttggccatcccccag

SEQ ID NO: 151363 - DNA, 469 bp, Homo sapiens
aggtgcctctgcacggcccccgcccccacagggtgcccaggtctggcccaagctgcgtgtggtaacgctgttggaacacccatttgtgtttgcccgtgatccagacgaagacgggcagtgcccagcggggcagctgtgcctggaccctggcaccaacgactcggccaccctggacgcactgttcgccgcgctggccaacggctcagcgccccgtgccctgcgcaagtgctgctacggctactgcattgacctgctggagcggctggcggaggacacgcccttcgacttcgagctgtacctcgtgggtgacggcaagtacggcgccctgcgggacggccgctggaccggcctggtcggggacctgctggccggccgggcccacatggcggtcaccagcttcagtatcaactccgcccgctcacaggtggtggacttcaccagccccttcttctccaccagcctgggcatc

SEQ ID NO: 151364 - DNA, 313 bp, Homo sapiens
aatgggtagtatctgtacagatagataacaataggaataattttaaaatgttgtatattatgagattcccttttgtgaaacacagccaagagaaaatgccctctaatggtagataaatatgcaatttgacctagtggcctgtggaccaataatgggaaattcagaagtttaaatccatcaagagaaatgacagctagtagaccatggagtgataaccactctaaagctgatttatacgcacctgaatgtaactaagtagatatgactggaagagtggcaattttgctgctgagtccatatctagacatgccaa

SEQ ID NO: 151365 - DNA, 347 bp, Homo sapiens
tcggtcggtacctgtgagtacagctggagaatgacactgagacaagaggcagggaaagctctaagagccaaggtgtgccgtcgtcccagagacatgtggcttgatgccaaagtcccctaacccattcacttcctcctggactccagccaccccgcaatgagtcctctcctactaggccgacctgcaaaccctcaattccaatcctaaccctccctcttgcagaagcccccgggaacagggagctggaccagcccttactgccctctgaaggctcacggcccctagggctccaagcactgccagttccgacctcttgtagctctctgggccccgatgctaccactgcc

SEQ ID NO: 151366 - DNA, 446 bp, Homo sapiens
catggtgtgtgatgggatcccaccgcccctgacacaaacaagcagatggtgatccctgctgccctcaaggctgagcatctgaagcccacaagaaagtttgcttgcctggggcacctgtctcataaggttgactggaagtaccaggcagtgatagccaccctggaggaaaagaggagggaaaaggccaagatccactaccaaaagaaacagcagcagaaacaggcccaaaagaacggggagaagaaaattgcaagttcacaggggtcctcaagacccatgggcttctggtctgagcccataaagactgtttattcctcaaaaacaaacaaacagaataaagaagctgaatgcaagacaggaggccagcccttcagagaggcccccggctgccctgggaagaggctgtcctcagcaggtctctccatctcactgggcccagcaccaca

SEQ ID NO: 151367 - DNA, 411 bp, Homo sapiens
caacactagcacggatcacatgtaaccaggtacaatcatgacagtataaaactccatgccgtgcagcagggtcagacagaatgagcacggaagtacagaaaagagtcatcttcagaagcagaataaccaaaggccccatggaggtagatagatttgctataagcactgaacagcggaggatgtagccaagtgaagaaaaaagaggtcctgaaacccaggggaagagcataagcaggtataagcatggctagttcatagccacagtgctctgtcaggcctgacaacggcaaaacagacaagttgcaaagcagtggtggaaaagatcagatggtgcccttaaaaaccagattgaggagtttagacaacaaggaaggaaacagatctactcaaggttttcaatcattcaagcag

SEQ ID NO: 151368 - DNA, 367 bp, Homo sapiens
cattagacagtggggtagtatgagctgcactggtcctttcttccttcatcacattataggacatagatccttgtttctcggtccagttgtgtcatggtggttaaagggaaacttggaaagccagaaaactatttatacaacctcttgtttgtccccccattgaacttagatgcacaggcaggaaattaacctcatttttagatagtaaagaaagcccatagcttgtgtatgtgtgcctgtgagtgcatgcgtctatattagaaagctggacagaacctcaaagcctcccctataaatagttctaaaactgaacctgaggagataagctttactaactctgaaaggcaaacgatgccaccagcctgat

SEQ ID NO: 151369 - DNA, 702 bp, Homo sapiens
tgctgtaaggaagctcatagggagagtagttctgtctggtgggcaggagagcagaaatagatcaggaaacttcatgaaggaggtcatttttgtaataggccttgaaggatgggtacgatgagaatgtacagggaataaacatttactcagtgtagctagagtatgtgaatgggaataatggaaaatggatgtggcactttgggaggttgaggcgggtggatcacctgaggtcaggagttcgagaccagcctggccaatgtggtgaaaccctgtctctacaaaaaacacaaaaattagccgggcatggtggtggacgcctgtaatcccagctactcgggaggctgaggcaggagaattgcttgaacccgggaggcagaggttgcagtgagccgagattacatcactgcactccatcctgggcaagactccctctcaaaagaaaaaacctatgtgatgttctagttcaaaagcctgtgattctggactgagttatctggtcttagtggagaaaaaaacaccaaagatctgcagtttataccggtgaggatggaaaaattcaggctaaaattagggtgctactgagataaaaggtagaaagtatttcctgaagggcttactgttgattatattgaaatagaagcagagttcagagtaccttagtaactgcataaatggcaggtatgtcattgggaaatgggattg

SEQ ID NO: 151370 - DNA, 289 bp, Homo sapiens
tgtgtttttagtagagacggggtttcaccatgttggccaggctgctctcaaactgctgacctcaagtgatctgcccgcctcggcctcccaaagtgctgggattacaggtgtgagccattgtgcccagccacctctctttaggagaacaataaaccactcgttggcagctcgattacatcgaactctttccaacatgtaagagacaactgatcatcttaactggaacttatgagatgacacatgttcttttttaaatttttttttgagatgacacatattctaaatatgg

SEQ ID NO: 151371 - DNA, 116 bp, Homo sapiens
tctcgtttgacctgctagaaaatttcagtggacaaattcgattatttttatgttcctttcacctaacagaattttgtggggttaattccacatcagtatttacagatctgcgctgt

SEQ ID NO: 151372 - DNA, 781 bp, Homo sapiens
ttctatttcccatttcttgactctgaatttggaatacaagcaagactgctttcagaaataaggaatgaggccaggtgcgtgtctgtcatctgtaatcccagcacttgggaggctgaggtggatggatctcttgagcccaggagttcgagactagcgtgagtgacatggcaaaaccccatctctacaaaaatacaaaagttagctaggacaagagaaggaaataaagggtattcaattaggaaaagaggaagtcaaattgtccctgtttgcagatgacatgattgtgtatctaggaaaccccactgtctcagcccaaaatctccttaagctcataggcaacttcagcaaagtctcaggatacaaaatcaatgtgcaaaaatcacaagcattcttaaacaccaataacagacaaaaagagagccaaatcatgagtgaactcccattcacaattgcttcaaagagaataaaatacccaggaatccaacttacaaggcatgtgaagaacctcttcaaggagaactacaaaccactgctcgatgaaataaaagaggatacaaacaaatggaagaacattccatgctcattggtaggaagaatcaatatcgtgaaaatggccatactgcccaaggtaatttatagattcaatgccatctccatcaagctaccaatgactttcttcacaaaattggaaaaaactactttaaagttcatatggaaccaaaaaagagcccggattgccaagtcaatcctaagccaaaagaacaaaggtggaggcatcacg

SEQ ID NO: 151373 - DNA, 426 bp, Homo sapiens
gcatcaaccctgaaacatatcagtcattaaatatttaatttggaagtgtgaaatggcaggttcactttttagattacacattagagccctgccaatcagcactgaaggaaagttgcctacatctaaggtttggtcagactttgggaatagaagtttatacaacatctacagtaactacggcaaacacattcgtgtttgatcaatgagctgtcattccctgaaatcttttgccaagtctttagtttatccgactgccatgccgagacggtggttcacttgaaatgataaatgaaatccacaggtggttttggtatggacattttttgtttatgtcttgtgagatggaattataggactaggatttaaagcaaattgagcatcctgaataaagtctttcagtgtcttcctgttgcaattaaaataaca

SEQ ID NO: 151374 - DNA, 384 bp, Homo sapiens
aattaccaagcatatctttaaataaacgtgtaccacagcaactctaattcaaacaacaatctttaatgtaataattacactggctgtgacacgagctcagccgagagtgtatttttattttaacaaggctgagtaagtacatgagtgtgggctgagctttttgctcgatagtcaatacttgaaagctggctccaacctttaatttaagcattcgcttgtagcaccaacagggctacagggtttctagtatcaaagacacaatcctccgtcctttcatggccctacttctgtaagcagcatgattgaaccgcggcaccacagaaacttgttttccctccttctggcagcgttaagccaaaacactactgccccattcatcttagc

SEQ ID NO: 151375 - DNA, 622 bp, Homo sapiens
agccatacgttctgcattcttacccatggagcaaaggagggaaatgtcaatggaaggcttgaggtgctgaggttcatggtcaccttatcccttggatttcagggtagtgagattcatggataggcttccaagcctgtgcactgaaggagggaagggtcactaattgagaaaacaagtaatttagacagaaggagcagcactaaaggtccagaggccggagacagcacaatacacaggagaaactgtaagatcatcaatatggttggagagtggagacctggtcacagggcctctcataagctaaggcatttgaactttatcctaaatgccaaacgaggagcttcaaagcacatgcataattaagacatctgtctttttagaaaatcactttggccacagcatgagagtggatcagaggagagtaagaccagctaccaggtaggagaccagttagaagactattgcaggagcacaagcaaaggatgacctttctagtgtagtgacctacactagaaaacatagacaagggagcaggttatggaggaaatgtatgaggcgggactgagagaacttggaggactggatgtgataggtgaggaagaaataatgggtgaggcagtaa

SEQ ID NO: 151376 - DNA, 211 bp, Homo sapiens
cattatgaaaatgcttttcagctattctgttaaatcactgaggtttaaaaaagtgtttccataaatcctcaactctttaacaccactaattgcaaaacacacattttaaattcaaaacaactttctcagggggaggagggagaacacactacatttattgataaccttgaaaaaaaacagtggatcacaaatgtggaactgaaaatgaaat

SEQ ID NO: 151377 - DNA, 84 bp, Homo sapiens
ggggcctcctctctggggctggccgaggccagagccggctccctctgctcacagggaggtgtgaagggagaggtgcaggcggga

SEQ ID NO: 151378 - DNA, 316 bp, Homo sapiens
ccaggccgaggtcaaggtcccaggagccttccaggaaaagggcagatgcaggcgtgtgccatcctggaacaggcaaggcctggagtgggagctgtggctacagattctttttctgggtcagaaatggggactgatgagagagtcacagcactgttagtggagctcagagccatcatggaggctgacagacatccagggtcacctgacagctgatcaagggagaggacaacagatggcttgggttgaaacacggtttggggcttacttgggacatgtctgaggttgcaagtgggtagcaacacttagtggtggtaag

SEQ ID NO: 151379 - DNA, 425 bp, Homo sapiens
caacagctaggccatatcttgagccccagttagactgatctctaggcaaacgtcacttactagcctgaatcaggtcattcctggtatctaaattctccattttgctaaactgcttctttagcctgttcatctctctctattcttaccatctctgtcctccactacttacactgctttaattcttcttacctcatgtttacagtgcctcaactgttctatcccaaaccaccaaatttgtttcccttcatcatatcccatttctcctttccagcttctcaaaaatctaagccaaataatctgctccacccaacacttcgccttttgtttaaagcattcctcatcctcttaccaataagaacctttatcattgataaccgacctcacatgacaacacaaattgtttttaaattattttaaagtgtttt

SEQ ID NO: 151380 - DNA, 499 bp, Homo sapiens
cctctttctgcctctgcaggacagttttgtgtgtgctctgcattttcagcttcaattgctaattgtcctctcttgtcctcacttctttcactcccatctcagggtttctgcatgctggttctcctgcctggaacagccttctacccaccctttgtgacttagttcacttcccagatttcagagggcagctcagctttcccttcctcatggaaacctcccctgacctccctgagtagcccaaactctcctattgtaggcactctcagagcgcttctcatagatgcaattttacgtttgttcgtaattctgttttgttttttcacaacaataaattttgagagggcagctctatgcctagtctccaccctgtgtccccgatgcccagcacagtgcctgaagcacagtaggtattcagttgccttggtgaatgaatgaataaagccaagccaagcacagtactcagatctcaagctcatagtcactgcatagcttgtgctaa

SEQ ID NO: 151381 - DNA, 434 bp, Homo sapiens
gcaaaatctatatgcctggggatatgcatgccttaggaaatttatattaaaccaaagcaaaataaagcaaagtagaaatgagtgaaaacaaaaagccccaaagtcagtaagtgagttccctgaaaacactgttccctaatagcactgcacgcatcttagcgcgttatcagtatgaagtgctggtttatgttgattcactgcctgttttaatcagaagatcaggattctggctgcctcatgcatccaaaatatagctgccaagaatctgaacacacatgacaaaataaaggaagagagatgcacaagacccaggcccttggatctagggcatcattgtggggtcaaactcagagctttccccaagggctgcctgatttttgtttgtttgtttgtttgagatggagtcttgctctgttgcccaggctggagtgcag

SEQ ID NO: 151382 - DNA, 315 bp, Homo sapiens
aaggcctcccctttgcctaccccttatgctttccaaatggcatggcctgggggctccatggcatgcccccaggacccctacagacaccacccagcctggggacgttcactccctccttcactgttgctcctcccttggtcctcttggtaaagacagaagcgcacacactgcataaactctagttgaaggcctgataattaaggcatcgtattcaaagcaaaatacccctcccatttataccttagttgggggccacacagcatagcagttaaaagcacagacttgggagccacacacccaggctggaatcccagc

SEQ ID NO: 151383 - DNA, 584 bp, Homo sapiens
gggatgcctttgctcccttgacttgtattaccatctttgtgttttaataacccaaaatgaaattaccgttttgtgttctaagtcagtacctccaggttctagatgtcccacagagacctccagacatgttcacaactaacttcagcttccccctctccctaaccctaggtgctcttcctgggctgggctggcctgcccaggcagtgataccaccacccaatacccagataccagggtgtcctctaggctccctgctcctacctgaccagccaccaactccttccattccaactccagttctcatcctcttctctgccagtatcttagtccagactctcctcaatctcacccctacaatttgtcctttatgtggccgaccaagtgcacgttctaaaatataaagcctgatggctcatcccctggacatgttgccattgccctgtggataaagtccagatcctctaacgtgtctcagatactctgcagtctgcccgcttcttctctctttccctgtcaccctcctacccagcctctgatccagctgtgctgaagcacgtgtggctctcagtggctgtgctccccag

SEQ ID NO: 151384 - DNA, 328 bp, Homo sapiens
atgagatagttggtcagttacagcctttgtctctgaaggtatttacaagaaacttgaaataacgtcttttatttttaaggccaaaccatacttcaaaccaatttgtcctttatgtggccgaccaagtgcacgttctaaaatataaagcctgatggctcatcccctggacatgttgccattgccctgtggataaagtccagatcctctaacgtgtctcagatactctgcagtctgcccgcttcttctctctttccctgtcaccctcctacccagcctctgatccagctgtgctgaagcacgtgtggctctcagtggctgtgctccccag

SEQ ID NO: 151385 - DNA, 326 bp, Homo sapiens
  misc_feature (38)..(38): n is a, c, g, or t
gggctatatactccatggcagaagcaacactgaggctnttatatgaggtgggggactacctcatgaaaacatgagtcaggaatggcttctgaccatggtgtatgaaaagcccttgtctaaaggttactgccctgagaaaataatccaggaagaagaggatagacatgaagacactttaaagcctcctgaatagaatgcatccagaagcgaattccaggagattctgtcatcatgcttgcctttcaagcaaacaaaattagctgctagaactgagaaagagtgtaaacaccaactaaatgcctcaaagagccatggagtaaatggca

SEQ ID NO: 151386 - DNA, 783 bp, Homo sapiens
  misc_feature (742)..(742): n is a, c, g, or t
  misc_feature (745)..(745): n is a, c, g, or t
  misc_feature (747)..(747): n is a, c, g, or t
  misc_feature (750)..(750): n is a, c, g, or t
  misc_feature (783)..(783): n is a, c, g, or t
aggtcacctgacccagctcaggagcttgaagaaagggccaatggaccaggcctgtgaagtgactacttcctaagaaatggtaccatattttcatttctttcactagacactagtataagaatagagaggccatgactggaaaatgacaagatctgcatactccgagatcaacaacgaaaaggaaaagacgcgccagaaaacacataattggaaggaatctaaatgagccttgttttactttttggatgggtttctgtattatttcctcatggctgtggttcccaagcagtgggaacagagtactcactgggacactgaagggtatcttgaattttaaagaggagcgcagtgacactggacatctgttgggcatttcaacaactgctagcttgagatagttcccagtttcaacgttaggctgtgtcacacttctttcaatgatgtcataacaaatagaactgctaggtatctcttgacctacaggtcttgtgaaaaagctattgaggcactagagcactatgaatgtgcaagttggaaacctccacgttagggtatatctggtgtttaagtaattaatttcaagcatcttggatgcttgaccatctgtctcactctgggcattctaaggacaacttataatctggactccataattcgatatctatatctttgctggaatttcttcctgacgtcaccgagtcaacccattcactctctacctacatgaaaaataaagactggngcngnccngttcctttagggaagggtaattcatgatcctcn

SEQ ID NO: 151387 - DNA, 307 bp, Homo sapiens
agaaacaaatgcctggcctataaagtattcaagcctgaagaaaaagacgtctccaaacccatttgcaaggctagcataaagctaatctcgaaatagaacaggaaggtcattttttaaaaagagggaggggattggcccagggagagagataaaactcctaagtaaatacataatatactgtaaaactaagcaaggtttatatcagaaagtaaggtgtgtccaacattaggaaacctattactgtaactcagtacaatcatacaataaaatcttttgattttctccatagatgtcaacgagacatcac

SEQ ID NO: 151388 - DNA, 106 bp, Homo sapiens
caaattcaccaacaccagcagcaacaatcaggacagcacagtcagcctgagatgtccctgtaatcatgtttttgatgaagtctctgtgtcctggggcatcaatgat

SEQ ID NO: 151389 - DNA, 380 bp, Homo sapiens
ggtatgctttcagaaaaggagggcatttctccagacacagcaacatgcaccaatgcccacaggcctactgtaattagctcagtgtggtatgtgtgcagcaaaagtgaaatgaggctggggaagttggcaagggaaaaataatgaaaaggcatattaaggaatttatattttaccttgcaagcaatgaaaggccattgaaaagtttctaaaagaaaaataagacaaatctatatgacttttaggaaaattactctgttggtggtatagagaataggctgaagaaagtctgtagggaggtagttagaagcctatcgcaatggtccaggcatagttgaatgaggatgcgagcaaacactgtagtggaagggtaaaggagaaag

SEQ ID NO: 151390 - DNA, 438 bp, Homo sapiens
gtggtgaagacttcccttgtgctaaagctggagggcctttctgggattcagtgacttcagagaacccttctgtgttgcttaattcaggagatgcctacaggagctggagtcaaagctggtgagcaatccagacttatgaagatgcaggattgccttgttatttcctgtataaggactatggacaaatgagcggccagaggtattgaagacacaaaccctgagatgattcttggcctctgtctcatatccagtacatataagcctctcccatcacactccatcttgttcaacttccttgataaaaacagtggcaaggtttgagagaattgactttcattttaaaagaagttctactgtgtataaaatgctatcaaatagcattccatgctacattaaaatctttcataaaaggatgagtcaatcaacgtggcaaacttt

SEQ ID NO: 151391 - DNA, 578 bp, Homo sapiens
tccctttttgggagtgtgtgagagagagagagagtgtgtgtgtgtgtgtgtgtgtgtgcacgcgcgcacatgcgcgtgcatccttaggttccgtctaaatccgttcaagctgctgtaataaaatatcatagaccgggtggcttataaacaacagaagtacattgctcacagttctggaggctggaagttgaagatgaaggtgccagcagactcagtgtctggtgagggcccactttctggttcacaaataggatagcaccttctccctgtgtccccacatggtggaaagggttgggccctctgggatctcttttataaggccatgaatcccattcatgaggactccaacctcataaccttccagaggccccgcctccaaatgtcatcacactgggagttgggatttcaataaatgaattttggggagacagaagtattcaaactatagcaggtcctggccacactttggagtcaggacttgggtggggggctttttctgtcactgccactgtgtctgttgcaagaacctcagcgtcctccaggacctgagtgcccatcacgtgctggcctgcgaggca

SEQ ID NO: 151392 - DNA, 537 bp, Homo sapiens
atatcaaaagtctgaagagccaataacatttctaaggtcacacctcacagaattggagaaactagacaggtccaaatccaaacccagcagaagaaaagaaataccaaaatcagaacaaaactaaatgaaattgaaacaaaaaaatacaacagataaatgaaaaagctggttctttgaaaagataaataaaattgataagcattagcaagattaatcaagaaaagaagagagaagatccaaataagctctattagaaatgaaatgggagatattaccactgataccacagaaatacaaaagattattcaagactactatgaacatcttcacatccataaactagaaaacctacaggagatcgataaattcctggaaatatacaaccctcctggattaaattaggaagatatagagactctgaacagaccaatcagaagcagcaagattgaaaatggtaatttaaaaattgccaacaacaaaaaagtccaggaccagatgaattcacacctgaattctatcagacattcaattgttatt

SEQ ID NO: 151393 - DNA, 477 bp, Homo sapiens
tgaccgaagcatcaaggagggacagctccacggtgtcacctttactaggactcctattgcttctaaatggtgggtacatttgaaaagaacgggtgcatttgccaaataatacatttggtcctctatattgagaggttggagcgaggctgtggcatactatttctcaagcatcacttctcctagaaggcctctcttgttcttactcccacaattggcctcaagctgtttctctgagctaccgcatcatccatgtacatcattgtcattagcgtcagcatgcaacattcattcacttttccattaatacaagcatccatttaacaaatctttgtcgagtgctagcacaggcccaaatttaagagatttagttggtaatacagatataaacaactgaaaaagtaaccaatggtaacagttcatagtgttatagctgatgcaatattagagctttagatattgacaaagatcctggtagtg

SEQ ID NO: 151394 - DNA, 257 bp, Homo sapiens
aatatttctgagttctgagtctactaactgactccaacagtgggaaatgcagcataaagccctttcttggttctttctgatattctgcctttaaatactcaattaaccctagaaatcattttaatgggaatgactaaaacgaacaaactctccacactgaggtccatacttcagaactatgagtgctgtcgcgctttttgctcagtgatttttgtcagtagtaggctttggaaatataaacttgttaaaaggaggaa

SEQ ID NO: 151395 - DNA, 177 bp, Homo sapiens
ttgagagacatgtggataacttcagtggtctgaatttgattatgttctacatatgggaaacaatcagagtaatgtatagggatttcatagtgtaactaactacattaaaagaaatgagaactctgcacacctaagcacatgttcacaatttaaaaattcaggcaggcagttccactt

SEQ ID NO: 151396 - DNA, 543 bp, Homo sapiens
tcattgcagaggtacctgggaggaccagtgaggctataaagtgaggaatgtcttcaaggggagcaaggctgggagagaaagaccaggtaggagggaagccagtacagaaaatcagggcagagagacgggacccagataaagcagaagatggataggtggacaggagaggcatggtagcaagatggcggagggaagacgtgggaattggatggaaggcacccatggagggaaaggagagacacgcaggacatccttgtctaaggcatctgggtggaaatggaattaccctgctggaatggtctgaatatcttgtgtcctcccaaatccctatgttggatcctcacccccaaggtgatggtgttaggtgttgtgtcctttgggaggtcatgagggtgaagtctcatgaatgggacgagtgcccttataaaagggaccccagagagatccctcaccccttccaccatgtgaggacacagtgaaaaggcgccatctatgaaccaggaagcgggtcctcgccagacactgaatccaccgtgtcttgat

SEQ ID NO: 151397 - DNA, 426 bp, Homo sapiens
cgggaatgctcatcaccttgagggcgaagaaatgcttggctgtcttctccttcaccaggtgcaccctagtggatagcgacgtgggaattggatggaaggcacccatggagggaaaggagagacacgcaggacatccttgtctaaggcatctgggtggaaatggaattaccctgctggaatggtctgaatatcttgtgtcctcccaaatccctatgttggatcctcacccccaaggtgatggtgttaggtgttgtgtcctttgggaggtcatgagggtgaagtctcatgaatgggacgagtgcccttataaaagggaccccagagagatccctcaccccttccaccatgtgaggacacagtgaaaaggcgccatctatgaaccaggaagcgggtcctcgccagacactgaatccaccgtgtcttgat

SEQ ID NO: 151398 - DNA, 376 bp, Homo sapiens
aaagtgaaggaatgagactaattaataataagaatccatgccccaccatagctacgatgcagtggagcatggattctaaaccagctctaacatcacatgccctattttcgagcactagtggcttatttctgagctcttctcttcctctttcctgttgatgcttgagttttagttatatcatggcaaattgaaaaattcttcaaaaaacatacagaggaaataaagtggtgggatctgaaacaaaactcttattgattagccattctaatgaagatttgtggctgagatgggagttttgcaatcaccttgggatttcagaaccctgcttttaataattagaactaaagaagggagagtcctatagaagtgtgggtca

SEQ ID NO: 151399 - DNA, 233 bp, Homo sapiens
tcctacattcattgtgtcaattaatggctcttctgttcacctactcttctactctcaattgacctgactcttaacctctccaacatatcccacaccaaaatgctcatggaatccaggacattctctctcagcaaggtttctttacttagccctccacattatttctagcccctatggtactttaagttctatttcagtcttactggacaaagatagtagcctggattccatga

SEQ ID NO: 151400 - DNA, 298 bp, Homo sapiens
gcttatataattgggaagatataccttgatcatggatcagaagacaatattgttatttgaacagacacttcaacaaagaagatatacagatgacaaataggacataaaaagatgttcaacatcattagttattaggaaaatacaaattaaaagcacggataccactattaacctatttggcaaaatttaaaagacggagcataccaagtgctggagaggatgtagaggaacagaagttttcatacactgcaggtggaagtgtaaagtggcatcactttgtaaaatagtttgactgatt

SEQ ID NO: 151401 - DNA, 465 bp, Homo sapiens
gtaacaatttcagaaaaaagtacctcaataaaagggacaaaactcaaaattcattacatatatatcttgtcacaagaaatcttctactatctattttcagtatctgagctgtgttgaagtcagcaatttgtacattctgtggcttcattttttttttctttttaaatcagctaccagacttctgagaaccgaatgtttgccaggactgagtcaaattttcctaccttttgaataagtttgtttcttgatttctgtgtatttctcacaacaaggccaatctgtatcacaattcagagtcagaaatgaatagaaaaatactgtcagatattcttggcgtcgttatcaccaggactcatacactgctctggacattccctgatctgacccaatcttaagcacctctcctctctttacacataacttccactgggccctctgaatcttctactcttgatcacaaaactt

SEQ ID NO: 151402 - DNA, 224 bp, Homo sapiens
taatccagtttggtggaggcagcagagtgggatggaaagagtaatcatctgtgatccaggaagtctgctttataattaccaagctgaccttgaacaaatcactctcttgtccctagtttcttttgttgttgttttgtttttgtttttgagatggagttttgctcttgttgcccaagctggagtgcaattgcatgatctcagctcaccgcaacctccacctccca

SEQ ID NO: 151403 - DNA, 186 bp, Homo sapiens
ctaagctgacagtcttgttgtacattggtctctcttcctagtgtctgagtatcactgagtctgaccatttcaaggtggcctcagagtgtccagacaggctgagaaccacctacctaaatcacagagactcaacccagatgctgtcttctcaaagaagttttagcagcaacaaggaagctctcctat

SEQ ID NO: 151404 - DNA, 152 bp, Homo sapiens
cttgcaaaactcccaaggaagggatttatgacaactggaagttatgacaattgagttctttgggggaggatctagttttaggcagacaagggagttcaggaggaaaaaaaagctattctcaaatcgctgtgtattccgcgctggttattccg

SEQ ID NO: 151405 - DNA, 212 bp, Homo sapiens
aggtgtgaagtttatctagttctgtgtgtgtgcgtgtgcaggtacatgttgctttacatcctggtcaatatttagtgattacagatttgtaagtttttcttttattctgcaaagtaatatgctatttcgtggctttttaatttgcatttttgattactagttaggcttagcatcttcttttttaaaactgaagactagtgaaagttgaatcc

SEQ ID NO: 151406 - DNA, 287 bp, Homo sapiens
aaaggagatttaaaagatacaataattggttaatgggtaggaggtaccgcttgccagggaagacttctgtaaagagaagtagaaaacatttaagttgaccctggagataaggtccttccaggccaaaaagaacggtatgtgcataggcccagagacaggaaggaatatggctagtctgcccatactacaggaatatgactggtctgcccatagtacatgaaacagaactgagattaagcagtgcctgatcacatcagcatatccctgcagcacttcaaggagctaca

SEQ ID NO: 151407 - DNA, 397 bp, Homo sapiens
agccctttgcaggaagagcttggcaattcctgtaatagaggatgaagacaatgaagggggtaggctggggctgagtggaagatgagactggaaaggccacgtaaggatttggacttaatcctgtggatcggcttctcaaagtgtgtgtgctgtgtgaagcccctgcatcggatcccttgatgtatagattcctgagcctccccctgggcttaccagctaaaccccttgccccacgcccttattcttaattccacctggacttctttcttcagtctctcaattcttgccactttggaagcccatgcttaggtcttagctcttcaccaaacccttgcctgattgctttaccctcctccatttctttcttttctaaacatcgctctgaatcttcttcccc

SEQ ID NO: 151408 - DNA, 463 bp, Homo sapiens
accagatcatacctccaggcttgcacccctccaagacagcccctttgcttcaggacagccactgtacccccagactcagctttcaggccctctccatcacaagactagcacctttagaccccagtttaaggccaatacccacagacccagtatccagaccaactcagctccaggctggccttcacactcccaggctttgggtctgtcccagtgccacgttgacacccatggacctcagctccaggctggcccccatggccacaggtaccaggtcagcatccaaacattcagcctccaatacagccctcatgggtacagactccaggccatccctggtggccccagatttcaggctggcccattcaagctcaggcttcaggcccagaccaggctccaaccgagtccaaaaaaggctgacccacagagccccaggcttcaggcccgacccagaactaagctggct

SEQ ID NO: 151409 - DNA, 405 bp, Homo sapiens
gagacggggtgtacgtagttaacagcaagtggaagctcagaatccgaagccctgggcctggttccgtggcttcctagctgctgactctgggtgagctgtaatacgtgactgcctgagatttccgagcctccgctgcacaacggaggtcagcactgctgaaggctgtggggcagcttcggcagatgattcccaggagggcgcttcataaaacgtcaaatgctgtgtaactcagttatcctaagggcacaggggacggtaacgtgctatctcgccgcatgttatgaagacaaaattctcacctataacgatgaattcaaaagtccttcagaaaagttagaactgctataacattccaagaattggcctctatctactacagaggtggatctatctgaaatctatgtg

SEQ ID NO: 151410 - DNA, 330 bp, Homo sapiens
atctctcacatttgtcatctcacgcgtggcttctcacattcagcgcagcatatttgactgcactcacttggcagaaaacaaaattaaaaagaggcagagagaatgtaaatggcacattctgcctgtacatggatttaaatagtgcatttcacactcgtctgcacacctcacggttcagggttctatatacaaccatccgtgcactgtacttcatgggcagtgggagcaatttttgagggtaattttgacttcttgcttttcacactctggcttcagaactcaacctccaccacgaacgtaggccccactgtaattacaagaaatcagcag

SEQ ID NO: 151411 - DNA, 216 bp, Homo sapiens
ttttaagtggaattatggtggcagaagccttggtgaagtgggctacaatgtgaatggtagaaaaggagccagaaaaaggaaaattcttctgtaatatgatttttttaaaaagaggatgacatttagtaagtagaacacacatgcttcaatttaacgtgaagaatgagatacatggcttggaccactgcatcaacaggaaaattaacaaaaaagaag

SEQ ID NO: 151412 - DNA, 527 bp, Homo sapiens
gctctgtctcccaggctgttgtgcagtggcatgatctcggcccactgcaaccttcacctcccaggctcaagtgatcctcccacctcagcctcctgagtagctggactacaggcgtgtgccatcatgcctggctaagttttaaatatttttttggtagaggtggggttttgccatattgcccaggctggtctcaaactcctgggctcaagcaacctatctgccttggccttccaaagtgctatgattacaggcatgagccaccgtgcccagcccacaactatgctttattaattaaagcaatgtattagtcagaattcttaagaggaacagaaccaatagagagagagagcgagagagacacagaggggtgtgtgtgtgtgtgtgtgtgtgtgtgtgtgtgtgtgtgtgtgtgtgtgtgagagaaagagagagaggatggagttgggcaagtaccaggatcttcagagggaatcagcaagctggagatgcaggccagcctatggttttgttccagtctgagtccaaag

SEQ ID NO: 151413 - DNA, 628 bp, Homo sapiens
tttcttttgaaacatgaatggatgttctttcctaagaccaacgaatgaacttttttccctttgcctacaactggcacagacagtgctactacctagttcaagcttcagtaatcagggtagaggtttagccgttggaataaatattttaaaggttagtaaacctgcatttccctagtctcctcggtagctcctatctgtcatctactcccaattctaagtcatttccgcaaatgagtgataaaaggggaaaagatatgctagtccttccaagtatgtaaaaaacaagattaggagtggggatttttcttttactcaattagtagctgaaggcttgtgagaaccaaacaagaaatgaagtgtggcgcttggtgttgtgttaactttctatttacaatgttgacgtttgcattttggggaaaacataactttttggtttaactttttggtttactattccctttgtagattaatgctttgcatataattttataattactgtcatcattctctttatcactaaacttaatttgtacatgagaatttcacataacaacaagtctatctgattatgttgccctaaaatctaaaattagaagttactaaaaagggcaatcactaagaaaaaaaa

SEQ ID NO: 151414 - DNA, 339 bp, Homo sapiens
caaatacccagacttcaaggaggaggattttccatatgtaagactgtgttatctgtgaacagagatattttcatttcttcctttccaatctggataccttctattgctttttcttgactatttccctggctagaacctccagtacaatgttgaacagaagtggtgagaccagacatcttcgtcgtgttactgatcctaggaagaaaacatctgccttttaccatttagcatgattgctgtgggtttctcataaaggctctttgtcaggttgaggaagttctcttctgttcctagtttgttgagtgtttttatcatgaaagagtgtttgattttgtcaaa

SEQ ID NO: 151415 - DNA, 468 bp, Homo sapiens
ttccctttccaaccacctaccaccagtgctcacaggatcaagcccaaactcttcctctctgggaattagagactcctcgtgatctgatctcctcttcctcccccccacagaccatagggctctctgctacaatcaaacagctctcagctcaccagatcgtggcatagggacctggtgaggagctggccacgaagcaactatagagaccagaccagtgatggggcccaaaacccattagcaaacaaaatcaaagggcacagtgagcaaagggcagactgggtagcagggccaaacatgatgcaagcagcaccaagatcatttttgggagttacaagagagacaatcaaagtctagccaaatgaagatccatggaattaggagacaagaatagagtagctgtggtgacggcaaagcattgacaacgtggatatgtgtcaatggcagcaaggcctctaccaccttcttatc

SEQ ID NO: 151416 - DNA, 345 bp, Homo sapiens
cagggtggtgtccaggggaatggaaagggacagatgagaagtactttgaaagaaaactggaagcatgaattaattaagtgaaaattggagctcccatggaccaaaatgggaactctgtggagggagccattctggaggctcacatgacaggagatctaaaacatggaatggacaagtgaagtcaggattggcaagaaaaaaaaaaaaggtttccctgaaaatctttcagaaagagagttcaatccaattgtggggatagaagccatattgtagggaggaagaaggtatagagaggaaatgaagtagtggttaggaataaaaacttgtaagaagtttgtttgacag

SEQ ID NO: 151417 - DNA, 332 bp, Homo sapiens
caggaatccaggaaccttatcgcctcctcctccttccatacctcccagcagccggcaagccctggccgtccttcccatggaatctctctctaaagtgtccgctccacccagccccacaccactgccttgggtcggggcccccaccctcactcacctggacaagagcaatgggattggctcctcctgtcacagacataaccccagtctcctgccagccccagcccacatttaaaaccctggacagagccgggcacggtggctcacgcctgtaatccaagcgctttgggaggccaaggcaggcagatcacttgaggtcaggagttcgagaccag

SEQ ID NO: 151418 - DNA, 240 bp, Homo sapiens
gagtcaaaaaggtaaaaaatgtattaggctatacatataactgttactgttattagcttataacaacaggaggacatatgaaagtgtgagccaccgcgcccggcctatgtttttctttagagacagcctttgagttggtgataagcttatgcactgaagatgccttgaccagcaaaacctgtgtcatgagaggcagagtcccacttttctgtatattatgcacattggaattctattttc

SEQ ID NO: 151419 - DNA, 137 bp, Homo sapiens
ctattcccaagtccaaagccagtttccaccaaatgccgcatatccatttcttataaactcagtactctccaattttcattgtttccccttcttctgtttcaccctgttttcttctgtaatgagacttgcccttgtga

SEQ ID NO: 151420 - DNA, 315 bp, Homo sapiens
aatgggatcctggatactccctccctctttgtaaaacccctggagcattttgtggctgaaatttacttcttagagccatgaaatgccctccaaaaagtgaagcaccacatccaaattgcattccatgcccaaagtggttaacatccctcagagatgcaaactcagaagcatttttggttttgagagccacagtgctttacccataggatgggcaggccattccttctgctgactgcgtcagcagtccgggctccaggagaaccagcattcgcagtgggggtgtctgcactctctaccaagctgtccaggttcagg

SEQ ID NO: 151421 - DNA, 532 bp, Homo sapiens
atcttcaggcgtgattgataaagacatacccaagaactggggaagaaaaagaggtttaattggacttacagttccacatgactggggaggcctcagaatcatggcaggaggtgaaaggcacttcttacatggtggcggcaagagaaaaatgaagaggaaacaaaagcggaaccccttgataaacccatcagatctcttgagacttattcccacaacacgtgggaattctgggaaatacaattcaaattgagatttgggtgggaacacagccaaaccatatcaccaaatacatacctatttaataatccagaaaatacaatcttatgtacttaagagaagtgaaaatattatctacagaaagacatatatatctgatttgttcataggaggtttattcatgacagcctcaaatcagaaacaactacatatccatcaatagggaaatatattaaaaacaaaacaaacaaatgctcccaaacctgtggtatattcataaaataaagtattacaaaataaaatgatcaataaaaac

SEQ ID NO: 151422 - DNA, 553 bp, Homo sapiens
taaaatatagtccgtattcattcataaaaaaaaaaaagttagctgtagtaaagactctcacactggaaaaagaggtttaattggacttacagttccacatgactggggaggcctcagaatcatggcaggaggtgaaaggcacttcttacatggtggcggcaagagaaaaatgaagaggaaacaaaagcggaaccccttgataaacccatcagatctcttgagacttattcccacaacacgtgggaattctgggaaatacaattcaaattgagatttgggtgggaacacagccaaaccatatcaccaaatacatacctatttaataatccagaaaatacaatcttatgtacttaagagaagtgaaaatattatctacagaaagacatatatatctgatttgttcataggaggtttattcatgacagcctcaaatcagaaacaactacatatccatcaatagggaaatatattaaaaacaaaacaaacaaatgctcccaaacctgtggtatattcataaaataaagtattacaaaataaaatgatcaataaaaac

SEQ ID NO: 151423 - DNA, 235 bp, Homo sapiens
aatctattgaagatacttttggtagcctaaagggagacacaagctgatgcgttcaaacctgcaagtaatttaggatgttctcttctgattggtagcaacagtgattcctaagctagccactctgccattagctgtgagctcccctctcttaataatcaacttacacaggcttagaaactataaactatatgtaatagaatattaaaatgaaacccctactgttccctgcaggtga

SEQ ID NO: 151424 - DNA, 490 bp, Homo sapiens
ttcaaacaggtaagtatttactcctgagaagcttaaacccactagggcaataagacatgtataagaatgaatctcgtatcagagagaatgtggcttcttcgtaagagatgcagagtagtatagaattcaagtgggaatccagttgtccttttgcttgaaggatcatagggactgcttaaaggaagtagatttctttttttttgtttttgttttttggaaaaggccaagctctgttgcccaagctggagtgcagtggtgtgtttatagttcactgcagcctcaaactcctcggttcaagcaatcttcctatttcagcctcccaattaggtgggactacaggtacacaccaccacatccagctaatttattgtatttttttgtagagacagggtctcactatgctgcccagtctggtctccaactcccagcctcaagcgatcctcctgtcttggcctcccaaagtgctggagttataagtgtgggccagatt

SEQ ID NO: 151425 - DNA, 292 bp, Homo sapiens
cattgggggaggacgagagagtgaaccagacacacacgtcaggatagcgggtatgtagggtattaggtgtgaagtgctctggagagggagcaagcagacagggtgacaagtgtgaaggagggcgcaattttaaaggtgggtaaagtgggtgtaagaagatggcccaggcacagagactcactgaaagtaggggagcaaaccacagggacaaagggggcgagcctgtctacagacagagggtctcggggacagacaatgtgttcccctccatttctgtaccaacaatgcctgg

SEQ ID NO: 151426 - DNA, 476 bp, Homo sapiens
caccctcgcgacgtgttatcctgcaaaacagaatatgagagataaaagcgagaaaggaaagatttggtcttttagaaaacattccttcgttttcaacgaatgcatcaattgtttcaggcttctctgactttaatgtacttagggatcacctaaggattttatgaaatgaggattctaattctgaattctaatccagtggtctggggcaggacttaagagtctgcattactaacaagctcccaaatgattccagtgctgctgatacaacaatctcgttttaaggatcaggaaaagagagaacaaagcatatgaccccaactaattaaaccagacaagactcacgtggcccctgctcagcacctgtgatcggagtgggtcctagattggctcttccatgtaatctgtctctgttttatatattttcattgcaattgcatgtctgcggttttagaaggttttttttttggttttttttt

SEQ ID NO: 151427 - DNA, 343 bp, Homo sapiens
ggcctgcagactgcagtttgccaacccctgctctaaagctttaaaaccaaaactcaaatgcacaggctgattttgttgactgtttaattataacttcaagtggtaccaggcaagcttaacgaacaggaacctagtggttatcaaactggtttgtctgcaggaaccttggaaagtccctaaaaccgtaacataaagacattccactataatcctatgtgatctacaccagaggtatgaaaactacaaccggaggcaaatctgacccactgtgttttagtaaataaagttttaattgaacagaaaagctcatttatgtactatttatggctgctttagcactaca

SEQ ID NO: 151428 - DNA, 478 bp, Homo sapiens
ttggcttttgaaggcctctcctggtccagtgtggattctgtaaagcttttttgaaggtcttttagcaatgaagaaagtatgtactaggagatgaaggcatgggaattggctctaaccccatttctacaagtagcgcgactgtgaattgtggtggggctcaagttcttaatgtgtaaaatgggaacgatgatacctcccagagtcatcagaagatcaaatacaaccatgaacgtgtttgtgctctacgagctgtaattcctaaaagataggtaggttaagatgaagaaaaggcattgttgagtttctcatgaacttctgatgcaaggcgtgttctagtgtatcatgcgtaaggaatcttttccaagcccgagaaaaactatccggtgccaagtgcatcaccactgggcataagtagtcccacccaagacaggaggggtgcagggctcctgccactctgcgtcatgaagaggaattgaaa

SEQ ID NO: 151429 - DNA, 331 bp, Homo sapiens
gcacactttctcacgaggaagcattcatgactatataaatgtccacaaataagggtgcaaatacagaatgatttgtccgcccagcactttggaaggccgcggcgggtggatcacgaggtcaggagatcgagaccatcctggctaacacggtgaaaccccgtctctactaaaaatacaaaaaattagccgggcgtgttggcgggcgcctgtggtcccagctactggggaggctgaggcaggagaatgctgtgaacccgggaggcggagcttgcagtgagccgagatcgcgccactgcactccatcctgggtgacagagcgagactccgtctc

SEQ ID NO: 151430 - DNA, 376 bp, Homo sapiens
tttcttccatcatctcataattcagaacttccattatagtttggcaatagcttaaatatcttgttcagccaccaatgccaattcgctcctcaacatactcccttctctgaaagcactgtacattcttctttgcctattccatcccaatctcatccatttgcccaggtttgtctgaagctttacctcctttttgaaatttctccattctccaaaccatatatatcatttaatttcctaatcctcatgtgcacataaactaaacaaaatcactgttcctctacactattctgtcttgaactctaatttattaagattgtacatccctctttctcatgtctccaatcttaccccactggctccaaatgtacaccttcta

SEQ ID NO: 151431 - DNA, 121 bp, Homo sapiens
taatattttacaattagataaaatgtgcaaataaaatatagaagaaagagttatatatatacactcacaaaatagcaacaaaaacattaacaaacacggtataagcaacaaataaatagaa

SEQ ID NO: 151432 - DNA, 395 bp, Homo sapiens
taaatgcacataagtgacttctttccagtcacttggattaatagctcctttttaaatgtccctctccccacactgacaacccctttagtctttgataaatgtttttttaaagccacaaaatcaattcaaaggcaaagagaataccttatccattgacattaacataaagcccccaaggatccacatgatcaattggtcaaaggtctaagtagagctggttctttgtttcctctcaaactttttactggagagactaagggacagatgttaataaccttagggcacaagcggaacaaactcagctctctgcataaggttaaattagcagatgtaaggatgaaaggagctaggaagccatttcattcatatatttagggtaaactttaagtaaatac

SEQ ID NO: 151433 - DNA, 112 bp, Homo sapiens
tgctcttttagtaataacagtgttgtacatttccttttgtctctgtgagatcacccagtagccactacctgtagcattgccaagattagctcccttgttgatactaaccagc

SEQ ID NO: 151434 - DNA, 434 bp, Homo sapiens
cttcctgctggtgcgtacatgtgcgtatgtgttcttatggacaggaacatgtcaaggaggacttctcgcctttctaggaaatttctccttccctgccacccctcctgtatccatggatatacccagaattctacctctggctcttctggtcctttccctgcattccagtctcctgggcacgtgtggcttttcccacctcctccccgcagatgccactcaagtccctgcttgtaggttcatatttccacctgcccggggggaggaaatacataacctggatgtctacagaggtcgtatccaaaacaagcaagtgaccttcaacctcctcctcctccaccagcctcttctcttacacgatgaagggagtcacaccactgaactgccgcccaagctccaagtcggccctgaagcccctcttttcctctggcccttcc

SEQ ID NO: 151435 - DNA, 252 bp, Homo sapiens
ttcacacagttttcccaatgcaccatgagctcagaattcccgtgaactcctggtgcgtgggagttcagcaagacttcaagcgagtgcaaggtaagtgtgttaccaatacaactgagtaagcaggcaggtgggtgctgactgcccaaagaggcaatgacttccatttgaaccagaacttgattgcatacagaaatgtctttctaagaaacacaaatgaccaaggaggcttagcgttttatctctttctcatgt

SEQ ID NO: 151436 - DNA, 102 bp, Homo sapiens
ccacgtcggcctcccaaagtgctgggattacagacgtgatccaacatgcctgggcaagaatacctttcgttgagcaaattgttgagaggtagaatgaggaaa

SEQ ID NO: 151437 - DNA, 569 bp, Homo sapiens
ccaggaattacaccaaccacaggtcaaaaatattaaaagttgtgtctgtactgaacacgtacagacttttttccttgtcattattccctaaacattatagtataacaactatttacttggcatttacattgtgtgaggtataagtaacgtagaatgacttaaagtatacaggaggctgtgtataggttctatgcaaatactacaccaccttatatcaggaacctgagtatccctgcattctggtatttgcagattgtggaaccaattcctcacagatatggagggacaactgtattttccacattccaaggttattttgaaaaaagatgcagaatatccctccctatgaatttgtcctcaaagccatcattactgccactgaataactggatttacaacactgaaatatacttttcagaaagaactcagccaggtgggcagatcacgaggtcaggagatcgagaccatcctggctaacatggtgaaaccccgtctctactaaaaatacaaaaaattagctgggcatggtggtgggcgcctgtagtgacagctacttgggaggctgaggc

SEQ ID NO: 151438 - DNA, 164 bp, Homo sapiens
catagaaatgctaacaggatagtattgtgctagatcacattcatctggcaacaagaatagaagatgtgacattgtacatttagtaacaaaagaaaatgcggccctattaagactagaaagtactgaagaagaattatcctcctattttttccaattgcatagcc

SEQ ID NO: 151439 - DNA, 636 bp, Homo sapiens
taacacttagggattaaggacttaaaatagtcacttcatcaactgtctaagccatgtctgtgcccttgttaactaatctgctaatcggttaaacacaacttctgtgtgacacagcattctatgtctttaaatgcttctacatgcagctctccagcaccactgaattcagacttggggccatgtaattaggtttcttgaaaggcaagattttgctgaaaatgcagtgtgtctcgcagaacttataagcaatatcaccctctacattatgagtcacaaagccctaaatcacgaggcttgatacttcctttaagccagaagctactctggctaccagccctgagccaaactaagaagtcagcacagcatctttcccctttctatgtacatttcctctccagccacatttagacatccaattccttgtgtttctccccctcttcttttgtccaaaggttagtaccttcagaaaattacctgaaactcatttaaaccaagataatgaataaaggataaggctgaattaccccttccagaggatttcttctcactgtaacaaggatcaaaatcttaagcttaaaaaaaatctcttttctattatgtagggatgccaagttattttctaggacagtagggttt

SEQ ID NO: 151440 - DNA, 312 bp, Homo sapiens
aagaatggggaaaacgtgttttcaattcaaattaaacaaggagtaacaggcaccgctcctcagtccagaggcctggccctgccaagaaggcgctctccggaatcaacacctgggggcttggaaggatgtttcgctcagatcgaatgtggagctgccattggaaatggaagcccagtcctctcctgttcttatttgctttatatatcatgtgtgttcctcactcagtgtggggatgtgccaactgccgagtggttttgtccaacccttctgggacctttacttctccatgctaccctaacgactacccaaaca

SEQ ID NO: 151441 - DNA, 318 bp, Homo sapiens
ccccgactagcccgacagtgggggggataacacgttcgcgagacccgactagcccgacagggcgtaaaggagggtcccgccgcggcgcagggctggggcgcctgggttccccctgggtggagcagcggcagcagagcgggaaagtggtggaggatgatcttgcggccaaaggggacctcggcgcagtaatgtcaacatgatgtttcgctcagatcgaatgtggagctgccattggaaatggaagcccagtcctctcctgttcttatttgctttatatatcatgtgtgttcctcactcaggtaagactcttcctctttc

SEQ ID NO: 151442 - DNA, 335 bp, Homo sapiens
tcttaatcctgatcctctttatagcaaaacttgttaaagcatccatttggactgcatccacttatcttgttgtactgtctccttaatcaatgccaaggaggctcctactctatcccttttccactgaaactgctcaagaaaattactaacgaccctatcctgccaaatccaacggtcactttcctgtacagattttatttcatttttaacttttcttttttttttttttttttttttgagaaaggagttccggccctttggcagggcggaagggcgggggggcactttggccctatggaaccccccgggccccggccccaattccgaacccgggg

SEQ ID NO: 151443 - DNA, 276 bp, Homo sapiens
aaaaatatttgatttactggtggtagggaacatgagaggagtcactgtgaaaagcatatgtcctgtgaaaatgtcttgtctttggcagctgtcttcttttagtgatcatgaagagttaaaccttagatccagagtcacacctatggagactagaagttgtgcatgtttgagatattgctggccctttataatacccagtcatcaagaacagatagtatggagtagtcttttggctgttgccattaataagagtgctctgtgagactgcatagccat

SEQ ID NO: 151444 - DNA, 551 bp, Homo sapiens
  misc_feature (534)..(534): n is a, c, g, or t
tgggtgggggtggaggggacagggtctcactctgtcacttaggctaaagtgcagctgcacaatctcggctcactgcagcctcaaccaccgggctcaagcaatcttcccacttccaaagtagctgggactataggctaataaaaattagcctaattttgtaattttattacaaaaaatatttttttgtagagacaggtttttgccgtgttacccaggctggtctaaaattcatgaattcaagcaatctgcctacttaggccagccaccacggcaagtctttttttttttttttttttttttttttttttttttttttttttttttttttttttttttttttcttttttttttttttttttttttttttttttttattttttttttttttatttttgtttttttttttttttgttttttaattttttaatattttatttttttttttttatggtttttttaataaataaatttattgggttttgttgtgagttctttttttttatttttttttttttgttttttttttttgttttnttttttttttttttttt

SEQ ID NO: 151445 - DNA, 234 bp, Homo sapiens
tgggtgggggtggaggggacagggtctcactctgtcacttaggctaaagtgcagctgcacaatctcggctcactgcagcctcaaccaccgggctcaagcaatcttcccacttccaaagtagctgggactataggctaataaaaattagcctaattttgtaattttattacaaaaaatatttttttgtagagacaggtttttgctatccctttccttaaatataagaataaggag

SEQ ID NO: 151446 - DNA, 545 bp, Homo sapiens
tagaggatcccgcatttcgtcccatcagtttcttgagttctcattacatctgtccaggctcttctatcagcatcaatcctttcctgatgggagcacgattccatctgtcgtcccatcagcccatctccaaatctgcttctctaagtgcagtggtgcaatcttggctcactgcaatctctgcctcccaggttcaagcaattctcctgcctcagcctccctggttgctgggattaaaggtgtgagccccgcacccagcaaatgctgctatgaatattcacatacaagtttttgtgtagatgtgtgtttttatttctcttggatattcacctagaagtggaattgctgtgtcatattgtaagtctgtttaaccctttgaggtgcctccaggctgttttctaaagtcgctgcaccattttacagttctaccagcagtgtatgaaaattctatttctctgtgttcttgccaatacttgttactgtctgtcttttaaattatcctagtgggtgtgaagtgatatctctttgaggttttgatttgcattttc

SEQ ID NO: 151447 - DNA, 832 bp, Homo sapiens
cttgatctcctaacttcgtgatctgcctgcctcggctcccaaagtgctgggattacaggcgtgagccaccgcacccggccaaattttttatatattctgaatgtaagttccttatcaaatatatgaatcgcaagtattttttcccattatgtgaagtgaagtcttcttatagatatagtattgtgattaataacaaatagttaatttaggagagtagagtacaagctgtagcagtgggagtttgtcagcacacgcttttagaaggtttcttccactgtatgaccgtgtattgatgaaaggaatgtgcctgaaactgtaaccaaaggagacatgcttccagaaaaatctcaaggaaaagtattgtaagcaacagtagatgttggatcagcactttgggaggccgaggcaggtggattatgaagacgggggtaaggcagaagtactggggatatgttgggaatcgttgactgactaaatgcataagtaagtgaaacgtaaagatagaatgcccagacaatcaaaactaggagacaagtgagatagggacaataaataggaacacaagcaccctcatagacaaatcgatggcaccacgcgcacatggcgccgcggacacgcaggaacggcgaacacagcaagcagagagagcgacaaccaacacacacccagacccacgcgaacacaaggggggcggaatcaccgaaacaacccgaccacagcggtccagagagcactgaccagcggagagcaagacacgcggcccacaagctccctctgcgctcaccacaacacagccagacaccacagagccaggacacacagcaggaagcac

SEQ ID NO: 151448 - DNA, 723 bp, Homo sapiens
cttgatctcctaacttcgtgatctgcctgcctcggctcccaaagtgctgggattacaggcgtgagccaccgcacccggccaaattttttatatattctgaatgtaagttccttatcaaatatatgaatcgcaagtattttttcccattatgtgaagtgaagtcttcttatagatatagtattgtgattaataacaaatagttaatttaggagagtagagtacaagctgtagcagtgggagtttgtcagcacacgcttttagaaggtttcttccactgtatgaccgtgtattgatgaaaggaatgtgcctgaaactgtaaccaaaggagacatgcttccagaaaaatctcaaggaaaagtattgtaagcaacagtagatgttggatcagactctaaagtaaagggtggagagttaaccagttaacatgtaagttggagatagagttctcccagaatatgtaggcaccaaagtagttctagacaacaaggattacttctcatttaaagatggtgacattcttgcaaactatatagactgaaataaatcatattgaaatggcatcaacatgaagctgcccattctgtaattctgaaatcttctatcatgtaaaataattttcatgtctttcttttgtaataaactaatgatatctaaactaatgatgcccagtgtttctaaaatttagttttgctgtattgatataaacatttcctaataaaaata

SEQ ID NO: 151449 - DNA, 232 bp, Homo sapiens
ctgagcctcctcttttctttctcctgctggagacctctctcaccagacactcaggtgtaccagtacagcagctttggacctaagtggactccagcagctccattaacccagagcttgcaccaacccagaatttccaccaagccagagtttccaccaagccagggcttccaccaatctagaacttgcaacaatccagagcttccgccaacccagagcttccgtcaatccagag

SEQ ID NO: 151450 - DNA, 361 bp, Homo sapiens
ctcagactatcctctgggctactccacaaacagcaagggttacagtcgcatgccaccacacctggttaattttttatttttgttttttagagataggggactcactatgttgcccaggctcgcctgaaattcctagcctcaagcattcctcccagctcagcctcccaaagtgttgagattacaggcgtgagccaccatgcctggcaagcttcatcatttctaaaatgtaactgtatattttagagtagcataggagtggtgtaagggttaaggattaatgatactgcaaatcaagtgcttaacacaaagtttaatgcataggaagaacataattgttattatcaatgtgagtagactgttt

SEQ ID NO: 151451 - DNA, 430 bp, Homo sapiens
agacatccatggaatataggttaagaacacttaatttgaaagaatagaaatattaatattttagacttgcatatcaatatgtagttttcaaaaccctctcacatcttattatctcagcatacattttaaataggcaaagtagatatgattatccctattttagaaatgatgacagaccttaggaagtagagacacagatacatcctttgtagtattactttatgtacttgaaaaggaattaattggtttctcttggccttgatcctctttaggataaatagatcttctgtcctccccatgagtcctgtttttcttaatatattacctgtctcttcttaagagccttaagttacggaaagcagaattagacccagttttctttagaccctgttttgggtgtaaagaaagatcacctcagctgggcgtggtg

SEQ ID NO: 151452 - DNA, 411 bp, Homo sapiens
tatatatagaaagataactattgagtatttgaatggccagggttctagacttgagtcatctgtagacaatgaatagttgaaatcataagaatagtaaacagccatttactaaatcatactaaaggagacatgacgagaaaccagtgaaggaaacacagtgggataccgtcagccaagaatacagtgagcttcagtctacccaatctacttcatagtcatccaaaaagaaacagattatagagaattaaaaaatatatgcttatatgcttaaggaggttcctggtatcagtctgaaaggaaccattatatttaagtagctcaggggttagtggccttgcctggatgtcattatttgcttccttgcagttcccagggtcttccagcatctatctctggagttccagtttcaac

SEQ ID NO: 151453 - DNA, 342 bp, Homo sapiens
tgttgactaaaaataatgttcccttcttgccattagcatcttccaatcctagtcctcagaagcaactgctgccaacactttagaataagaccttcagactcctgtcctatttatcaacaaatatttttgcacatacatgcatgtatatggatatgcaaatgcactggtgtatacatacgaatacacagaagtctaacttttgttattaatcacggggaaaaaagtataaaaaagagaaaagatagattgaagcagaagttaaagacatattgggtctcctgatacccagaaaataacattgaattgaaaagaattgaagaaaaaatgttcaaatgaacatat

SEQ ID NO: 151454 - DNA, 299 bp, Homo sapiens
aagaactcttgactttccctctgaaacctgatacgcacgccagtcattcttgggaaatggtaacaccattcactcagctactaataaaaatcagccgggtgcggtagctcagcctgtaatcccagcactttgggaggccaaggcgggtggatcaggaggtcaggagttcaagtgatcctccctccttggtctccaaaagtgctttgattacacgtcgtgatccctcgtgcccgtacgttatttagttttaatttcgaagatgcgggtctcactatgttgctcaggctggtcttgaactc

SEQ ID NO: 151455 - DNA, 694 bp, Homo sapiens
gaacctactatgtgccaggttgtggtctaggctctgaggacatagcagtgaaaaaaacagaaaggattcctatcttcaagtcttcatggagcttactttctagtggggaaagacagacaataaacaaaataaataagtaaattaaataatacattagttagattggctgggcgccatggctcatgcctataatcacagcactttgggtggctgaggtgggcagatcacttgggttcaggattcgagaccagcctggacaacacggcaagaccctgccactaaaaaaaattataaaaattagccaggcttggtggcgtgcacctgtagtcccagctactcaggaggctgaggtgggaggacgacttgagcccaaaaggtggaggttgcagtgagccaaaatcacgccactacactccagcctgggcaacagagtgataccctgtctccaaaaaaataaagaaagaaagaatacgttggttaaatagtatatagatggggcacatgtgtttttttaaaaaggtgacccagaaacagaggatagagagggctggaactgtcaggaaagacctaacatttccaaggggactttttgggttttttttgatcagggtctcactccattgcccaggctggagtgcagcagcacagtctcagcttgctgcagcctcaacttaccgggctcaagtgatcctcc

SEQ ID NO: 151456 - DNA, 433 bp, Homo sapiens
caacatagtgaaactccatctctactgaaaatacaaaaatttgctgggggcagtagtgcacctatagtcctagctacttgggaggctgaggtgcgagaattgcttgagcctgggaggtcaagatttcagtgagctgagatcatgccactgtactccatcctgggcaacagagtgagaccctgtctcaaaaacaacaacaaataatccagccattacctaaatgccaagaaataaaagactgatgtataaaaacaggggcctttggtgtgatggatgcattagcatttacaactgagtttcctgctctagcctaacctgccctgcagacccctgtaagtcctccccaagtatttctggacttcctctaagttctcccacaggaactcataagtcagactattagatataatcacatgtggaatttgccttattc

SEQ ID NO: 151457 - DNA, 226 bp, Homo sapiens
caaatatgtcacatatctgattgaatttccagaggcttctttcttgtacgaccgggtacaaaaaggaatgctgcatttctaagatgatttgcttaacttttaaaattcctttctataatcactgctgcattctggcattagttccccatttgagattttccttccagttaaactgtagtactacagttttatcctgttcaacatttctattacaaactgaaatact

SEQ ID NO: 151458 - DNA, 545 bp, Homo sapiens
attcaaaaacacctgtcttaggcattcgtgtttcttatgagtttgcgagagtccgagtgaaggggaaggacaggctgtgttacacgtagcactcaaatcttcgcttctaattactctcctgagattgcttgtacttcctggcccttctgggattgaggacttgctcattgtttgaatcttggacctttattccttcggaattagaaccataggtccccatgggctgatctcccatgtccattcccttctgctgtttgcgcaggtctaagacaatcacctcttccctcctcccacctcggtcttatctgtgacctcctactacctgaaatttgtaaactattatatacttttgttacaggaactgggtcctgctcaagaccccaagagagggttcttggatctcggacaagaaagaattcagggggagtccataaagtgaagtgaaagcaagtttattaagaaagtaaaggaataagagaatggttactccatagacggagcagccctgagggctgctggttgccgtttttatggttatgtcatga

SEQ ID NO: 151459 - DNA, 307 bp, Homo sapiens
cagtggaactcattgtgtgtgtgggtgggaagcgggggctagtgcacatgtcgcggctacttccaaggacatgagtacaaggacccatgtgagcattgcccccagtacctgccacttgatttggcaagcgctaaccaggcctttggagctgttggctgggttggccaggagatggatgggaggtttgacaggtgactccgcaggtcgctttctgttccaggttggtgctggggaggtcaggccaggtgttccttctgaaagggagcccggctgtggtacagaaatagtgtcctcccagcccataatc

SEQ ID NO: 151460 - DNA, 416 bp, Homo sapiens
tcatcgctcggtccgacacttgatgttcccatccggaagaacgtggctgtgggttgacacaggactgggcacatggcctcgagcccaacactctagaggtatggcagggattctcagaattcctgaggggcctgtgggcagttttcaaagcccccgaggtctgtgcctcccacctaacccccattgggagtgctgcgtggatttcatccgaacacagcagaggctgcgtcctgggttgtcggtgtccccaggtccatcatcctctggctgttttcctggaccctaccgggctcacccagccaaggcttgcacttttctaggccaaacaccaactggtgaccgtgcgtcacaggaagcccaccccagggagcaaggaggtggtgtctcccacatcattttctgcctgagtcagtcgg

SEQ ID NO: 151461 - DNA, 119 bp, Homo sapiens
taaatctgggatgtgcagagctagggagtgtttggggatgccagtagagaggtggtcacgtttataaaagcagaaagtaagggcgcttcctgattggtccatcagagtctgctggtgac

SEQ ID NO: 151462 - DNA, 469 bp, Homo sapiens
ggatttgccttcacatccatccaatatgggcccaagtgtcagctttgctagtttctcacttatgtgatcccggacaaattatttgacctcttgttgcctcagtttcttcgtctataaaatgggccagtaataactagctgacaaagttatgtggatattcacaattctgtgtatagaatgccgagcacagtgctcatgtgacatggtgggaggcaagtaacatttactggctgtctatgatactgttgggccctgcatgagatgcacaggatgtcacttacaaaaaactcaaaatggtggccgtgatcactcccatttcacagattagaaaaccaaggctcggagaaggtaagtaacaactctgttagtaagtgctgcataaggattcaaatccatctctatctgcttccaaagactttgggcttatccagaatggtgtagatagtgtgggggtaggagcatgctgggg

SEQ ID NO: 151463 - DNA, 301 bp, Homo sapiens
gtaacactggttatggctgtgatttatttacttgtgtgatttcatttctgggttcccctctgtactgggaaatccagaaggccagcatctgatacacctttctggttaagtcccacagtgcagtctgcaaagggagcaaccatcctggatttagggggtaaaaaaaaggtacaggccttacctgttctttgtctgtagcaacatcacctatgactaagacctggtatgttgggaatcaggaggctgtagagtagatctcatacttagtaactgctatttctactggccaccaagccatcaa

SEQ ID NO: 151464 - DNA, 306 bp, Homo sapiens
catacactcagggtgggaatagggggcctgatggtggactgcagtatgtcctggggatccagagagctcctccaatgtcacatccagtgaccccacctggaagaggcttacttggttggggacctattaaaaatgcgtggaaggagatcgaaaagtggcataagagacctatcagccaattgcaatatatggacctgacttggatcttaaattgaacaaaagaattaaaatgggaaaaaaagcaggaagacaatggggaaattgaattgctcttgaggagtactgttttaagtgtttccgttgtga

SEQ ID NO: 151465 - DNA, 475 bp, Homo sapiens
gggaagggccactgaggatactcacaactgtggtttggtttcagcaaaacacacattcttctattgtggggtataatcactcttacacactcataacctgtatgttagtttcttaggcaaagaaacactcttcgcacagggattgctcacaactctttccatgccaagaagcatgtgaggaggaggggatggtgtgcactcctgttgtggacggtaacagaacctggaaatcaatgctttgaggggattttattttgacagctttcactaactttgtttttatactttcctaagtctagaatgagaagagcctttaagttctcactgatcctcaagggaagaaaagaagtcccctgtgaggggaacacagcatcttctgagaataccttttccaactgcagccatcttgcctctctcaccttccataccacagtgctgatccaggtacctgtagagtgctccatcacgctggact

SEQ ID NO: 151466 - DNA, 394 bp, Homo sapiens
atttgttgaaaagattattctttccttactggcaggtcgtgacacccttgtttagtgtattgtatctcttatgcagagcatacagtggaatcttcacttttttatcctgcatgacagtctctacctttggctgggttaatttatgtacatttaatgttattgttgatatagttgcatctatgtacaccagtttactttttctttttctaaatgtttcagggttttttttctcaagtctttcctcatttcttttactttaaagcagtattttctttggcaatatttagttcttctaatgtcattttcacaattttttttttctttttggaaacagcatcttgctctgttgcacaggctagagtgcagtggcagaatgttggctcatggcaaactc

SEQ ID NO: 151467 - DNA, 111 bp, Homo sapiens
gagtttctccactgctcgccatgtccaagccataaatacttgatctcctcctgtcatgccagcttaaattaacataccaggagcttaactgatgacaagacaaacacgaat

SEQ ID NO: 151468 - DNA, 462 bp, Homo sapiens
gtgctgggggcggggcagggggtgagaattttaacagaatattggagagacaaaatttttctaccgttcatatatatatatctagttgaattatttcaagatttcaaggtcagtattgtccccattttataggtgaagaaataggcctagaggtactaaactttacaacttcaggtgagcaggagataaacaggtaggattcaaggcttaccagtctgattcctgttagaagaaaaacttcagctgaactaaatttaaaggagttaaactgagcagtgaatgactgggcagcccccagaatcacagcagattcagagagactccagggatgcctcgtggtcagaacaaatttttagacaaaaagagggaagtgacgtacagaaatcagcagtgagatacagaaacagctgcattggttacaggggggcgtttgccttatttgaacacagtttgaacaatcag

SEQ ID NO: 151469 - DNA, 181 bp, Homo sapiens
tggccggcctggctggggtggcattcactttcttggctctctggctcctgcgcccccaggaagggtagccctgggcttccatggtttctctgagaccccgaggcccagcccaggagggccctctttgaacgactttgtaactagacatccaccccagccgtgaccccgtgacccagagaca

SEQ ID NO: 151470 - DNA, 318 bp, Homo sapiens
cgtggtcagacccctcatcaggttcacgctggccccttgccagtctttcactaaaagcacgttctttgttgtctgcacacctgagaagcatcacctcccccagccccatagctcaggcaaccagcagggctggtagggtgatggtcaggaacagttttcaggggctgagaacttgataatggatttctttctgaagcttgagaagttgtttctagatgggacctgcagtattctctggatctcactatttagacttcacctaaggatgccaggaaacttggaaagatttgacattggtcactccagcagcttcattaa

SEQ ID NO: 151471 - DNA, 396 bp, Homo sapiens
ccttctgttccctggcacagggcatccccttagaagtagtgcatgaaattcacacagctgggacctggcagagaatacaggtggcttgactgaggcagggaggcctccatctgcaggtggcctgagagcctgcagagcctcacagtggcactaggtggcactcccacccaagggagtcctaacagagtgggaggcgtggaaataaaggactccatggcctgaaggaaataaatacaaggtaggaaagtaaatttccagacaattttttttccctaatggaaattcacttgtaagtgattgttcaaaatccagaggcatttccccactgaaaatatgtgtggtggaggtctggttggaaggtggggtagtgctaatctcggccaacttgtgggctgg

SEQ ID NO: 151472 - DNA, 451 bp, Homo sapiens
ctgccctgttctcaggacagctggagccccaatagtctaaagtgaattacgacagaacagcactgggctgtgaatatccccaagcaggaaaccaccagggagcccaaggctttccccgtgttccatggcttctgttgatcatcagttggaacacagcactcccatagcagcaacttccacttgctatttatttacattgtgatataatgacacaccataaaagtcaccctttaaaagcgtacaattcagttttttagtatattcacaaagtagcgccaccatcaccactgtctaattacagaagttacctccatttgcaattctcaccaataggcccattccagagcctgcctcggagcagaagcttgagctcgtacttcccaaagggctacccctgcctcgcagcctcgcggaagccttaatgctgagtgccactagcatcttcctcttt

SEQ ID NO: 151473 - DNA, 524 bp, Homo sapiens
gagatgaacccgtcgtgcccagctggagtgcagtggttgatctcggctcactgcatcctccgcctccgtggttcaagagattctcaaggttttcatgttttaaaaaattcccagaaccccatataagagttcttaaatttactcaagctgcagaccattcttagaatcacagacccctcaaaataactatggcaccagaaatttatggtttatgtcttgaatagcttagtacttttgacaactatactaggaaatgaaaagctgctactgtcccatttaaaaataactgagatttttaaaaattggatgtgtattttcaactctggtttaagtgtgtatttgatgccctgatgaaaacaaattgtcatccttaactttgagatatttaggttaaaggagaataatattattaaatatttaataaatatttttggactcaaggttataggaataaggttaagttatttcaacacagcagagatagtcggaatgaatccagactttgaggagtacttttacttgaa

SEQ ID NO: 151474 - DNA, 326 bp, Homo sapiens
agaacacagatgaggaaggacatttaatgatgaaaatacagcatgaacaaaggaattatttggtttttccttttcttagcactgttatagtatttcctgttaatacaactcactttgtctcctaactataacttgtattgatagtattattatatgtgtattacatgtgtagatgtcatgtttctctgtataaactatatgtttacaaagtatacagatgtctaatataagtcacttattttaccaggtgctggagatttaccatatatgggtgattaacccattaacagtgtatgaaaaagctgcaccagagcatgtacaaagta

SEQ ID NO: 151475 - DNA, 249 bp, Homo sapiens
cctccaacatgaaggcatctttgttactgaaacaaaaataccacagcaggtggtagactcgaacacaggagggaggaggaggttcagttgttgcccatttttctaatcctttcagaatacccattgtctgaaccccaaagttaacatgttcctgctcagtctcatggagacaatttcagcgtgaaagggctgtgcccatcactggttttcgacaacagtttaatctttgggtatggaatgtgtaaccac

SEQ ID NO: 151476 - DNA, 527 bp, Homo sapiens
  misc_feature (99)..(99): n is a, c, g, or t
  misc_feature (454)..(454): n is a, c, g, or t
taggctgaataaaggcctccaaagatgtccccattctaagccctggaacctgtgaatgttactttacatagcaaaagggactatgcagatgtgactaangaatcttgagacagggagattttcctggggattatccaggtgggccctaaatgcaatttcaagtctctttataagagggattgagaaggaaacttcatcaaagaacaggaaaaaatcagtgtgaccatagaagcagagattgaagcgatgtggtcacaaggcaaggaatgctggcagccaccagacaccggaagtcaggaacagattctcccccggaacctccagaggggagacagccctgctgtcaccttgattttaagccagtgatgttgatttcagactctggcctctggaacttcctttcagaaattctctagagcctgaaaaagtcaccctgccgaggatcaacttcttncaccccagaacaaggcagagcagaaggatggatctgagtgcaaacaggtccaggaccagcacaccatatggta

SEQ ID NO: 151477 - DNA, 200 bp, Homo sapiens
acaggggcaaactggcgggtaccaccttgccaagatacccctccccagtaaagcaccgggcttgcctttgagtaagtgtctgctcccttagcaaaaccctctgcaacccaactccgctcgctgctcaaggcgccgggcagcggccagtggccagcacacctgcctccacttgggattccgaaggaaatgacaatcgggtg

SEQ ID NO: 151478 - DNA, 512 bp, Homo sapiens
gatggcgttctagaggatcccgaaaactgaatgaggcaggcgcaaagaggacagaaggtgttggttcaattcatttgccaggtactgagcacctattgggtttgaggcacagggccagtgccacctccaggagaataacaatctggtttgggagacaggacactctcttcttagaaatcatctaaaactctgagacagcaggagagatggttcagaaatgaggccgtgagcactcaggagccagtcaatctcaacagaacgaagcccaggcagacttcctggggaggcagtttcaaggaggtctcagtgtggtttggctgagaggaggttggtgggtattctgaaggaccaaacagcagaaatgcccagggagaaagggaagcggtgagagaggaaggaaggtagctgtgagatgcttgcctctgtgcctccaacatcccctaatgcgggaaattataatttccattttacagacaggttcggacctttgtcagggtcacacacagccagga

SEQ ID NO: 151479 - DNA, 417 bp, Homo sapiens
gggaggggcttgagcaaaacagaactagccctgccagctcgaagaactctgggcacccaggacacatcggagtggcagaaagggtcctgttagaactttgttagcgggcttggcactgtgctagctttgcccaagctggctctgaacacatgatgcccactaagacataactctcaagttggcatctgtccagcgtgttggagcgaggtcaggaaggcagggcaatcccccttttccctcccaagggcttggcggtggccccccctcagcatgaccttgtcctgggttctaagggttgggaagttctccctcactctgccactctgcgtgtctgggaccttccttgggctctgacaggcccaccaaaagagctccgggagatgagagatcggctcccccgcagctcccacagccctt

SEQ ID NO: 151480 - DNA, 377 bp, Homo sapiens
tggcgtctagagcgatcccgtaacgtctacttgctctactaaagtaacctattgttctttagaactgaagaccagaggctgtgggacttcactcttatctgggatgtggtgctgacatgatattcccaaaactctttctgtctgtctccctaactctcagatttactttcctctgtgggtgttaatctcaagcagatagcaaaggtagtttctgctctaagctcatgaagttttacacttcctaacgagagaggaagacagaggcatgctctctcccagggtctacatgtgaaatctcattcagggtttctggttgatccagcactggtcacatggcccagccacttggagtcagttgtgttgtcagggcctgcacc

SEQ ID NO: 151481 - DNA, 596 bp, Homo sapiens
atctagaggatcttcagctgatagcctcccagaccatcacattcgttccctcctctctgccaggaagggcaccaggcacccacggggagtgtaggggccattagagtctaatctgctcagccccctgtgcactgcagcctagacgccagcttgagctacagagggagaccctgtcgcatgaaaacaaacaataacaacaaaaaaacaagatacttagtctctacaaggcacagtgtaaaatattgttgtcttcatctagaaggaaggaaactaataggtcagagtacatttaaaacttccaacaaatagatgaaacataacgcataagagtgtgacttcacagaatacctcccacttcagcctcccaaagtgctgggattacagggcatgagccaacaaacccaggccaaactgaaacattcttgaaagagaaagagggtgttcaaatgattacataatttggttgaaatatttgttcatctgttgaataatttgtacatatttacttatttaaaaactattttcaggctgtgcacattggctcccagcactgttaacccagcattttgggaggctatcaaggcgttggataccga

SEQ ID NO: 151482 - DNA, 927 bp, Homo sapiens
atctagaggatcttcagctgatagcctcccagaccatcacattcgttccctcctctctgccaggaagggcaccaggcacccacggggagtgtaggggccattagagtctaatctgctcagccccctgtgcactgcagcctagacgccagcttgagctacagagggagaccctgtcgcatgaaaacaaacaataacaacaaaaaaacaagatacttagtctctacaaggcacagtgtaaaatattgttgtcttcatctagaaggaaggaaactaataggtcagagtacatttaaaacttccaacaaatagatgaaacataacgcataagagtgtgacttcacagaatacctcccgggggacacaggacctgagtgctgcatgcaggaggtggtggacaggtggggacagacagatgtgtggaagagtatgtggggcagatgaactaggctgaagagagaactgggcagagccttcttcacacagccttttaaacatttttttgcagctgggcacagtggctcacgcctgtaatcccagcaccttgggaggccaaggcaggtggatcacgaggtcaggagattgagaccatcctgactaacatggtgaaaccccgtctctactaaaaatacaaaaaattagctgggcatggtggcgggcgcctgtagtcccagctacatgggcggctgaggcaggagaatggcgtgaacctgggaggtggagcttgcagtgagctgagaccgcaccactgcactccagcctgggtgacagagtaagactctgtctcaaaaataaataaataaataaataaataaataaataaataaaataaaaaatttgcatagataatctttttatggttaaaaaaaaatctaaaacatatacagtgaaagcctttcccattcctgttctccctctaccctgttcttt

SEQ ID NO: 151483 - DNA, 344 bp, Homo sapiens
ttataagtttacctccttttctctttgtccctaatggctaggcccacagactttctcatggacccaaacatcttgtaaccacaaggcccttagaccctcatcaataacctatctcccccaccaattcctttgtccatatatccatatccacaaaccctgtttaaggacaaaggcaagaggcaaagatctgacatatctccatccctttctgtgaatatctttcacttctattcctcccccaataccaactgtgcctgaaaatgtgttcacttagtgccagatctttttctcatgatgcgcccatctgtctttacaaatacgtctaggtactgtattttcttctt

SEQ ID NO: 151484 - DNA, 802 bp, Homo sapiens
ctgccaattataaatatatttgcatccaacattggagtttctattatataagcaaatattaacagatgggaagagagagatagatagcaatacatactaatagaggaatttgataccccactctctatgatagatagaacatccagacagaaaatgaataaggaaacagtagacttgaataacactgcagaccaaaggaccttgcagacatatatagaacatttcatcaaacagcagcagaatacacatttttcctccaaatacacatggaacattctctaggacagatcaagtgttaggtcacaaaataggtcttaacaagtttaagaagactgaaatcatatcaagtatgttttctcaccacaatgatacgaaactagaaatcaaaataggaagaaaattagaaaatgcactaatatatgaaaattaaacaacacattcctgaacaataaatgagtcaaagaagaaataaaaagagaaataaaagagtagcttgacaatacaaaaatggagaaagactgtatcaaaatttatgggaggtagcaacagcagttttaagagtgaagtttatagcaataaatgcctacattaagaaaagagaggccaggcacgggtggctcacgcctgtaatcccagcactttgggaggcctaggtgggtggatcatgaggtcaggagtttgagaccggcctggccaatatggtgaaaccctgtctctaataaaatacaaaaattatccgggggtaatggcatgcacctgtagtcccagctacttgggaggctgaggcagaagaattgcttga

SEQ ID NO: 151485 - DNA, 715 bp, Homo sapiens
  misc_feature (352)..(352): n is a, c, g, or t
  misc_feature (393)..(393): n is a, c, g, or t
  misc_feature (395)..(395): n is a, c, g, or t
  misc_feature (413)..(413): n is a, c, g, or t
  misc_feature (415)..(415): n is a, c, g, or t
  misc_feature (436)..(436): n is a, c, g, or t
  misc_feature (439)..(439): n is a, c, g, or t
tttaatatttagtttcctcatctgtaaaaaaagatattgtaatatctacttcataggacagttataaaaattaaatgaggtaatccaatgagatactcatcagcacagggtctggcacatattaattatctattatatggtagctatgacttaatcagttctacgaggcttgttatgaaaaacagtatacacatccattttcctctccccagaggcagattggctgcttttgaaaaataaaccagcattactttgtcagggataggtttagcatgaaagcagtttgggcgtaagcctgttcaaattaaaaaatgataaagctttaaaagtgattacaggcatgggccaccangcctagcctctttgttgaacttaatattattcttctttatntncgctttctcagtgaagcntncttcctcatcgtttccaagtngtngtgtttcggtaatctgattatctgtcatttcagagtccctgtcctcccactgagccacatgcgcacacacatctctgtcaggcacccctgtcatgtaaggcacgttgggtctgccagagcggcaccccttgttccaactttcaggtttaatgcttgagaacatttgaaggctgttgtctggaaaagataagtgtttttatatttctttgaattttaggagttgtctaccacaacaaataaactagatcacacttttttttctaataaattggggcc

SEQ ID NO: 151486 - DNA, 248 bp, Homo sapiens
aaaaaaatgaacatttgtgatctcgcacggtttttgcaggtcaggaattcacgagcttagctaggtggttctgactcacactccctcatgagcttggagagaagatgttggtgggagctgctgtcatttaggggttatctggggtggggggatcttcctccaagctgcctcactcacagagcaggtaagttaatgctggctgtgggtaggaggtctcgggtgctcaccatgcagacttttccatgggg

SEQ ID NO: 151487 - DNA, 436 bp, Homo sapiens
gcggcacgtatgtggcatagctgattctagaggatccctgcttgcatcgactgagctcccgcattgccttctgccatgagtaaaagctccctgaggttcccccggcagccaagtgatgtcagcactaagcttcctgtacagcctgcagaaacacgagccaatgaaacctcttttctttataaattacccagtcttgggtatttctttacagcaatgcaagaacagcctaatacactgtctttaaacatatctataatgttatttggaaacattattataatgtaatattagtacttggccatgaatcatgttaaatatcatcttccttttacataaaccttaagatgaattttcttggaaccttcttttttttttttttaagtaagacggagtctcactctgtcgcccaggctggagtggagtggcacaatctcag

SEQ ID NO: 151488 - DNA, 274 bp, Homo sapiens
caaaggtttgcattgggtagacttttcataaacatttgttgaactgtacaattcaattactttttacaaatggttgtgttcatttaatacataaagattaaatgactgtatttttcttgttcagcaaataaatccaagattctctgtaattataatgaagcaattggttgcttggtcaatttggtgggaagaagagcaaaactggtggcctggtttcattagctggtgaaagccactaacacatttatcaattagttccaaatagtcacagcct

SEQ ID NO: 151489 - DNA, 264 bp, Homo sapiens
gttcagtcctttcatcttacaaggatctaagtcctcgggaagtctccactttcacagtgctacacagttgctgtgtatctaaacagggctgagcctggtggcatcttgcgtgcccacccaactagaggggctgctggagctggaaaggaaggagaaccaccaaggtggggatggacagggagggcctcatgtttgctcaggcacattctgccttggcgtcaacccagcttttgtcttaataaaataaatcctacccacagagca

SEQ ID NO: 151490 - DNA, 418 bp, Homo sapiens
tgacttactgcaatctccgcctcccaggttcaagtaattctcctgcctcggccacctgagtagctgggactacaggtgcgcaccaccatgcccagctaatttttcttcttttagtagagacagggtttcaccatgttgcccaggctggtctcaaactctcaactcaagtgatctgcctgcctcggcttcccaaagtgatgggattacaggtgtcagccatcgcgcctggcctctgcagagaattttttaaaagttctatgatatagaatgactcagtggctgctctagattgcatggttagggaaggtctatcaaatatcactaaataaggtggcatttaagctgagattttcttgacaagaaggaacaaccacatgaaggtccaggctggtgcgtgtaaagacccaggggtccaggg

SEQ ID NO: 151491 - DNA, 1288 bp, Homo sapiens
caggaacattgagacacataattttatagtgaagcatctcagcacaatttttaccaataatacttagcagcctaaaagaaacagggaaattggagactgtaggaagtcagggcatggggagaaaacgtagctatgaattcgtagttgaaatggtagacactatgtattctcaactgcaaggagaaaatagaagccaaaaagactaaatatataactaatccagaggcttttaaaattctgcttctttcttagtatgtattgtcatgtatttgtttatcttccctttctgtatgatactatgtcttacttgtgtttcacaaatgtgagattcctgaccttttataagaaggtaacaaggcatttttcaaaaagcctttttttggagaggttaagtgggatggtagagtggattaagtggaacaaaattccagttttttggcgagaaaatattttttagtctaaaatccctctgagactcactacaaactaatttctttctgtcattcttcttccttcttttggtttctctataactaaatttagtttaaaattaagttatctataaaggcagcctttccatgatcgttggagcacattctgctcatgttagaagttcattgttctttgtttttagttattaagcacatacagtagtccccccttatccacaggggatacattctaagacccccagtggatgcctgaaattgatgatagtactgaaccctatatatactgtttttcctgtgtgtacatacctatgataacatttcatttataagttaaagacacagtaagagattaacaacaataagaataaattagaacaactataataatatactgtaataaaagttgtatgaatgtggtctctctttctctcaaaataatcttattgtatcatagtcacccttcttgtgatctgtcgatctgataattgaggtgactactaagcgactaatgggtggatcatgtcaacagcatggatacactggacaaaagcatgagtcatgtcccgagcaggatggagcaagatggtgtgagatttcatcactatactcaaaatggcccacaatttaaaatttacaaattatttatttatggaattttccatttaatattttcagaccacagttgactgcagctaactgaaactgggaaaagagaaactggataagggggactactgtagtatgaaggcaagaaaatttcaggggaaaacaagtggttattttctggccaaatgtgatacattttctctcttaactggatacagttaaaaatagga

SEQ ID NO: 151492 - DNA, 720 bp, Homo sapiens
ggcagctgaatttgcaagaaactccttggatggggttaatggcagctgtatttttctgggagctctgctttaattggacaaagtaagttgtggtaagatttcttcttttatcttcagtatctcaaatgttttcatttaaataatctttataacaacttttgatgtctgagtggattcccatacagtcatctattgtaagactttctgattccgtttttttcctttggtcattatgaatagggcttatgtaaataattgcatggtagcttttgattggaagtaacatcaaagtagttgtcaaaatacttaggaatgttatttttggattgtaaggtgagacttgtttagctttggaaaaaaatgcccaacttgtaataggggaggaaaaataattttctgtttttggaattcttagatgggatgctctgtaaaaactgacagattaaaatgagaaaaacagaaaagttgaaaaacacgtataccttatggttacatgggagatattcagggaaaaatgagtaaatctccaacaggtggctttcaattcaagcataaatactgtcttcaacttaaagaaagaagatttgaggtgcagtattggggagttaaccagcaaaagcacattagacaagggtaaggttcattatacagacttaagtccatgcattctccattgataagactctttagtgatttagttatccttctcttcttggtgtc

SEQ ID NO: 151493 - DNA, 339 bp, Homo sapiens
gctctctgcttccagtatgctccagagctttctccatgctgacaggggacccatctactgccaccccggtttccaccggagcccatccaagcagcagagctgccaccagaggtgccttctgccatgattgtaagtttcctgaggcctcctcagcaacatggaactgtaagaaaattgaggcccaacaggactagttaccctatatgcctgaacataaaacaacccagaatacaatgtgatccttcgatatccatatgggaagacatatacaataaaaatgacgacaagagcctgacttgaaaatatatactaataaaaaaataaattttaaaagttaaa

SEQ ID NO: 151494 - DNA, 283 bp, Homo sapiens
gctctctgcttccagtatgctccagagctttctccatgctgacaggggacccatctactgccaccccggtttccaccggagcccatccaagcagcagagctgccaccaggtaagaaaattgaggcccaacaggactagttaccctatatgcctgaacataaaacaacccagaatacaatgtgatccttcgatatccatatgggaagacatatacaataaaaatgacgacaagagcctgacttgaaaatatatactaataaaaaaataaattttaaaagttaaa

SEQ ID NO: 151495 - DNA, 235 bp, Homo sapiens
gaatgagaatatatggtccaatgaagaagaagtaagaacaagaccaccaggagacacctaccatgagtagcacttacctcttatgaggtttataaatgttcatatatgtaaaatattgagcatagcagatgctcaatcaatattagatgcataagacaatgcaattaaacagactcagttcaccttcaatatcaactaaatattcatatttaaatctttaagacatctaacatac

SEQ ID NO: 151496 - DNA, 252 bp, Homo sapiens
ttttaatgattagctttaaattctaacagccgatccagatggaactcaagcctattcttccttccctctccacagaagagaaagttctagccaggcacagtggcttatgcctgtaatccaagcattttgggaggccgaggtgagcagatcatttgaagtcaggagtttgagaccatcctgaccaacatggtgaaaccctgtctgtactaaaaatacaaaaaattagctgggcgtggtggcacacacgcctgt

SEQ ID NO: 151497 - DNA, 620 bp, Homo sapiens
cagtcgacggatactctcttcgacatatcgaacctgtttctacatcaggctccttgtgttatttatttttgggtcaggaagactgccctgctcattgggaggctggggtggcagagactgctatgtgttcaccaaagcccatttcctccttcacttcttctgctgcaggtggtatggctttgagtcctggtcagtggactgtgggaagaggcgacataagcctcttctaggcctggtccttaaaaccctcctgcaggttcctctgcactctccaaagccccacgcccactggctggacacagaatgttgagcagtggagctttggagagtctccgtcgaacttgatcatatagaaaagctctccaaggcaccagtgagaagaacttgaaatcaaaaacacaattatcactgctgccttggagagtctccgtcgaactagttcgacggagactctcaattatttgtgaaattttaaatgaatagttactataatcacaaataatggagagtcaacttctttttcccaaaacatacatggaaggtctgtgtgtgtaagctctgattttcaggaaccctatttctggaagcagagtaactggaaatactaagtcaagatctga

SEQ ID NO: 151498 - DNA, 243 bp, Homo sapiens
ggatataggggaaggtttgggctgcagggacctaagtcgttggttaggggttggccatggactaatgctccttctccagggcccggtagatgaggatcacccctgtgggttcctgtatcccagcaggcatacaggagaccaggagacaaatggggaatagatgatggggcctgaggccacatagtttatcttcattttcagataaggaacctgaggtaaagagacagagagaggaaggggagg

SEQ ID NO: 151499 - DNA, 386 bp, Homo sapiens
gggactgtagccttttctcaggtgagacgtggaactttttacattcgagttaatgctgaaatgacttaagacttttggcaacttttgaaaaggcatgattgtattttactctgtgagaaggatatgatatttgggggatcagggtcagaataatatggtttagctgtgtgtccctacctaaactcacatgtaattgtaatcccgaatgttgcaggtggggactggtgagaggtgatttattcatggatgggagaggggtggggttggaagtaaaaacaggtgggtaaggtggggaggagtaggctggctgtagggtggtgtgtagcaggaagggagtagcctgccacagaggcagaggctcatggaaaacctctactaaggcagtg

SEQ ID NO: 151500 - DNA, 261 bp, Homo sapiens
cattatagttaagaacaagggaaggagaaaatttgtgtatgttcatacatatccgtatgcatgtggaactttgtatatgtgcatggtcatcagtgtatggatatgcatccgtgtatttgtgtgtgcatattcagcgtgcgcatgagtgtctaatctgcattgtgtgatgtgtgtgtgcaagcatatctgtatgtgcacatgcacatgtatgtttgtgtacatgggaatctgtgtgtgtataactgtgcatacgagcacctg

SEQ ID NO: 151501 - DNA, 375 bp, Homo sapiens
ttgttccttcacatggagatgtatttattcccccaaatctagatgctcacttctaactcaagagtgtcaacagcaaatgcacacccatatcgaacaacaaaggtacctatagcaactacaccaaaaacaccttttctgtttcctctcctttctgtatgggtgcggctgcatgtttgggctttgatcttgtgttctaaagactttccaatagcttattactatgactccttttccttccccttctctttcctcctgtcttctcctctgctgttaaaggattaatttaatgagatttagttctcaggggaaatgctttaatgaaattagtagaggaaaataaacaaccacaaaatagcctgatgcaccatacccctc

SEQ ID NO: 151502 - DNA, 393 bp, Homo sapiens
ggaaatgcctccataatgaataagcaaatgaactctagaatcaccactcgctggaaaaatgaaaagcctactttggcttttcacagcctgctgaataaaaaacatggcaggaccccataggcctcaccatgcagctggactctgacacctaccacactgtgtcattactgtcagttgtttccattactcttgcaagtcccttcacactagggccttttcttgcctatctttagaattctaacatgtagtccagcaccttatatggggtggggatggcaacatgaaaatccttccatcacaaaacatctagaaatgctgggtgaaatctaatgaatattcttttaaatgcaaagagctgagctcacagtaagaaagggaaaccccctgggaccc

SEQ ID NO: 151503 - DNA, 254 bp, Homo sapiens
atatcaagcactctttcagactacaatggaataaaactggaaattaactgcaaaaggaaccttcaaaaccatgcaaatatatgatccctgggtgaaaaatgaaatcaagatggaaattaaaaaattctttgaactgaacaacaatagtgacatgacctatgacaacctctgggacacagcaaagggggtgctaaggggaaagtgcatagccctaaacacctacatcaaaaggtctgaaagagcccaaatggaca

SEQ ID NO: 151504 - DNA, 619 bp, Homo sapiens
ggagaatggcgtgaacccaggaggcgaagcttgcagtgagccgagatggtgccattgcactccagcctgggcaacggagcgagagactctgtctcaaaaaaaaaaaaaaaagaaaatggagaagtagccccagggtgccaggacccccaaccccttcgagggctcagcaggcggtggctgaggcagtggactgcagggttgggtggggttttcctgagctgtcaggagtctttctggagaatcaaaagaatgactgagaaacaatctcaaagttggtttgtggatgtaattgtgtacagtcgttaaactgagcaaaaaaagtctagcattccttaacctgggctctccaaggaggaagtatctcttagtgtgttctgtttattcttatctctaatcatgattggtataatttcatgttgtagcattaagtcttaatgtaattgaaaacttggaaacacggctacaacaatttctttaagatacagcattttggagccaaattcagtaataacttgtagctttgtgttaaggaaagaaatatttctgaataagggaaccaaggaagaaagtttgagtgagttttttttttgggaggcataggggaaaattggggtatggt

SEQ ID NO: 151505 - DNA, 297 bp, Homo sapiens
atgctgggagatggtcatgcagctcaggtcaactcagggtaccctcaacctaaaatgtgagaggagagctgcagaagcaatggacgagaagggagcaggggttttaatatcccccacacatcttccagcttctactctgctcactaatttcattttggacaaaagcttgttgattcttcttactcaggctagttacctgcattatactgaacagaattcctccagggaacagcctcttggctaaatcaacatacacctgccattcacagatgcagggtttctagcaagattctagag

SEQ ID NO: 151506 - DNA, 198 bp, Homo sapiens
ctggacaagggacctagagagtgtgtttaggcgggaagtggtctggaaattcttgtgactataagtggacattcttagaatggcgtcctgtttgttgtatttgtgctttaactggttgcaggctggcaggagtgataacacactatggtgataatgatgcattctctctgctgtcctgtccactagtgtgtgcttttc

SEQ ID NO: 151507 - DNA, 203 bp, Homo sapiens
gccacagattaaagggctcaaacaacagaaatttattttgcacagtgctagaagttcagggctaaggttctagaagggttcattttctgatgagggctctctttctggcttgcagatggctaccttcttgctaagtcctcacataacttttccttggtgtgtgcaaggaaagagtgtaagctctgtggtgcctattctttttt

SEQ ID NO: 151508 - DNA, 292 bp, Homo sapiens
caggcaaggacaaattcactggacaatttcttttagtttcaaaatgcaagaggtggcaaaacgctgccaataatctgttccaaatgtaggaataacgtgctgcattatccccattacaaaactgatgctgtcagaaatgggcgtaagcccctctgtgagatcagggagctggatgttctgatgtaggcagcaggagctcctaggagcactgacgggggtgagtgtagatcagagagccagatgttctgatgtaggcagcaggcgctcccaggagcactgacgggggtgagtg

SEQ ID NO: 151509 - DNA, 485 bp, Homo sapiens
ctcaacgctttatacttcggaatagggtttctggactttagtactactgacacactgttatgacaaccacaagtatctccagacactttccaatgtcccctttgggggcaaaatcatgccagttgagaaccactgcccaagaacaatgtctgcactttggcctatctttaaagtctttattttttcatgtttataattctagaatatccaactttcatttaacatcagtttaaatactttacatgttactacacaatgactgttttaatgcccacctatggagatgcattacagtattataaaaccacaattttcccatggctactagaaatctatattatttacaatatagctgttagaaaacatttgaaattacttccttaagacacatctatcaaattaaaaactcatgcactgggtcactgactattttaatgattcaatcataattctaatacagagtgtcttaaggaagtataaagcaa

SEQ ID NO: 151510 - DNA, 528 bp, Homo sapiens
ggtaatgatggagtgttggaagacaaggtgctggagctagaagggtaattaacatttccacagatggcgctgctatggtgttggattaaaggcttgatttcattcctctaattgagtgacttagttcatctttgtggattgatgcccaatatcattgttgcccagctctgccctgaaaaatactttttaaagtctccttttttggttcaacatgaacgtctcttgaaaagcaaagtaggataagacgctgatgagaagcttagtctaaataacccactggaaacgggtgtatttggcgacctgctctttcccaccatgacttaaagcgtttataaacctccataggaattggcaggatgtactgttcaccgcccaaacctcttgtggaaaactgggttgttcaggtagaaatgagtaactgtacatagagaagctaggaagaattataggtcagtgcatcccaacttcaatgtgttaggtcagtggggtcttgataaaatgcagattctgtttcaggggctttggagt

SEQ ID NO: 151511 - DNA, 171 bp, Homo sapiens
ggattacaggcgtgaaccatcgtacccgacccagagatttttaactcgaccactcactccccacctcatctagggactggattcttgccggaagggtggagtgtgggacagggcagccagggctctgaaccgactttcttctcccagactcccttggccccactgcatcag

SEQ ID NO: 151512 - DNA, 167 bp, Homo sapiens
atctgggaatcaatccatttggttggactggctggatgacctcttgggtgggtctttgtcacttctctttcctgtgagtccccaccccgttggctgagagcttgcattttcttagctggtcctggtgcaactggtgcatgctttttttttttttttttttttttttt

SEQ ID NO: 151513 - DNA, 309 bp, Homo sapiens
gagcggcgccctttttttcccaactcattaaagattaagaaattaaccaaaatcccataatgcttttcaaatttatgttaaaaatatgttactaaaagcttactgccctaacaaaaatgcaattattgcttctctagaacatttacttttgtactgatttctaaaaaagatgtgggattactaacagcacacatttacagtttttttttccactttaaagttaattctaaatagaaatggcttaagaatctagaaatgggtggcgcagtggctcacagctgtaattccaacacttcagaaggctgaagt

SEQ ID NO: 151514 - DNA, 594 bp, Homo sapiens
ctctgattgatggatgcgaattgaggaggaaaagaaaaaacaaaaaacaaaggaaaaatatctcctgtgcatacgtgtggttcattcagagaataaagcaaacacactaggaaaataagagctgtaattcccagggcggcaggcaaagggatctgaaaaaaaggcagagcgaatgggtctcgttgataatcattgatccaaagccaagtcaccccttcacaagtcacacatcagtgactagaccccatcagtaaactggtcgtgctgctgctggggattgcatacatagcttctgatgcctggtaatggcagatcgagaagagattacactatgcactagaatctggcctccaaaataaatccaggccattcttttccctgagacagtaaatagggtgaagttaaactccagtttttccatgggtaccactaagttaggttaacccaaggcactgggattcattcagtctgattattgcactgaaaaatacttcctagcccgtgtgaaaaatagggcatctgaacaggacagagattatgatcacagttttacaactgtgtacagcgctttgcttctgaaacataaaatactgc

SEQ ID NO: 151515 - DNA, 149 bp, Homo sapiens
ctcaacttggtggtacagccactgggggtggcagggaagggcagcagggagagctttctggatagattggctgttgggaggaggactggggcagaaagaagagtggattttccctataggggcagaagtcacccagtcattgaagctgg

SEQ ID NO: 151516 - DNA, 169 bp, Homo sapiens
ttcgacccacgtgtggaagccctgggctactcaaccttcgagaaggtcgttcaaggtccgacaacgctctgggggtctgggggggacgaagtcagacccaactacccctagatgttgggggggggaatgggtcactcgtcccccagatctcagacctgggtgctcccca

SEQ ID NO: 151517 - DNA, 528 bp, Homo sapiens
taaacgcccagcttcaaggtcacccagatgatgagtgcaaacttgggatgaaccttggagtaaatcctaagtcccctcactcaaggaccatggctgctacacagttggctttaaaaaaaaaaaacagcttgctgttctctggagtgcttgagtgaatactgacagaatctggaaacttcactatcctaatttggctatttatttatttagagacggaatcttactctgtcaccctggctggagcgcagtggcatgatcctggcttaccgcaacctctgcctcccgggttcaagcgattcgcctgcctcagcctcccgagtagctgggattataggcatgtgcccccctgccctgctaatctaacctctttaatacctactttgcacaaggtgcttttgcctgttttgtcccatttaattctcaaaacagccctgtcaagttggttttatccccacatcttataaatggaagactgaggttaagcagtgggcccagggccatagaacagctgagctgtggagctggaca

SEQ ID NO: 151518 - DNA, 371 bp, Homo sapiens
gtgtgtataaatgtatgtgttacggcttaccctgaattccaggcaatgtcaatgtcagccacacaccagataatgtctattgtgtgtcctggaagtcagcagtgctatgtgtagctttttaatatcaacatcaatcccttcttaaatattcaaaatttttaaaaacatttacattttaagataaatgatctttcccactcgttgtacaattttgtgtatcatgttaatataaggtatctaactagatatagctaattctaaattttcactgtaacatagttacttcccaatataaaggcctaccttactatacagaataatttgacttggggtttaaaaatataagagaagtctatttggagctagtgaat

SEQ ID NO: 151519 - DNA, 398 bp, Homo sapiens
atactgacctggaaataatgttaagagaaaagatagagtacagagttgtatatacactgattaaaattatgtaagaattatgcatttggctaaaactaataaagatgtggaaaattcgaagtagttatattatacaggattgtctttttattccaactttaaaaaataataaaagggatataattgaggatttcaaggaacaaaaaaaagaaaaagaaaatagttgtgttaagatgatgaatttcaaatcttaaaatatttaagattagcttaattttagcaaattagtattttaaaacaaagtgactagaaactagagaaaatgtcctgaacagtcctagggttttctagaaagaatttttattggttgtggtcttatcgttgttttgttttatttt

SEQ ID NO: 151520 - DNA, 436 bp, Homo sapiens
agtggtagtaggatatagttcttcaccttctgtgcagaggatgcgttgataaacagggcagtaaggagagccttagattcagtatctccattaggtggaaggaaccatccattactcttttcaagggtgtcttggagagagaaagcactttcctagatgagggatgaggttgatattgaaatagaccgatgagattatttttaagtcaaacaaaagaaaaataggacaggcctctcatctcctgaatgaatgttaagcaaagaacaacttgactttttagatatgtgaaaaatctcttgagaggttgtggaagcagcatgtaggaggataaatgcataactcacatcagtcttttacgcattaaaaataacttgggccattttgaaatctttctttcttgccctgggttcttataagcaatgttggggggaaaact

SEQ ID NO: 151521 - DNA, 411 bp, Homo sapiens
aatcttggctcactgcaacctctacctcccagattcaagcgattctcctacctcagcctccccagtagctgggattacaggcacctgccaccacacctggctaatttttgtatttttagtagagatggggtttcgccatgttggccagcctggtctcaaactcccgacctcaggtgatccacccaccttggcctcccaaagtgctgggattacaggcatgagccactgcgcccggctggctttcattcttaataagaagaaagcttagtgaaagatctagaattatgtgtacttttgctcataagtggtgatgaaaatgaaatgactataacaagataagaaaagccaccagaattggtattgagaatagctgggattacaggtgcgtaactgcctcagcctcccgagtag

SEQ ID NO: 151522 - DNA, 196 bp, Homo sapiens
atggacacaggcatttaaaatcagaatttgtaggtgaaatcttaattggtctcaacatctactttatttctgcattgggtaagcccttgattcacagagaagcagtggcaaagagtagctaattttttcagggctcccttcacaatttaattgggctcttcagttaaatcagttaaatgaaaatggcagaagaatc

SEQ ID NO: 151523 - DNA, 188 bp, Homo sapiens
ctgtgaggctaactctcctcctacttttctaaatattcactctggctcctcttgggctccatgctgcaaccctgcctgtacccaggtcctctccctagttctgttctcttttgtctgctctccttccctggtttgctcccctccattcacctcaacaccgcttccagggctgacctctctcctgtgtt

SEQ ID NO: 151524 - DNA, 695 bp, Homo sapiens
ccttagtgcagcaaaagcccttagaaggttataaaccagggcacccataaggctgtgaaagtaaccttgacagatatggcttagagtagagtgatggcagaggagaaaggcaatcagaagtgtttggaaagctcaggaggctgaggcaggagagaattgcttgtacctgggaggtggaggttgcagtgagctgacatcaagcccctgcactccaacctgggcaacagagtgagactccatctaaaaaaaaaaaaagcttggaaagttacagcggtaagatctgctaaaggatttgatgagatgggtatgagataaagaagaattaaaattgtcttctagatttgtggcttcagtagttgagtggacagaaatgtcatttacttagattagagattgatcttagtggagaaacaggttttaaactagattgaaggccctctgattagttaaaccattcccctactgatggtcatttagttgatttccagttttattatctttgtaaggaatatccttgtacttgtgtatttgtacgtgtggacatattctggaagataaattcctagatgtaaagttctctcatcgaagaggacagtacatatgtttcaagttttgatggatattcattagttgccctccaaaagtgaggtgttggcttggattcccccaacagagtatgcctttttcctggcatc

SEQ ID NO: 151525 - DNA, 299 bp, Homo sapiens
gcaaataatggcaagtggttgaagaatgatataattttaagatgaattcatcttcgagacagctaaataatacttctgtataaagtccgatagattttccaaatctttcacaggggtttgctgtaaaaggtagttattcagaaataaaaaggaactcagagcagattaaatcaacttctggaaatatatctgtgagtcctccaaataaaccaaaaggacctattgtaaatgggatgtggggatttcttgaatgaaatccaaatgtgttctttgttaaataaatagaaggacaaaaatta

SEQ ID NO: 151526 - DNA, 635 bp, Homo sapiens
gttgggtacctctgccttcaggtcttttatgagattgggactgtggtcttaactgaagctggactgggaaagcatgagcctttaagctgactcatgtgaaaattggcagggtttagtgtggctggagagcctgactttccttctctctactggtctgagcaccccctcaggctctgttatgtgggtctctacatggagcatctcatagcattgaagcttgcttcctgtgtttgaggtatacaatagagagagagaattagacaaaaaggtgtacacaaaaagagacagagaaagattgagggcgcaaacaggaaaaatccagtaggagaaaaatgagagctttaaaaaaatcttgacagggtgcggtggctcacacctgtaatcccaacactttgggatgctgagacgggtggatcacctgaggtcaggggtttgaaagcagcctggacaacatggtgaaaccaccgtctcttctaaaagtacaaaatgagcaaggtgtggtggtgcatgcctgtaatcccagctacttgggagactgacgcaggggaatcatttgaacctgggaggcgaatgttccagcaagccgagatcacaccagtgcactcctgcctgggatacaagagcgaaactgtctc

SEQ ID NO: 151527 - DNA, 479 bp, Homo sapiens
ttcataaatatcatacctaggtttctcactccactaattgcaaatcagttggtctcaggtgtgtgctaaggtattctactgtttcagaagtcccgtggtgattctatgtatagccaagcttgagaaccattgatgtaggggttaggaagaagacgaagagaggccaggtgtggtggctcatgcctgtagtcccagtgctttgggaggtggagactggaggattgcttgaacccaggagttcaagacaggcataggcaacatggcgagaccctgtctctacaataaaataaaataaaaattagccaggcgtggtgggacacacctgtggtcctaggtacttgagaggctgatgcagttggatcgtttgagcccgagaggtcgaggctgcagtgagccatgatcgtgccactgtactccagcctgggtgacagagcaagacctcatctcaaaaagtaaaaataataagacaaagataatac

SEQ ID NO: 151528 - DNA, 465 bp, Homo sapiens
ttacaggcgtgagccaccacgcccggcctttttccttattttttaatgtaaggatgcaacaccctagactgaaaagaactcagccttctaaactagacagattgactttaagtctgggttctgctgtgagggcaagtcatttagcctgtctgagcctcagtttctgtatctgtaaaatggggataataataactacctccagtggttttaagaataagaggtaatgtaggtagagagagggctgcacagtgcttagcatgctataggtttgcagcaaatggcacctgtgttattttcacttcacattttccacacatattcttattcatcttcaaccatctttccactttggcagcgttctcttttgtaatagtgtccacttgtgtgcatctcctgtctcacatgcatgatgcactggcagaagcaaagaatggtggcacacacttcctaatagtccctaagtcc

SEQ ID NO: 151529 - DNA, 314 bp, Homo sapiens
ccccttcagccttcggagcagctgggaccacaggtgcacaacaccactcctggctaatttttaaatttgttgtagagatgaagtctcgctgtgttgcccaggctggtctcaaactccggggctcgggcaatcctccttccttgacctccccaaaagccctgggattacaggtttgagcccccacacctggtcctaaaatttaccttagtatttatcagttatatgttcatacacagccaaaatgtcaaacagcaccataggcttaaaatgtgctgcccctcctaccctccccacccctgcctctatgtcatttt

SEQ ID NO: 151530 - DNA, 552 bp, Homo sapiens
ttcaacagctacagaatccacgttcttctaatcagcacatggaacattctctaggataaaccatatgttggcacataaaacaagtatcaacaaattttaaaaactcaaaattctatcactgatcttttcaggtcacgatggaacaaaactagatatcaataacaagaggaatgtaggaaactctgcaaatacatggaaattaaaccacatgttcctgaatgaccatggggttaacaagaaattagggatgaaataaaaacattgcttgaaacaaatgaaaactgaaacacaacataccaaaacctatgggatacaacaaaagcaacactaaatgaaagttgatagcattaaatgcctacaacaacaacaaaaaatagaaagctcacaaaataacaacctaacactgcatctcaaggaactagaaaacagaaaataaaccaaacacaaaattaatagatgaaaaaaaatgaagatcagagcagaactaaatgtaacagcgattcaacaatacaagagatctattaaacaaaaagctggttttctactggctag

SEQ ID NO: 151531 - DNA, 393 bp, Homo sapiens
cggaggcctgtgcattgagtatgcgctaaggtttttaatacaactggcttctttccattgtctcccaaatatcccaccccaggtagttgggtactgaacacaaactggtcattttgatatgagaatgagcaaatctaccagaaaattacgagccatgtatgtctgtaatgaaatccacaaggaaccatgactgcagtttctccagccccatggcacacctgtgtcagggtttacaccagtggctttaacaatacagcccaacacacacacctgttgcggggtggagcaggtcacccagggaggccagtcccaagccaggaagcagcagtgatgtgcccaagacggcacctgtctcagatgcatcccagctcaccaaggaccaggggattccag

SEQ ID NO: 151532 - DNA, 298 bp, Homo sapiens
tacaaaaactcgggtgctggtggctttgcagagcagtcaaaggatcaagtccctgccctggagatgtttgcagtcttagtagatattccccaagagaaacaacaacaacaaatcagtgtgcactgtacaaaaaccataccatggctggggtcactgcactctccgtcgatgacgggagtggagagacaggaattctgaccttcacatcgcacccactgggttacctacaaggccgccaattaagagcattgtatctcagcagaaacccaagacttaaagaccagatggagcccagtcc

SEQ ID NO: 151533 - DNA, 140 bp, Homo sapiens
tcttgctaagatttctgcagcagcctcctaagttcccatctcccttctttccccagatccaggctccagcaaccaggcctttctatgtcacaggcctgagccctccttaaaagactttcaggacaggagcggtggctcat

SEQ ID NO: 151534 - DNA, 451 bp, Homo sapiens
atgacttctcctggagagttggatcaggcccattgcgggtgagagggcaaatctttcccaagaacccaagtggtagaatgggtctggccttccctttaggtggttattggagaactggtgggtatgcatgtggagacgcagatgcctgacaaagctggtgccgtctggatggggggcaagtaaggtgtttaggagtgagactgtggtgactggtaccaaaaaaagaatgttggggtgatcagatccaacaccaggccttggtggtgacgaagtctggcggagtcaaaggaatgagaaaacacagtttgagagagaaaacggatcaagtgggctaacgcaagtatggaggctgtgaaggccctgagctctggaagcccagactatttattggcgatcaaacaggtggtgagaatgtgggggtcgaaagggcaagtgcatgatctacagctgt

SEQ ID NO: 151535 - DNA, 175 bp, Homo sapiens
tagtcagttaaaagtgtttggacaacctctctgagtgtacatgacttccatgatggaaagcaggagtggcttaggtctctttaacgctctccactgactgtgaaaatcagtccatcctgaagtgggcacagagagtgaaggggcttattccaaaggtccagccccagaggttctg

SEQ ID NO: 151536 - DNA, 289 bp, Homo sapiens
tcattgaaatatggattttaagagcaacatggctctagccgtgtttttcctttcttattattttatgtttgatttctttggttaatcattttactccttttcccttgttacctccaaagatatgacaaaatgcagaaataattggtttttaaattggcagacttttgtttaaaattttaacatggtttttagaacatttttttttcctattttgatttaaaaatacaatggataaagatttaatatctattcaagtttccccttctactccttattcacacctctacac

SEQ ID NO: 151537 - DNA, 306 bp, Homo sapiens
gtgacctggcatacccccagcagctccagaggccgaggtggggctgggggtggacatgtacctgcccttcctccaccatcaaggagccaaggtcccaggcccacctttcttggggatttagaggggtttatccgacccccggcaggactgaagggccacgggcaaggagttatcactgcagacactagtgttgcttctggcacactaggtgttatgttagactctggacagccagagatagagcttttttgtttttttgagacagggtttcgctctgtcacccaggctggagtgcagtagcacgat

SEQ ID NO: 151538 - DNA, 314 bp, Homo sapiens
cctgtaatcccagcactttgggaagccaaagcaggagtaacacttgagaccagaagtttgggaccagcctgggcaacagtgaaatcttgtctctacaaaaaaggacaagaaattacccagatgtagtggcacctatctgtagtctcagctacccaggaggctgaggcaggagaatcccctgagcccagggaggtctaggctgcagtaagctgtgatcacaccactgcactccaggagggagagtgagtaatgtgttattggaaatattcatttatgtgcagtgatcgggtgaattatccttatggtgtggccaa

SEQ ID NO: 151539 - DNA, 485 bp, Homo sapiens
gctcttcgtgcaagatccaagagcaaatctgtttccaggggcagataaggcaaataagaagtaatgttgggatcactggcacgctgggaacccagtggcagtagaggtttgaatgagcgaggcatctggacaagtcaagtcaagaagtttgcacccttgtggaattgttcccaaaataacctcgaagaaatagtctccatcgaggctgttgttgttcccacaatcaagaaagtaggaactcaagatgctttcactagaattgttcatttcagggaataatttaaggaagacgtcagtgcccacattgtcttcctttgtatatcctgttgattcagcaccacctttggaaaaatctctctttccctgattgaattgcattgtatgtggttttacataggtagatccattttgtttcattggtctctatctttatgtcagtaacactctttcttaatcagtgtatcttcagaataaaataaatctca

SEQ ID NO: 151540 - DNA, 255 bp, Homo sapiens
acaaatgtctgtggaatcttggaggtaaacatcatttttaaagtagcaaaaaccaagtacacagaaaatctgacattgtctagctaaactcacctttgtagccacatttctgctgaccccaaagcctcattctgatacattctgtttcctcctgggatgcacattcaccccagctgactctccccctccttccctgggctcccttactgggcgcatccagttattttgagctctcatagcaccgtggccctctct

SEQ ID NO: 151541 - DNA, 292 bp, Homo sapiens
attccacagatttaggaggtgtgagaggaggactagaaatctgtttttgctctttttaattattttaagttttatcactgatttgggctatattcttaatggcaagggaagcagtataaatagaataagaaatgttgtatactagatttaagatcatatacctcctatgttatttcacaaggccttaacagaacacagcaaaatatgttccggtgttttgtgtaaaatgtggaagatacattataaaatgctaaatccagaaaatctgttctatggtctttaagtttcaaat

SEQ ID NO: 151542 - DNA, 213 bp, Homo sapiens
ctctgctccagcctggccaatagaccgagactctgtctccaatcaattaaccaatcaaccaatcaaagacgcatcctttctccttcagatacaaatcacctctgtagagatgggtatggcctctgagtggagataatagtgatgatataataaacataataacgatgatagtaataaatgatcatttaaaaataatactagccggcgcggtgg

SEQ ID NO: 151543 - DNA, 1150 bp, Homo sapiens
tataaaatggtatagtgtttgcatatgacctatacatatcctcctttatactttaaatatctctagattacttataaaacctactacaatgtaaatctatgtaaatagttgttaatactgtattgtttagggaatcatgacaagaagaaattctgtacatgcttagtatagacacagccatccatttttcccccttcatattttctatctacagttggttgaatctgcccatggatgcagagggccaactgtatgtctgtcctaggtactgtgaaactaaatcactgaaactaaatcactgaaaactctagctgcagatagactggaacttggagagtctggaaatagagagtcaagagaggctattaaagtttggctgtgtcgtgataactactataaatttggtacattcactcacggagtgagtattttgccatgccctgtgttaggtacctggaacagtacctaagatagacagttcctaataacccatggatcccattcaggttggggataataatctagttggggataataataattattattaatttttctccataagttaataattataggagcatggtaagtactttgggtatagggtgagtacacagtcttagaagaggaaaaacaaggaggatttagctggtcttggttggtcaggaaaagcttatttaaagaagggcttataaactgagacctgaaggttgagtgaggagttgtctgggttaagggctggcagcaggaggtggtggtaggggaggggttgaggcatagaccccacagggttaggtcggaagatgagaaagaacatgatgcatttcaggaaggagcatagagtgtggaggtgtctggggctttatcaaagtcctgtcagccaagagcagtagggagcattgacactgaagggttttaagcaggaaagtgacgtatttgtttacatttataaaattcactagaactgaaagtagaatgagtagaaattaaaaagttggctatatgctaggcatggtggctcatatctgtaatcctagcactttgggaggttgaggtgggaggattgcttgagcctaggagtctgaggctgcaatgagctatgatcacaccactacactccagcctggttgatagagcaagatgctgtctc

SEQ ID NO: 151544 - DNA, 232 bp, Homo sapiens
ggcacacatgtgtgcattatgtaggctataaagtccatgcagagagagacttcagatgtgtgcacttcatgagaagctacatgccattaaaaacacctccagaacaggtgctccaaagggcaaggctccccaggtccaggagctgtgtcttcagagtggtcattaagagaagttccatggaagggatgagttcacaaacacacatgcatcacacacagtacacacatcacac

SEQ ID NO: 151545 - DNA, 465 bp, Homo sapiens
  misc_feature (1)..(1): n is a, c, g, or t
ntcgggcactagcttattacgcgggtgacaaataattggtacaccaagcccccatgacacgcacttatataacaagtactgcacatgtacccagaaacctaaaataaaagttaaaaaaaaaaaagacaacttagaaaagagaaacaaggccaggtgcagcggccttatgccggtaatcccagcactttcggaggctgaggcaggaggatggcttgagcccaggagttcaagaccagccggggcacacattatggagctccataatctgtgcccagggctggagctctggggctgggcacctgtgtccccagcgtgaagatgaggaagggtaccaggctttcttcattcgtttttactaaatagtgtatgagagacaacagttgtctctgctcataaagcacgcggtctggtggggatgataacggaagcttcctcagaattttggggatattagataacgtataa

SEQ ID NO: 151546 - DNA, 234 bp, Homo sapiens
ggtgattcatatgcatgttaaactttcagaagcactgaactaaaggactttgaaaataaacgcacatgaactgaaagtacaaaaatgtctgagataactatgcagaccaactgataaactagaggcagatattgactacctatactgctgatagtggagaacagtaaggataggaaaattcctgcttatatttcccaggttcaaaaccagaaaaggaaaatgtcaccaaaattt

SEQ ID NO: 151547 - DNA, 128 bp, Homo sapiens
acctggtaaacaacaaacatctgagataaagacccttaatattaatatttaaaaatctgaaaaaaaaatgataaaaggtgaggtctatacactgcaatttttaagctgcttttgttacagcacaggag

SEQ ID NO: 151548 - DNA, 368 bp, Homo sapiens
atttagtgaaggttagttgaacagtgaatgactaaatttctgaattcctgctttatatacggtgcagagagacagagaggggctaagtgacagatggtccttgcataattatgtcagctgcctggctcagcaggacgtattaggagatcggcagcgtggtgtcatgcaggccctgggacactgtacatcaataggtgacatcagtgtcccttaacagaatgagctgccccttctgccccagcaaggtggccacagatctctcacatgtcccgtgtttgtcaggagtgagggtggttagagtagtgccacttgttgactctgattctcccagtggtcatagctataatgcaatgaagactatttgttat

SEQ ID NO: 151549 - DNA, 212 bp, Homo sapiens
accccgtgttttattttttcaccgtagcacttatcacaatttacaattatggttttttccccctgcagtgtttatcatctggcttcctcacagacgtacacaccaagaagtcaagaatcatttctgtcctcttcaccattttagatgggtgcccaggcccagaactggagattaagtcacaacacatctgggttgagggcaaaacctttttt

SEQ ID NO: 151550 - DNA, 458 bp, Homo sapiens
ggccgaatccgaaatccgggcatgggatcacacttgcacactcagtcaacaaatatttttgcacccctgctctgtgccaggcacggtgcacacagaggaacacagaatgaccccatggagaacatgaaattacctgcccaatgagtggtgtggcaggcttctgagggcagggagtgatcatcgcctggattggtcagggaaggtcagtgagtggaagtaggacaggtgttggcctgagagtcagagatggataagagaagggccttttgtaagaggcagagtctgacagaggggcagctatcagagtgtgggcttgagaacacctgggcataaatcaaggctcagtcatgagaggcaaagtggaaggtgggttgggccaaacacagggtcagctttagggcccactggctgtgatgaaagagggtggggggttactagtgacttctcagccagaagtg

SEQ ID NO: 151551 - DNA, 278 bp, Homo sapiens
tctaggcccataaaagccctggattcagccagacgaggatcaatgggacggctagctgcggagagaagctacctgctcaagagtctcccttttgctgagagctgagtagatgacgaaacaacctgtgtggagagaggagctcctcactccagggtctcctctctgctcagagctgaacactcactgggacaccctggctgtggagaggagctaccctctgtgggtctcctctgagctgttctgtcacccaataaaactcctcttcaccttgctcaccc

SEQ ID NO: 151552 - DNA, 505 bp, Homo sapiens
atgaatttagttctggatatctaatgtacagaatggtgactatagttaataatcagtggggaaatgactccctattcaataaatggtgctggactaactgaccagccatatgcaaaagattgatactgaacccctaccttacaccatatacaaaaatcatctgcctgcccagcatccattcccccttctggtaaaagcctgttgattatgtgtgttttgggggtggagggaagaatgactgtttcctcccacaatgtgtgcattcctgattcctggcaagacagtcgaagtgctccaccctccactgccaagggtgtgacttgctcaggaatttgaagcaatcaagtatgagatggcagactggaaacgctggagctgattcattctagagtggtgtctgcgggaggacctgcctactgatgcccccaccttggaccctgagtctagctctcttcttctaaggcctgcttcttcaactttccctttgcttctgtgagcttccctg

SEQ ID NO: 151553 - DNA, 219 bp, Homo sapiens
ctttcttcttgatgtaaaaaggaaaaacaaggccataaatggggatttgtgttggaattctctcaataaatgctttataaaacttttttttttgagacggagtctccctctgtcgcccaggctggaatgcaatggtacgatcttggctcacagcaacctctgcctcccaggttcaagagagtctcctgcctcagcctcccaagcagctgggattacagg

SEQ ID NO: 151554 - DNA, 701 bp, Homo sapiens
cacagaacaattgtgatttctccattgataattaaaattactttacagggtttcagcatgcacagtcacttttagggtcccgtgctacggtgcaaagcaaggactgctaatacatgcacacacacacaacacatacacacgcacacaccccactggctttgatttgctgttacagttaggccttgaacaacatgggagttaggggcaccaacccctacatagttgaaaatctgtgtataacttttcactctcccaaaacttaacttctagtatctagtgttgaccagaagccttaccaataacatcaaaagtcaattaacaaatacttttcctgttatatgtattacatactgtatccttacaataaagtaagctagaaaaaagaaaacgttattatgaaaatcataaaaaagagagaatatgtttactgtattgtactgtatttatcagtatgataagtttgtgttatctgttgacaagatgaattatgtatctgaaatggctggcaacctcagctgcaggacactttgaggagacggctgattgcagatctagggcagagaatgaataaggtaagcctggaatgacatgttttgcagaaagcaagtaagcactcaaagactaatgaggtcatgtcaaaaggacacaggagccagtctggaaaggcttccagtagccaaagttgggacagttgaggatca

SEQ ID NO: 151555 - DNA, 781 bp, Homo sapiens
cctggttgataaaaatagcgctcctgaaaaccgagtctgtggacctttggaggcagggatgagtcagcctctcctaggtttcttctgaccatcaacacttcagatcagtttgtcttattttcatcaagaatctatttagttgtgattcgagtggctttactggtatctattactaggtattagggacttgaaacagacctttttgagctgtcagtcactgttgtaatctatgtaattgggcccaatggaaggtgctttaactgctgaagctttgaccctgtgccagctcttccattagctatcacagttgaatacccgtccaaaatccataaagcttgaagtgacattaactgaactatgcttaaaaaaaaatctgttttgacttctggcagtaccggtggcagtatctgccatatgttacagtagaatttgcccttgtgataggaattgtggacagtctgtggagagtttgggccgggctttggaaattgccaaggtcacctttgaatgtagacataaaaacactattggaattctcagatattaccactggtatatcagtgatggaaggaaacacatcttacattattctgcctgtcttgcaattctacaatgtcaggatataacatttctcccactgtgtgttatttttagactatatttctatcatccttgagattgaacaactgcctctcaaaatattcaaagatactcggtagtcatttaataacatttgtgtagaatgctgtatggaccttttgctaacaaggggagaattttt

SEQ ID NO: 151556 - DNA, 323 bp, Homo sapiens
ctgactcgggcctctatgacactattggtagcggggagagaagggagaagctggagttagatttcagggtgttaagaagaaggataagtggatttgctgcatctccatcctggcatcatttctgatgtccgtaaatgctaaaggcctattaggccccatagaaccaggtatctcatcgcccagaggccacatctcacagccagcatgggcatcggggcctagggtcatgtccctggctctgttgtggggcttttatgcagtctcccttgcataatctcctgttcccttttgcatgggcatgatgcctggtttgtttcctgtct

SEQ ID NO: 151557 - DNA, 281 bp, Homo sapiens
taaattgagggcctgccatttttgttaactggtatccctgaatgtggctaatggcacaagctacgtagaaacaggcccttgtcctgtttttgcaatgagcagaaatctagcccactgagacatcgagttcttttctaactttttgctctgttgagaacatctttgcttttggatacaaaggcagcatgaaaatctggaggccttctcaggaaggggaacttctaggaacttaatctgttagtgggaaagccaggaaccagcacacttggagtgtcatctga

SEQ ID NO: 151558 - DNA, 432 bp, Homo sapiens
tacatgatacgactcgagctctgacccattcatgaattcactaactggtcaagaataaatcccaacaaggccaggattcccatggcaggagatacccaaggtctggtaaagtcgttctgctaaggaaatatttccttttgctgagcaactcttcagtggtagttgaagtccagtagaagtaggcaaagctaattcacatgaagaacaaatctgtgatgggggaggtgttagagcatgtcccattgtctgggcacacaaagaagcaatcgcatattaacatgaaccaaattaatggtaatgaaaccagagtttctaagaaatggtaataaaataataactaaaccgtgcctggcacactatactttactgattgctttcatatatagtatattatttaacgtgtacaatggccccgtggcaggtggttctgtt

SEQ ID NO: 151559 - DNA, 388 bp, Homo sapiens
accgccacgcacgctttacgtatcttaggattataaagttccaataaagatttcgagcttggcatgcagcggcataatcatggctcattgcagctcgacctgccaggctcaggttatccacctgcctcggtctcccaaatgccaactgtggggggaataaagttgcttagcaacgtggaaatgggagaagctataaggcttcccagtgttcacgcaatcgtccctatttctgtgcctcttctacctttcatcccagaggttaactggtgctgtgaattctgaaatgtgtcagacccacactgcagtctgaaggctctctcgacctacgcttgctccatctcccgttcatcctccatttatgtttcctctaataaattcttgcacatct

SEQ ID NO: 151560 - DNA, 303 bp, Homo sapiens
tgagccaggttacaaaataatcagatgtgctgagtgtgatcagcatcgaatgagaggacacatgcctttcttacccaactgcagtcatccaggcaagagctttacttaagttgtcatgaagaggggagctgtgcacttggctctcaaaagcaaatttggtgtctttatcaagttattgatcatatacgtaccagtagtaggaggatgtcattactcatcttactgtgaaaactgacagaattacacgtgaaagcctttgcaaacctaaaggtgtttataacaatataagaaggtttgggcttt

SEQ ID NO: 151561 - DNA, 367 bp, Homo sapiens
ctgttacatttttcttccaaatgctcaagactctggaagccagaatcttaaggcttaaactgggttctgtgtgctactgtcctctgagtaggaggggcagggagaaccaagacttctcagaataaggaagaacagctctctaatgagaaatcacagtgcttttacccaaaaaagtgggagggtttgcttgacaggccaaagcaagggatctccgggatgctgattttagaaaggtgcacagaaaaacagggagatgattccaccctactccttcctggccgagttctgggcaacacactttcagagacttttgactgcttggagtgagaagggataggttcaaaagcagcaattaagatgcaaatat

SEQ ID NO: 151562 - DNA, 235 bp, Homo sapiens
atggcagtgactgcaagtgggctggaagtttctttctgggttacagaaatgttctaaaattagtaatgatggttgcataattctgtaagtttattaaaaatcatttcattttacccttaaaacaatttaattttatgatattgagttatcactcaattaagctgtttaaggtatagcccaccaggtgcggtggctcacgcctataatcccagcactttgggaagctgaggcaggt

SEQ ID NO: 151563 - DNA, 447 bp, Homo sapiens
tccactatgtcacggttggctaacatggatcagacacttacaagcaccaggtactgctctaaccactttgtaagtatcactgcatctcatactaaccctagtaccttatgatgtacgtactagtattattcaaagtttccaaatgaggaaagtgtggcccagaaggattaagaagcttgcccaaagtcacagagctagtgggtagcagatctggccccaggaagtctgacccctaacagtgtctcaagagacccaatccagatagaggccaccaacaggaaagcagggcctggaggaccaaggacatcctttcacaaagctgagaaggtgcaaagagcaagcatggtggctgggtcagggaaattgcaaggaaaaataagcagcaatacaagggaagttgggatctggacatgctttttctttggatcctgacccagccaaccgtgg

SEQ ID NO: 151564 - DNA, 489 bp, Homo sapiens
tacccaaagttcctctcatgttttatgaatcaacaattgtctcctaacttgtgaaagaaatcagtgtgaattagcgtctagaatcttataacctgtctgcattaaactataaaaaaaatgagtacaattagacatacaatttaaagaattcatcaatttaaatgaacaaaaataaagaacttctctgtgatctcatgttccttttcaagacaacacactctcagggctgtctggtttaccactatttcttctttacattcatgttctttatcagcaaaacgattacaatggtctttcagacttgagtgatgaatgacaaaacaacacagttccattctaaaatgtgaatggccgtggagcacagctccaaaaacgaactgcaatggttatgccagagaataaataacatccagcaacagaatcaaattctaaaattaagcaagaaaaagaagtagaaataaaaggagaaggaggaaaaggcaaaagaga

SEQ ID NO: 151565 - DNA, 411 bp, Homo sapiens
taggaagaataccacagggcgtctgtacaccccctgcaatactgacattaggaacaatatcacaggacaggagtacacaccctgcgatatttgtggggaagaaagatccattagaagattcatgaaaatgcacaagtggaagataatgatggtcttctttatggctgcagcagcagagttacaaagagggatgttcattcaagagtcattcttgaagcagaagcaacaatttcatggccaatcagagagacagtggcagatggcagctgggtgctggaagaaatggaaaaagaagactagaaaatgctgcagagattttgcttgaggagctttgaaaattattgctcatgaaatataaaataatgggctgatttggagtaatggataatgaataggtgatgtttgaagtgg

SEQ ID NO: 151566 - DNA, 361 bp, Homo sapiens
atctcggtccatctctgtatttccatttaatattaatattttcagatcatagttgactgcaggtaactgaaaccacagaaaatgaaactatacataagtggggaccactgtacacccttgtagtcatcactcagatcaacaagagaacatttccaaaggccatgagattccctcctgtacctgtgaagtctgtagcctctacctataagcactattttgatttatgtcatatcatagaccagtttttcccatttaattcattcatgtagaatcatagtatgtggtctcaatatgaagtcttttgtatttggcttttcctcaaagaattggtgagattcattgatgttgcaggcaatcaggt

SEQ ID NO: 151567 - DNA, 648 bp, Homo sapiens
tgcagggtcgcccacagaatcaggacagcagcccacctccaccccaaacctgctctgttcccagggggtgagcgctgctcggtgcaggaagtgtgtgagcgcgtgtgtgtagatgggtgggaatgaatgtgtgtgtgcctgagtgcgggtgcaagagtgtgtgtcaatgggtatgttttgtgttgagaagtgtgaaagagtatgtgtgtatgcctgagtgtgtgaatgtatgtcatgtgcatgtgtatgaggtgtgtactgtgtgtgtgaatgtgcatgggtgtgtgtgttgtgtgtgcatgtatatgtgtgtgtgtgaatatgcataggtgtgtgtgcatcaagtgtgtgcatgtgtacatgtgtatgaatgtgcatgggtatgtatccagtgtgtgcgtgtgtgagaatgtatgaatgtatgtatcaagtgtgtgcatgtgtgtgtgaatgtgtatcaagtgcgtgcatgtgtgtgcatgtctgtgagaatgtgagtgtgtgtgtatcaagtgtgtgcatgtgtgtgcatgtctgtgagaatgtgtgaatgtgtgtgtatcaagtgtgtgcatgtgtgtggggatgtgtgaaagtgtgtgtatcaagtgtgtgcatgtctgtgaattggggtgtatcaagtgtgtg

SEQ ID NO: 151568 - DNA, 357 bp, Homo sapiens
atgttgagaccaaaagactttttttccaagtagaatgaaatagaataaaatacaattgaaaatacttgcctgcatcacaggtaatgagagtaactatagtttcatgaaaccgttgtttcagttaaatatgtttttgcgtgtgtgcatgtgtatcgggaggagatatgtatttcatatatatatgtagagaggtggaaatcaacaacaaaactccataatttttcttgttttctaacagttcttgattttgagtaaaaataattctttaagaacaaaattttgagccagctaacgaaagatcagagtcaagcagcctctcattggggcctgaatagaggttcatcttatttggctttt

SEQ ID NO: 151569 - DNA, 380 bp, Homo sapiens
cggggcactgacctctgctggtggagatatcaaagtggcaggtgtgtgggcacagtctggtacttgtcgatcattacttagggcacgagaaggctcgggtgattatctgctttccaaactctacccttccctgctgagttcacacactcctcgtagataagagacttattgtttctggattatgagtagttacaattgtatgaaatccctgtaattaaagttgttcctctggagctggcgccatatgtaacatattgccctattctgtagggtctaggtacacatttcagtatctctgaagtcaggacgtgacttcacatttggtggtgtctccgacttggtgaggtagggttgttgtcttggagtagatagaggttttg

SEQ ID NO: 151570 - DNA, 440 bp, Homo sapiens
gccacaccaggccttcccaagccgccagccaatccagttccctcatgtgaccagagagctgagctagcactaatgatgagctcacagcccacccttgatatgcacatgggaataggtgaaaccagacagcatgcttccgtggtgcttctcaatgagacactgagctatgtcttttatggtttattatgctattgaaatatgattcacatactataatattcacccttttgaagtgtataatactgtctgggcacggtggctcatgcctgtaatcccagcactttgggagtctgaggcaggtctcaaactcctgagctcaagtgtttcacccacctcagcctcacaaagtgctaggattacaggcatgagcccccacacctggctttagatatgtttagatacacaaataccattctgttccagttgcctacactagttca

SEQ ID NO: 151571 - DNA, 880 bp, Homo sapiens
tccactagtgtaggcgtggtgctcctctaatgagagcaggcaatttttctaagaactggtccttttgggatcttccccagaacccccacccccaaatgacacaagctcttagtgagaagtgtgaagcatcagtttaatttgagcaatggtctacagggtcagactggggactagaaaagggacggcctcagcagtcctaaaatgcttcattccatcctcttgaccctataggatcgtcaagacaccagtcctggtggacagagggcccctgcttaaatgtacaccgaagctcgaaactgaatgatcatgtctaattatcctaaagaaaagctgactggcacactgtattagaaagaaccccaacaaaaagtcagaaacctggattctagtccttattctgacacatttgcatcagctgtgtgcaagctgtgtcagaagctgagcaaaccacctaatacctctaggcctcaatttgctcacctgcaaaatgggagtaagggggggtcattccacatttggcagtttagcaccttagtaagcaccacacactctgaagttacgctgcctggattcatatcccactttctcctcttacgagttatgtaaccttgagcaacttagctctgtgcctcagtttcctcatctgtaaaatgtacctagttcacaggactgttttaagcgttaggtatgaggaattaggtaaagctctcatcatagtgtctggcccttagctcttccaataattgtcagccccattaccatgatgattagtggaagatgaggaagaaaaaaaattccacaactaggcatttactacaaggattaaacagctttgcagtaggtggactttttacttgttagaaggtttcagaagaatggg

SEQ ID NO: 151572 - DNA, 400 bp, Homo sapiens
cgaggtaggtagatcatgagagcccaggagttcgagaccagcttgggaaacatggtgaaaccctgtctctcctaaaaatacagaagatgagccaggcgtggtgtcacacatctgtagtcctagctgcttgggaggctgaggtgggaggatagcctgagcctgtgagttcgaggctgcagtgaggcatggtcatgccactgtgccccagcttagatgacagagtgagagcctgtttcaaaaaaacaaaaaaccgcaaagccattattgtacatggaacaaaatctctggctcacccagccattgttatgatattgattggttgatattcatctctcaagttcctaaacctactcctccctccctaccatccctggttaccattacagtgtgcatgtttagg

SEQ ID NO: 151573 - DNA, 320 bp, Homo sapiens
ggcagaaagaaaaagaaagataagggcaggaggaatatgtttctagacagtcactgtttttaaaaaaaaatggacattgcctcaaagttaccctcttccactgctagcccaaatttctttttctttttcttttctttttttttttttttttttttttgagacagggtatcattctatcacccaggccggagtgcagtggtacaatcatgtctcactgcagcctcaacttcctgggctcaaattatccccccacctgagtttcccaagtagccgggactaagggtgcgtaccaccatgcccggctaatttttttttttttt

SEQ ID NO: 151574 - DNA, 576 bp, Homo sapiens
tttttaaaaggacagagagcatttgttattgagtatgcaggcagtatgctttgaagatagaggtcacatttagtgagggattcgtggtttaatagattggaagaagggattattagatgggatgggtttggtggaatatgtgagttttctaaagtcattaggtgttttatgcatgagaacataaaagagctggggctggaatcaattttattctaatctaacagatgtcttctactcttaagacacctgtgtaatgaaacgtggctttccccatatctccctactttcactccacttaattaatatacgtggctgtacattgacatactatatcatctattcctaatagaggggttttgcttccttagattttaattatcaataacttcattgcagtattctctgctttcttggtttccagctaattgccccacttgttttttgtttgactagttactttcttcttcatttatgacccctgtctgtagcttatcttggcttctactttctcttatgttctcccctgaattcctttacgtatgttaatattaagctgattgtcataatatttataag

SEQ ID NO: 151575 - DNA, 229 bp, Homo sapiens
gaaaggatcagagaggtgggaggatggagggacagacaaatcttggaatagtcacaagtcacctagataggcaaacatttctgtgggttttttgttggttttgtttttttgctgcactgacccccacagaccctgccccatatcactcacaccagggaaacaaacccttctgtgccggtggctcaatgctcagacccaaccctgcaccccacacaccaccatccaccct

SEQ ID NO: 151576 - DNA, 533 bp, Homo sapiens
gcattcctacaaagcatagttagcttgattcaaggagctggggcgtgcaggccctagcatgggcagtcttcaccctacctgtcctgcctcaacaccagggcaagtgtcaggtgccacataaatctgcatttcgcagtggagtaaaaggcaaaagaaatacttcttgtacttctctgtgtctctaacaagagtagaaaaactggctgggggcagtgtctcatgcctgtaatcctaggaggatttgggaggtcatgggggaaagatcgcttgagcccaggaggttgaagctgcagtgagccatgttcatgccattgcactccagccagggtgacacagcaagacccttctcaaaattaaaaaaaaaaaaaaaagaagtagaaaaacagaagatagaccaagaggactatgtgtttcaagcaaaatggacagagcctcttactttggggcatggtgactccactctgagtgtgagacacaaatactgcccacttcattcatctactctttatctgcctctctcctccaggcacctg

SEQ ID NO: 151577 - DNA, 795 bp, Homo sapiens
atgtccacggttggctgagggcaggtgagtttgcctggtggtggagagaaagaggtgaggtgtagctgggcaggggggctttctctgcccctcaccgaatccccattccaggctcaaggggcagaagtccccagatcgcctcagcagtcccccacagtaggcaataaaagcctgaaaaggaacgagccgggcattctcacttaagaacagagagtaagcgtcacatggatgacttctgtctccatgagtcagctcagtttgttgaagtgtgtttcagggcaaggacatgtggctcctgcgtaagtgccaccaccttctgggcactcgctaggcctcgggtcctgtgctgagctccacagggattatcttaatcagttcttggcataagcttatgaggcaggtacagttcacaaaggagttgtgaaagggaagcctcagagaggttaagtaactgacccaaggtcacacagctagcaacacgcagggcaaggtctggaactcggaagtttaaacacgagagctggcactagccaaccactgtacacaccagctctttgccgggcatgctggtggttgagtgtacagatatgtacccatctgtgaccatgtgaatacgcagggcaggcagacgacacttggccatcaccacctcccgtgtagtggggggcagaggagggcacagcaccaggtttcaatttatggaatcatccctggatgcctggttcttggggtgtggtggcggtcacatgagggttcaccccgcagccgaccccctgacgcttaaaattaagctcg

SEQ ID NO: 151578 - DNA, 335 bp, Homo sapiens
ccaggaaggcctcgaggagccggcccagagctcctagactagagaggcacccactgggtcctttcccctctttccactagaccgtaagcggcagggaatttggtttttgtcccctactgcatccccagtgtgtaaaatagtacccaggcaggagcgggtccccgtaaatatctgctcctcccacccactgcggatgaacaaatgacccaaggaggaggggcctcccaaatccgagaatgaaagaattcgcattgtctgacaaggcaagaatggggcgctgtcaccacacaacctcacccatccccacgtgctcagcccagcccttctcatgctca

SEQ ID NO: 151579 - DNA, 640 bp, Homo sapiens
gtatattggtgacatgactctctgaaggcagaacaattgaaccgttttatctttggcatagcaaggaaaggggaaatggccactgtaaaagtagataaaaggaaagcagccaaccttttaacgggttcttaaagtgtgggctagtgtgccagcctggaatccatgggagccccaaacacaagaggacaagagaaacctgcactcattattgaacacttttccacagccttcctccccccggatgcgcacagggaagattgaaggcggggcaaaaaaacccacgagcagcttccccctccgaggtggggcatgaggacatccactgcccactgactagactattttttcatatgaagcaaacgcctcaagctcccgggggaggggcaagaaaccttctcaggaaaaaggcccactgcctccaggagaaggtgagaggcaaaagctgtcttcctctgggaaatgggtggaaacctgttgccctgatcctaggaaaaatgtgaactgtcactgagggagggcaaaagcaaaatccattagtggtgtgatggttaatgtttaaaaaacagctttctggccggacgcggtggctcacgcctgtcatcccagcactttgggaggccgaggcgggcggatcacgagg

SEQ ID NO: 151580 - DNA, 183 bp, Homo sapiens
gacacctgggatggggatgcccggagcaatcttggaagccagtcagctgatctgtccctcagctgagtccctgaatgactgttgagccaattgcctcccacaacatacagatacatttgtgagcaggcacgtgcacacacacagaaacaaaacatttggaaataaactattgccttcaagcca

SEQ ID NO: 151581 - DNA, 335 bp, Homo sapiens
gaagaggagagctgaatacgggtaaagcatgatggactatgggaagaacggaatatactgtgtgtgacagcatcattcaataagctatatttttaaagacctgaaccggttatagctataggttatctacaagtggaattctcaaacacgaaaatgaaagcctgacaaataagatgctaatgccattttcacttaaaaaatagaacaagcgaaagagagaaataaaagcactagcccagtaagaacatcctctatttgccttactcataagccatttcagggccatatctgcaaaactaggaagaaactgctaagtgctaaaacattttaaccaa

SEQ ID NO: 151582 - DNA, 215 bp, Homo sapiens
aagacagagggacatatgacatgagctccagagggaggcggaagcccgtagggctctcctttaaaaatagacttgcagatgatggataactaaagctgtcacgaaaaccttgatgtggagctaccaatactgggcaatgactgccgagtacaataccaggctctttatgttcataatttctaatcttcaggccagccctggtaggctttgtaatc

SEQ ID NO: 151583 - DNA, 435 bp, Homo sapiens
aatctgcctgcctcagcctcccaaaatgttgggattacaggcgtgaactaccacgcccggccaggacgattattaatacaacacttagcacagtcatgacaagtcaaggagttctcaactaaatggtaattcttagctacacagtggaagattaaattctttgtcatactgacttttgtacacaatgcctttttaacttatgtcttccagaaggaaggaaaaaaatcactttatttttagaccctagagacttttcagaattacttgtgaagtaggttatagatgtatttaatgtccaggcctggtgactcacacctataatcccagtgctttgggaggctgagactgaggacagttcaagaccagcgtaggtaacacagaaagaccttcatctctacaaagaaattttaaaaattagctgagcatggtggcaca

SEQ ID NO: 151584 - DNA, 1073 bp, Homo sapiens
tttaggagatggggatgaagaggtccagacattcccctaaatcagtaaatatttattaggtgcctatacgaggtataggaaagttttctgagcactgatctgaagaggacagagaataacataagccactttcctttaggaagtttacaaccctataaagacatatataagtgaaaagcaatataagagctttcaaatgccaaaagagggtattagacccccccccccaaaaaaaaaaactataggatgacagaggaaaagaggtgaccatggaaggaagtcagggaagtctccctagagggtgatgataacaatactaattgtagtactgaggtagctaatgctttgtccttactctatgccagatgctttaaatgcttaacttgcataatctcatttgattcttacatcagtcttacaaggagggaactatgatatagtagaaataatgcatccagggtcaaaggacttgaggtctcgtccttacttaggccatcggggctcggtctctcatggtatcattgttactagtgttataggacttgttcatatggagcaatcaaatcattctgggagcagctacaatgggatgatgatgatttttaggaaagggctgttcaaggacaggcacctccctcatgggcctcagctactcagtggaataatatgcctggcatatactagacatccataagtctttgctgcattgtatcttcttcaatgaattgaatcagatacttgcagagttaggtaccagcaggtgccggccacatctataagtgtagagaaatactaataacaactggtaaaagagcagtaagtaacaataaagattaaacacctactttacacagaacatttttgacatataaaatccataaagtaaatatgggtggtaatttattactatttctgaaaagggagaaactgaggtaccaaagcaccataaatgctttgtataggtttatgtatatttaaacagtccatgaatcaacctgaggtttgaaattctctttctggactttaataaatagaatggccatttttacaaatgactgatgccaaaataatta

SEQ ID NO: 151585 - DNA, 160 bp, Homo sapiens
ccagagaggagtggaacagccaggaagagctgtggacaggcagcctcaggtcattaagagttgtgaacaagaagaatgcagagaaaggggacaaacataaacctcgacaattagcaatgtttcaaatgcagtttgttgttgtcaaaccccaagcaaaaag

SEQ ID NO: 151586 - DNA, 458 bp, Homo sapiens
gaaagcaagttggcatgtaacagatttggtcattataaacgtattcacttcttcagtgagcatttgccatgtgaaagcctgtagggctacacaaagaacttcaattctagagtaaggtggatgtaagtgaaacaaacccacatataacaactgaaagccagagtgtggaaagtgacatgagatgatcccagaaatgctatcaaagtttaaaggaggacaaatggggagactatgttgaagaacatcagccttctagtcagacagaggtggattgattcctggctcctatacaaatcatacagcctttccaagtctccagttctctgtgcatgtgacctgaagggtagttgtaaggggctgtgcagctgctgcagtgtcttgttagcctgctcctttcctctgttcccagggggccagtgtactccctcttgtccgagacccatggccccattttaact

SEQ ID NO: 151587 - DNA, 357 bp, Homo sapiens
cttactacttgagcgtgaaaggcagaaaggggcaaaaggaacctccccaaatctggaagtcttctggctggcagggctggcatgccttctccaccagctcagggtatgcagggatgcactccatcccgatcacccccttcctgggcccaaggcagggaagcggaacttgcagctgaacccttgcaggaaataagagattcagggtaacagccccagtccgggcacagagatgctgaaaagggaccctctgccaccacttccctggatgatcctggccactccccaaaggtgcccagtctccctgtttgtaaagtgtaattgctaaaaagaggtatcccgagggccactatagcccca

SEQ ID NO: 151588 - DNA, 433 bp, Homo sapiens
cttccctggagatactttgttctgaagaactaagggtgtgtatttagcaccaagggaccccagctgctgatgtgaaggtgaacttggactggatcttgttccttagctcctgtcattttatttcattttgattcctgtggctagtgggaacttctgtcattttagactggttaaaatgcctaaccagagctttattttctgatcttgagtccacatcttgtagcttggttagaactggagtttgctaagcttctgtagcaataattgcatgggtcacctccctcagtgggcagctccactcattccatactgctttacctgtttcagtctgagtgggagatctttcctgaccttgatcccaaattccaggtgcttgttactgtagctctgtcttcagttcagcccttgtgccaagtattggggagtgagctgt

SEQ ID NO: 151589 - DNA, 323 bp, Homo sapiens
gtgttaaataaattatgtttcgggggcagctattttataacgaggaagcaggttttgaaagggataagggcatgaggagcggggtttaaagtataagagaagggggggcaggggtttaaggcaaagagaacaaagaatgaagaggggtaaagggaggaggatctgtgtgtgatgagggcagacggggttcagagaggaaaaccaaggcgggctggtgagttgtgtgtgtgaaaagcctgcgggccctgcacctggacatgaccagtaagcctgggaagctaggagctcgagagcaggccaagaaagggactcgggaggcagca

SEQ ID NO: 151590 - DNA, 332 bp, Homo sapiens
gagacctttctgagaacacaggatctgcaaagaggtgcctgggcttcaggggaacgaggcaagggcttctggtcccagctacccacattgctggcctggggttcctggtgccttcaggattctgggtcactgcagcagagcagcctgctgttgtcagaggtgtttgaaccagagcaactccatcttgaataggggctgggtaaagtgaggctgagacctactgggctgcattttcggacggttaggcattctaagtcataggatgagatgcgaagttggcacaaaatacaggtcataaagaccttgctgattaaacaggttgcagtaaagaa

SEQ ID NO: 151591 - DNA, 553 bp, Homo sapiens
caacgatggtcctcagctgggtgtggtgtcatgcctaagtgggcagatcatgaggtcaggagttcatgatcagcctggcaacatagggaaagcccgtgtccactaaaaatagaaaaattagccggccgtggttgtggtgtgcctgtagttccagttactggggaggctgatgctggagaattgcttgaaccccagaggcagaggttgcagtgagtcaagattgcaccactgcactccagcctaagtgacagagcgtgacttgtctcaaagaaaaaaattaggcgtcatgacagccacctgtaataccagctacttgggaggctgaggcagaagaatcacttgaaccttgggggtggaggttgcagtgagctgaggaccatcgtcaacgatggtcctcagccttccaaagtgcccaggttacagtcatgagccatcatgcttggcctaaccatctttttaagagttatataatattctgttgtatggctgtatcattgttaagttaaccagccctctattaatggacatttatttgtaatctttcactattatt

SEQ ID NO: 151592 - DNA, 134 bp, Homo sapiens
agtgtggggcagcagcatagtcacttcagtgcactgactgcatgacagagtccagccccccttctccccacgttctatctgtggggggcagcagctggaacaaaaccaagacctggatgaagcatagcataact

SEQ ID NO: 151593 - DNA, 215 bp, Homo sapiens
agatggagaaaaaagggaaggtgggtaggtagaaagataagaatggaaaatagaatgacaagtacagagaggaaaatggagatatatgtggaaaagtacagaaggctccaaacagagaggcagaaagaaaaaggaactgaagttccacagggtctgaggtttcttactcttcattcactccctgcagtttattaggtccaaagcaccagcgctta

SEQ ID NO: 151594 - DNA, 252 bp, Homo sapiens
agacgaaggttgccgtgagtcaagatagggcctctacactccagcctgggtgacagagcaagactgtctcaaaaaaacaaacaagcaaacaaaacaaaacctcaaagtccctcctcagggagcctccagtgtggactcaattgtaaaacagcacccagccattgatcaccatctgaaggcagcccacctacttgaccacttattatccaactcccacagtggactgcgagccccatggcgtccaggccagcg

SEQ ID NO: 151595 - DNA, 397 bp, Homo sapiens
tttttttgagataagatctcgctgtgtgcccaggctggagcacaggggtgcaacaacagctctctcgacctcctaggctcaagggatcctcctgccttagcctcccaagtagctgggattataggtgcatgccaccacacctggctaatttttctatttttttttttttttttttttttgtagagacaaggtctcactatgttgcccagattggtctcaaactcctgggctgaagcgatcctctcgcctcagactcccaaagtgctggcattacaggtgtgagccactgcgcccggccctcatctctttcaagatcaggcccatctatgggtcacagctgcaactccagtgcccagcacagagcctggcacataggaggccccataaatattcactg

SEQ ID NO: 151596 - DNA, 272 bp, Homo sapiens
gctcttaccggtgttattgatgcacctgggtatagtgttggacgcctgtagtcccagctacccaggaggcatgggaggattgattgcttgagcccaggaggggcgactgcactccagcctgggaaacagaatgagaccaactggaaaaaaagaaaaaaagaaagaaatgctaagaagaaagtcctatggttgctagtaatatcatcgtgattttaatggatggtgatagtaactaggattatataaaggttctgtgacattagccgataaca

SEQ ID NO: 151597 - DNA, 304 bp, Homo sapiens
ttattgatgagtttcctttcacatttggaggcatcctgttggggaaactgaagaacagatgttaagtgtgaagtgtctccctccttagttcatattcatatcacattgtttgagctgccacatgtaaacaatatagacactaagccaactggtcctctgcctactgctgacgtggcagaaaatatctaggaggtagtcagaggggcatatgtatacctgttaagtggtctggttctccaatagtcatgcaaatattgctaaatttgtttcactcctgggaattcaagcttctatttcagattcc

SEQ ID NO: 151598 - DNA, 557 bp, Homo sapiens
atctaattgtcaaagtacagaaattacatgggacaatgggacagatgaaatgacatcatgaggaagccatcagcaaaatccagacttgggaaaaccctacaggacaaaccacctggtttttccacatcataaaaagaaacagagggaacctgcaaagtacaagagacgtaagagccactttagcctattgcaacctgtggatttagctggatcctgcttcaaagaagcagtaaaaagaaagcacaggctgggtgcaatggctcacgctgtaatcccagcactttgggaggccaaggcgggcagatcacttgaggtcaggaattcaagaccagcctggccaacatggtgaaaccccgtctccactgaaaacacaaaaatcagccaggcgtggtggcaagcacctgtaatcccagctactcaggaggctgagccaggagaatcacttgaccacgtggggcagaggttacagtgagtcgagactgcatcactgcactccagctgtgaaactctgtctcaatcaatccatcaatcactcactaaaacaaagggcggacgat

SEQ ID NO: 151599 - DNA, 275 bp, Homo sapiens
cagcctggtcggaaccaccctttcctgggtccgcctcctgcctggactgtgagccatgtgtggatggggtcaggtctgtggtgctcactgatggttctccagagcccagcacaggttcgggcaccaggaaagggaggtaaatattgatgaatgtgggtccgggcatggtggctcacgcctgtaatcccagcactttgggaggccgaggcgggcagatcacttgaggtcaggagttcaagaccagcctggccaatatagcgaaaccccatctctac

SEQ ID NO: 151600 - DNA, 182 bp, Homo sapiens
ttgtgcggtctttgcgccgggatccctgctgtcccgggattcgggatctgactctccccctgagggagctgcccttcctctctcccctgaactatctactcgcccattttccccccgtcctccgcgaccggaatccggaggcttctcacgcctctccgtcatcgtctcccgtggtcccacct

SEQ ID NO: 151601 - DNA, 519 bp, Homo sapiens
tcagggcctatgcacttcctaattctgcatgcaacactctccagagagctgaagagttcactgtcactaccttcagacgtttactcaaagatcaccattccagtgagagcttccctgaacagcatttctaaaagtataacatcccaactcccaagaccccccagagcattctctatatcgttttcctgcataatttgtctccttatcacttttcaccatctgttataccatatatagtattttactttatatagtatttcactggtataatgaaaactttaaatttctcagtatctccacatcacccagtggggtgttaaatactcactggagtgttaagaaaaagaggccaggcgcactggctcacgcctgtaatcccaacatactcgggaggctgaggcaggaaaatggcatgaacccaggaggcagagcttgcagtgaaccgagatcacgccactgcactccagcctgggcaacagagcgagactctgtcttaaaaaaaaagaaaaagaaaaattc

SEQ ID NO: 151602 - DNA, 811 bp, Homo sapiens
tttaacactttttacttcaaagaaaatcacagtgcaagcaatctgagtggattcatcaaaagttatacatgaatattctgcagagtctggtgttgctgaaagttttgatttgtgttctgctgagacacaaccatgaaaatatgcacttgcttgtattccgaagaggatagttccagtgagacttggacaatgagcagaaaaaatttttttttgagacgaggtgtcgctgtgtcgcccaggctggagtgcagcggcgcgatatctgctcactgcaacctctgcctcctgggttcaagcgattctcatgcctcagcctcccaagtagctgggactacaggtgcccgccaccacacccggctaattttttgtatttttttttttttagtagagacggggtttcgcagtgttagccaggatggtctcgatctcctgacctcgtgatccacccgcctcggccttccaaagtgctgggattacaggtgtgagccattgtgcccagctcagaaaatttaatagtactagatctcgtgtgtgtgtgtgtgtgtgtgtgcgcgcgcttaggttgaaggtggaatttaacattgatttaaaaaaaataatagtaggaaaaaataaatgcggtttgagtccaaagcagcatttttcactaattttatgaaggaagtccttttgagtaatgtcttaaattaggaaaatggcgtacttttacatgttagacattaaactctagggcagataaccatgccctgtgtgttgtgtatcaagcttagcatatacataggaaaagatgtattgtgagagtgtcttacat

SEQ ID NO: 151603 - DNA, 543 bp, Homo sapiens
cttaattatttttcatacttcactacattccagataagcaaacttaccaactgtaaaagaagcaaatttcccacactgatttaaataccttcacctatgatcaagacctgataaatgcatagttcaaatttctgtaagccatacatgtacaaattttgcttctcgaaatgattgttaactccccaaaaggaacattatccattttacatttgatttcattttctcatggcactctgcatagtgcctttaacacattccccttctgaaacaacaaaaaagattaaacttatctgggcaataaacaaggataccaatttatctacatctccttgttaaaacagaattatcaaaaagaaaattaaaacaataatctaagacatagatcccaaattttaagatcagactttaaatgacagtgaaacaactagcaacctcatgacaaagtttatttaaggccaggagcagtggctcacacctgtaatcccaacactttgggaggccgaggttgacagatcacctgaggccaggagtttgagaccagcc

SEQ ID NO: 151604 - DNA, 434 bp, Homo sapiens
tggggcctcctcacagcttctcagcggtggagtaaagcaggtcacgaggatcagagggtcatggggcaggggtcacccgcagccttctgaagggccacatggcagatgtttcaggctttgcaggccctggggtctctcttcaactgctcagctctgaaagcagccacagacgaggtgtcagcgcatggtcgtggatgtgctccaacaggacactgccttcagaggcgggcagcaggcccaccaccccctccaccctctgctttagggcatggcgtggccaggagcacacatctgcgcaccagaccacgtgatgtgcttccagcttgaaacccgggggttgcttcgtgctggtgcttgctgtgtggatcacagtgtggagtgcgttgagatatatagacgaatgagaaatggccctgatggcagagcgtgcggtc

SEQ ID NO: 151605 - DNA, 336 bp, Homo sapiens
cctgtaaggtggggataatggtgatgtctgtcgcattgggctgttgtcagcagcatgagttcgtgcgcctaaaggtctaaagtgcttaagagggtgcccctctttctcaccaatgctgattggcaccggctaattgccagggtacccagcttagactgggtgtggttcctgccgtcaaggagtgcacagtgtgaccaggggacagttgagcgccccaaacccagtggctgcacagtcagtgatgagatgagatctgggagcctggagtggggtcaggccgaggggtgtggggtaacggacacttggcatttccaggctctgtgcggtgcctggagg

SEQ ID NO: 151606 - DNA, 125 bp, Homo sapiens
gattacgactcgagttcggtacctctccacactggcctgggggaggcatgaaggagccctctggggtgctggtcacttgcgttgcacacacacggaaacacagagcttcagatgtgtctcatact

SEQ ID NO: 151607 - DNA, 355 bp, Homo sapiens
atgtcttcccaggcatgacaaaagtagagatctaaatacaaacactcattaccattaaaaacaaaacaaaaaagaatactaataaatttgaaaggtcaacatcatcctgggcaaaaatatatctaacaatacatctgagaaaaaaagtggtaaaatgtggtaaatgttcataatgttcagtttaacactccctttcatctaggctggacagcattttgggtctacattctcgaagcaggagccagacgaaaagcaagtgagtaaataatgtttggggaacattatcattccggataaactggacaagtcctctggccatcaggctctttctcactttcctcagaggccagctgag

SEQ ID NO: 151608 - DNA, 277 bp, Homo sapiens
ggtttctttcccacatcatatctgaggaatcaccagctggtgtttgctgagaattccttattggatacttaaaatgtctttaacccagaactttgcttctgtgaacatttgctgttttccccgaaagcaaatgtttcagagaccaacttttagttttgtaactggctttgtctgtctgaatgtgcaagctatcatctcagttacaggacagtatgttcacataccatcacagggccatttctgaggccagatctcctagggaacatggcaaacacag

SEQ ID NO: 151609 - DNA, 467 bp, Homo sapiens
cgactccagaggatacacagacgacgcagagaacccaatttgtagtcttgcggttttcgggagttaagaaagccgccttttgagacggagtctcgctctgtggcccagtctggaggaaggaagtaatattgtcaccctcacctatagaggacaggttcccgaaggtttcctgcatcacatctctgtagagattcttctgggaaggatccagcaaagcccactcctcctgggtgaagctcacatctacatcctcaaagaccactgagtcctaaaacatctcacacatgtaaaggaggatgggtgagactgacagcactgggggcctagactctattcctaagaagttcccatgatgctgtggactccagacatttattccatgacttggttatcacttggtgtatacccactttcttccataaagcgattctgatgctaaaactgaactaagcaataccaacagcaga

SEQ ID NO: 151610 - DNA, 430 bp, Homo sapiens
atgtacaaagggattgtattaggtgatcttgagcatcactttcagctctaaaaagttcttatattgccaaagctaggtagtacgttcatccttgttctgctcaaacattaaatgcttaaatgttgaattaatttcttctctgattcatcacaccagtattgatattataatattgtgacatcattcctactggtcacaaattcatctattcattcaacaaatatttatcaaaaaaaagtttatcagatacctacaatgtgccaaaccctgtttttttcagtggagattcagtgatgagaaactaaaaaaaaaaaaaaaaaaaaagaaaggcctttgagcatatattcacatatattctagtgttgtagagcatcaaaataaatatgtagtataatatcatacaatgataagtgataaggaaaataaaggt

SEQ ID NO: 151611 - DNA, 316 bp, Homo sapiens
gggccaagggataaggacttcaccctgaaggcaatggggagccttcaaagggttttaaaccctttgagttaaaatgtactttacaaagatccctggcaccatgagggaaagagggaaggaggaggctggagtcttcctgcaggtgaaagatagctgaggacggacagaaggagacagatgaaagagtctctgagagggcagacaggacgttccaggatgcaggagggcaactaggaaaaggggggagggggaggaaggaggagcacaaggtaccccctgcaactctggccaacccagtcctgcatggaaaggccac

SEQ ID NO: 151612 - DNA, 412 bp, Homo sapiens
attcatttggaagagagatttgattcccaaaagattatcatactcttcaactgtagtgagattatggtgactttgcaccagagtaatgttatgctaaaggcattgcagtagaatgatccactggagattaaaaacctcattctgtatcataaaacaaagacctccatcctcagtgaacacattatctaaattctactccaccaagaatgtatctctagttaagctgtttccttgcccgaaaaagcattatcagctctgcattgtttacatctttaatttcacaccctccatgatttgacaccgcctgtttctgatcatgttcacctctcattgtgcccttcgttgcagttacctggtacagttgctgttttctaaatataccatatattttgtctctctactcctgccacca

SEQ ID NO: 151613 - DNA, 294 bp, Homo sapiens
aacgaatggtcctcagctgacaccatcagaagaaaagttcctcagaagaaagccgctcttgtttttttatagctctggagtctggagaaaactttaaattgccttttaaaaatacctgctgacctttaatcataaaaaagaaaagctgctcaatctcactttaatttttaaattttaatcacaattttaatgcaaataaaaaccatactgagataccagttttcatctctcagatgggtaaaaattcaaaagttagacaatactcactttggaaagtaggaccattgagttcat

SEQ ID NO: 151614 - DNA, 193 bp, Homo sapiens
agttggctgtgactgtgggtggaggctgtcttggaagctgcggatggttgtggggcggtgtgggccacttgttgccactactcaagcagtccctgtgctatccttggcatggtcgtagcctagtagacccaataaagaggaacagagactccccaacagtaagaagagagagggtggccacagtttacgaggt

SEQ ID NO: 151615 - DNA, 177 bp, Homo sapiens
cctcttccaggggggcctggagcagccctccgccccaccgagagccagctgtgcttcccgccgcgcgtcctgaggtcacactcctgccctttgccgaacgcacctgcgcccgcggagcgcggggtgggcttagaagggcccccaaccgcttttcttccgggaaccacgcagcgggac

SEQ ID NO: 151616 - DNA, 235 bp, Homo sapiens
cacctggggtctttgcagacatctggggccaggcaggggagggggctaggaggagaggggctggccacggcaccctgtacatgctcactggtacacacaggtctgcacgggtacacacacaggcagacgaagaagtgcacacgtctcagccccacaggcccacccggtaccagggcctccattccaaggggatgacttgggggtaacgggaggagggagaggtgtcgcagacgcc

SEQ ID NO: 151617 - DNA, 459 bp, Homo sapiens
aacaggagggaagggatagataatggcgggtagtgttctttgaatgatatgtgtacccatttgtgacaacatctcttaaagttgaaggtctacacatgtgtatccatattagcatatgaacttcatcagacaagcactctccctccaacagagggagaccctgtctcaaaaaacaaaaaaaaatagcctttagagtcagacagacctggaatcaaattctagttctgtttcttaatatgtaaatgacctcaggtaagttgcgtaaagtctcaatttagtctcttcatatagagaatggggcaggccgggcacgcgcctataattccagcactttgggaggccgaggtgggtggatcattggaggtcaggagcttgagaccagcctggccaacacggtgaaaccctgtctctactaaaaatacaaaaaaaatgagccgggcgtggtggcatgcacctgta

SEQ ID NO: 151618 - DNA, 490 bp, Homo sapiens
tgatgactggctctcagacccacctaggaaccagtcaggaagtaaaagtcatgtaacatgcgaacaaaacaggggaaatgccaatatctggtatttacttacttgactctgaaagatctcaagccaggttaagcacctcctgggtgataacccatggcgggggagatgggtacacacagatatttcatttttattgttttgggtgtcagtatttttaacttacagattgagttacagaccctggttggtttccttctcggtctactccgcactttcaggacccatttgcattgccacgtgcagtctgctccagtgcctctgatagctgcctcgtcctctctggggtgcacccccacatctgatctgtccaccccctgccatgggcacctgattgcagtcaactcccggccaccacaaacaatgttgacaaggccttcttatcgccctactttgtctctgggctgtgtatctgtggctggagagggcctac

SEQ ID NO: 151619 - DNA, 194 bp, Homo sapiens
tgacaccccacaaagaccacaccttagaaaaatggaccacactgaagaaatataaacaaagctcaaacagacctaacctaagaaaacattataccaggccttgacagaacaaagatgaagagctgataatttaactgcctcttagaacaaaatgtgacatctttcaaaagaagacaattcacagcttctacaac

SEQ ID NO: 151620 - DNA, 437 bp, Homo sapiens
ccacatatgtgatatcatgatagcatgaggtttttattaaatagtttttgtactgaagtcctaatttagcatgtaaaaaacgattaagtttagtggcatatatactacatgaaaataaggtattcacaaatttaggtaatgtcttcctattcttaagttactaaaattttgctcctggactctttttctacactcttccaaaatagtccatccaatactgtattttaaaataccatccatgtgctgatgactaccatatttatatctccgatcctgacttctctcttgtacactgctgtcttgtggacagctccacttggatagctattggtatctgaaactaaaattatctaaaacagaatttttatccctctaaatctgttcctttctaagtctaaatgttactaccttcttctcagccactcaaatcaaatatc

SEQ ID NO: 151621 - DNA, 304 bp, Homo sapiens
tgtttattatgcatgtaatatgtacacatgtagtgtgcatttatatctactagctctgcccactaaaaagactagaaacaatgaccaagccagtagcaatgagtatcactggcactaagcatctagcttgccttaaaatatcatttccccactaaaagaagtcaggagtttttggaaattgactgattccaggtttggggcataaaacatatgagcctaagaaatcttgtcatactacaaagaaaaatagctaccccaaactaggaaggcctgtcaaaagaactaagaagacaacttgaagatg

SEQ ID NO: 151622 - DNA, 252 bp, Homo sapiens
catcttcccttttcctcctctctgggtctttgtccgaagtgccccaatgcttataataacttcctcctgctgttttgcacaaaaaaatccatctggttctttaagcatttctcaagtttgattttctttgggaagctttccttgatcaactctatcaatccttaaacgacctgcacaatttcagccctgggctctccctacagctctccttccatgtccctcagcaggctgacacctggggcatccgcttgc

SEQ ID NO: 151623 - DNA, 184 bp, Homo sapiens
atggttcttgcctctcggtacacctgctttcctgttccttactctacatactggatggaagatggcctcccagggctgcctggtgtccacctccttgaacctcagcctccattctgaagtctgtgaaacaatctgatttgcctgcaatcccagcatttggagaggtcaaggtgggcagatcgct

SEQ ID NO: 151624 - DNA, 460 bp, Homo sapiens
accatcctccactgaaagtacccagggatccttggaggagtggctgctcccaaggccgagactgggaaggacacaaggagcctggaacaggagttaagacagagctcaaaagctgaagggggcgtgtcaaggacacagcagccagcctgaaagggttctcacccaaactgggagtggcttgagcatcaattgagtatgtcaggaatggattctaacacatgcagtcataattttaaaaatcccggagtccacattggtactattactactattaataatgatgatgaaattaaagctagtaaaagggaggatgggcaggaaagagcttctttacaaaagaatgccaactaataaatgtggaaagaatgacaaaaatggtaaatagccattttacggacactctgataagtgtttcactcaagaatcatcaatagatgctaaagctatgaaataaaagatt

SEQ ID NO: 151625 - DNA, 205 bp, Homo sapiens
aatttgagttgtttcgagctgcaacgttggatttgcattgttgtaagcacactttcttgctgtgaccactgacaccaaaattagtttgggcccagggagacttcagttaattggttcatttgaggcttagccctggactcatttgtcaccagccaagataacttgccacatggaatacagccagaccaggggtccccgaccccca

SEQ ID NO: 151626 - DNA, 623 bp, Homo sapiens
gagtggtagcaaaacctttgctaagcctggaattcatctcagtttggaaagctgctttctaatagaaggaacttgctttaatttgcttttgctatgtctatggaaggtcaagtcagcagatggtccctgctttaaggggtaaaccaaacaagagttcgttctagcattttggcagggaaattttcaaggacattgttaaaacacctgcttggtgcttcagtctgaatgcttttggcatcactgggagctttttgaaatatgtattttcacttataacagtaattagttttagtcacatggagatttaaggataagaatattcagttttgtgttgatgggtaatttagcctgtgcatatttttataccccaaaattgttctgcaagcctcatagagaaagtggtttgggtatattcagtgggtggcttagttatttcaacaagttggcaaattctagcatataatttcaaagagttccatttgaaacaaatgtttgatcaattattagcttcttgttttcctgcttgtcttgctaaaacactcaattaaaaattgttcaacagattccttctggcatataatctggggatcatctctcaaatttcttacgctggaattagataa

SEQ ID NO: 151627 - DNA, 254 bp, Homo sapiens
gtagaagcagggagactaggtaggaggctactgcaataattcaagcaaaagatgatagtgacttagaccacaggcagtgatggaggtagtaagtagtggttggagtctgtatatgttttttaaacttgttatttttgaataatttcagatgttaaaaaagtttcaagagtattacagaaaccttctgtgtactttccactcagattcccattattaacattttaacatatttgctttatctctcttactgctct

SEQ ID NO: 151628 - DNA, 251 bp, Homo sapiens
tttcaaactgtattaccttcaagaataagttcaagtgtgttaacctggccttgaagatccttcacaattacatcctccctgaccatatcctcctctcttccctcaaaccttcccaaatcttttcagcataaacttaccatcagttcagataggttagtgccacacacctgcaaataagtcctcccccactgtaaatactctcctttaaggtgggctgaattcctacctcccggaaagttagttaccttgtc

SEQ ID NO: 151629 - DNA, 308 bp, Homo sapiens
ggggtgggggcatccaagaaagattcattattactttaatttcttccctttgctaaggaaatctgagagtaatggctagccactgcacccagaatagggacaagtttttttaaagggaataaaaaagctgtcagggctactaagtgtaaaattagactttcaagctgtgtgttggttagcaggtgtgggtgtgtgactagaaaccagatgtcactctgtccctgtgcatggcctgttggctcaattcagagatgggctcagaataagtttcctttagaaactaagccttgctctatgtcctctttaca

SEQ ID NO: 151630 - DNA, 578 bp, Homo sapiens
ctgaagctctcaccagaagcagatgctggcaccatgtttcttgaacagcctgtggaactgggagccaaataaactgctttataaattactcagcctgaggtattcctttatatcagtgcaaacagactaagacagttttatttggtaaaacttctctgattttaatctcaccaaattagaatttataacaaaacattcataacaattttaatgtttttacctcctactctgtatgtaaacagtttgatgatcaaatgaataccatgaacaagaaggtatattaccttcttattatacctactcaagaaaccaaacattactgggtatatacccaaaggattataaatcatgctgctataaagacacatggacacatatgtttattgtggcactattcacaatagcaaaacttggaaccaacccaaatgtccatcagtgatagactggattaaggaaatgtggcacatatacaccgtggaatactatgcagccataaaaaaggatgagttcatgtcctttgtagggacatcagtgaagctggaaccatcattctgagcaaactatcgcaaggacagaaa

SEQ ID NO: 151631 - DNA, 547 bp, Homo sapiens
tcctgcaactttactaaattcatatattagtcttgggagttttttgtgtgaattccatggtattttctatatagacaattgtctgcaaatagagatagtttactttttcctgaaacatgtgagacttacttatattcttgccttcttgtactgcctaggacctctggtattaggttgaatgggagtgtgttgggagaaacaatccccataagccctgaatatccctgaacattcttgccggatatgctgagaatgcaaagccctaacagaactaccctttactccatccatttctcaggaaggggttgtagctagcaaccttgaggaatgaagtaatgacaccctagacaaatagaatgcaagcagacttgcttttctttgttataaaaatggcaactttcccaagctcagtgctcttcagctgtgaaaaaacccgtagtatacagagcatccacagtccctttgccagggacttggagggcaaggtgaattttcactgatatcatgctcatactgcttgctgcatcatgggtaatacagttctttg

SEQ ID NO: 151632 - DNA, 544 bp, Homo sapiens
cctgaggcatagtctcacagccaggcttccccctcccttgtgagcctgactcccctgcctgcatctcaccgtctcctttttccctgcctgccttcaccccaccaccaagaaggtagtgttttctattgtagggtggcgcccatagggacttttctttcatgtcctggaactgaacgtccctagaaaacagtaagtcatttgcttctgcaagcgtaggtgcccacggagcgctcttcaacacttcggagtgtggtcttctaaagtgggggtggcaaggtttcctcagcccctggagaccctgcctcatacccaggggttttccccacactgctctgggaactgaggggtaagagtccatgccggcctgtcccaccagctgccctcagttatctccttccatcggcagcacacccccgttctcatccacatgcagcccctgctccgatcctcagttcccccgaggagatatcaagttgttggaaggctcacctgtcctcggcccccctggagacccctgcaggactccctggggcctccttgatcc

SEQ ID NO: 151633 - DNA, 431 bp, Homo sapiens
tgtgtgtttaggatgtgtggaaaaagagggaagagaagcagggaaaccttttggggggtctctacgttaattattcttctagaagagaaatgaggatctaaatttaccacagtagcaggggaaaaagaaaggggattcaagactcatttttagctacagaatctgagccaaatttccttttcaatgaatagaggacaatgagacctatgtcacaagtcagtgtaccaatcaagagccactcataggcagatgcccagccggtatctagaccaaacaagagcaacacacaggcagatgcacagccgggtatctaggcctaacaagaagagcaatgcacaagcaggtacccagcggggtgtctagaccaaacaagagtaacctataggcaaacgtccagccaggtgtctagaccaaacaagagcaacctatag

SEQ ID NO: 151634 - DNA, 427 bp, Homo sapiens
atgctgtctcattgtggttttgattggcatttgtctaatcggtgatgttgagcttttttcccctatcacttgtaatatttagactttgctaactttagtcattttataaatagggaacaacttgaaaatagtgaattctgggggtggaggacaggtatttctcaagcaaaaagttctggtcctagccttaagtgtttgaaactgtatagtaatcatcttgtagacttcaggtagttgcatccaattaaattaaactggtacttctgtttccatttgtcaatatgcttgagtcttgtaattgtatgagagttcatccaacccttatcctagaaagtgagacttgtatctcactactgtgtccactgagagaggccgcaccctgtcctgtgtgagaccatttgtagcgtgagacagcatatacggagtc

SEQ ID NO: 151635 - DNA, 347 bp, Homo sapiens
tgctttatgcattttcaataacttttatatgttttcaacaattttaaaaatgattaactgccctaaataagacattgctaggtattcagttgtgttctgttgttttttaaatcataaattaaaataagaataccagaggaaaattggaaactaaaagtataaataataaaacacacacacaacaatctcccataatcattccccactcttaatattttggtcaagtttctttagctctgttttgctatatatattttatttaggtacagttagaaccacagtgtatatccagtttacagcttaagctttaaccttatattttgactgtatttttctatcctcaatgt

SEQ ID NO: 151636 - DNA, 425 bp, Homo sapiens
tcttttaggagcagaatctgaggatggagcaaactctccaatgaaaatggaaaatccccagggagaccggctaccaggcagagaggaggggcagcattcaagatggagagaccactctgcacaaaggcaggggtctactgggcaccgtgtgctaggaaacagtgagaaccccagtgtagctggactcccaggggtgtgggagtggccagagagggtgctttagagttgtgcagggctttgaaagccaaacctggaagtctggacctaatcctaaatgcaagatcggatgagtagcagggtgactacaccacaacaaagccagtacgggaaggagaagaaggaagagagagaggaggagagggggagcgggaaaggaaggagaaagagaaaagaataaaaagctaaaaccaaatacccatactcag

SEQ ID NO: 151637 - DNA, 239 bp, Homo sapiens
tgcagatattggggaagactttttagaagaaaggacatctcaacacaaggctgagaagtagttcaccaaggcaagtaaatgaaaagcacacatcaggctgagcatgtatgaaatccagatgcagacacaaggacctcttaagacctaaggtagtattactgaacaatgagagcctgggtttctttcacctgcttggtgtggtacactcttaaccttctcatctacctctctctccccag

SEQ ID NO: 151638 - DNA, 393 bp, Homo sapiens
ctagatgcaatttagaagaaagagcagagaaaggagaatttcacacaagtgacaataaggactggaatagactttgagatagggcttaggggaaagaacagagaaagaagtaatttatgggggaccataaagcctcaaaacctctcagtgaagaatattctagattcccattagagcagtgacactttgcatccagagctctggatgcaaagtgtcatggagctgtgggagttggcactctgtctgctggtggccctctcggctcacatgttcacagtgcagctcctggcagacttgggttttctctttggtggtttctaaagtgccttatctgcaaacaacttcttttctccttcaggaactgtgaatggctagaagaaggagctcagtaaa

SEQ ID NO: 151639 - DNA, 188 bp, Homo sapiens
ggctgccaccccctttgcagatgaggaaactgaggctcagagagagctcccttgtgcaagtgactagccaggcactggcagactgtgaggctcagcctagcctgtgtcccctgaacctggactccctgggctgttgtggggattgctattatttatagttaagactcataacaatccttttttttttt

SEQ ID NO: 151640 - DNA, 302 bp, Homo sapiens
aggtgacagaagaaccaggatatcatcaagatactctaacgatgtctactactcaaataagactatacaatagagatctgagatatccttctctactctcctcccaaagtgctaggattaaaggcctgagccactgcggctggcctaaataatgtttaaaaggaacttcaagaactatttctccattccctgttgcatgattgggaggtgggaggtggaggtgacatttggggaaactggttttttcttctctttacacccactgccattacttttgttggatcctggtctgtgggttctat

SEQ ID NO: 151641 - DNA, 399 bp, Homo sapiens
gtaggaggaggaagaggtccccatatatttgatgtcagaagtactgtgagtagatagatcatactaaggaaaaatgccttttctcctgtaacatactgattggagattaaagctataaaaacacagatacattttacgttaccaagatcacgctttatcctgtaagtttttctgactacaacctataaatcattaaacatagtacatatacacatatatgcttacacaccaattgccacaaaagcttcacaaaccagtatttacgtttatcatgagcaatgtattctgttattttctattctatttcatttttcaaaaaaatggttaacagtccaccagtgattctgtaacacagtgctattagcctgaaaacattctccctggtgtcgggctccatgc

SEQ ID NO: 151642 - DNA, 285 bp, Homo sapiens
agtgaatggaggggcagaacagagggcttgggtgctccacagggatctgcttttgttaagtaatgttaatctcctttgctgtctccccaaccaacaaaatacggtgtgctcaatgtattcttggaacatatagaaaaatgtaaagaaaacaaagcccacccattctcctaacatcacattgatgaaaaccactcctagcattggaatgcatttccttctcgtctttttcccccctcttccaaacaaaattgccaaccctctttctctttatatcctttaaaaaat

SEQ ID NO: 151643 - DNA, 291 bp, Homo sapiens
gataaacctgtgtgtgtgtgggaagctgttctacagaaacattttaaaaatggagtttatatttacctgcatcatattttaattcaaataaaagaaatataagcaccaactatcaaaaataatctctgggtttgcttatccacctgccctgttgttcccaagctcccgaaagccctttcagctttactcaacctgtgcctcagtctggctatgaccacccagtaacacactgtaccctttgctgactgtgagcttcgctatacccagtatcgtattccaagaccctattct

SEQ ID NO: 151644 - DNA, 269 bp, Homo sapiens
gtatttacaaaataaaggcagaagacggaagattaatttgggtccttctgtttataggcaaattgaacacctgcatttgcctcagactcctccaagaattccattaacacatcagcaacaacaacttttaagacactaacccataaaaataaagataataggagttctctaagttccacagcaagcactttggaagttagaaagcagaaaaacagttagttgctgacttagcagttagaaaagtcatgtctaaatcacctgtgaaaaaa

SEQ ID NO: 151645 - DNA, 2288 bp, Homo sapiens
gtcagaactaccccggtagcctgacagcaggagctcgagagaagcatggctcagcggtgcgtttgcgtgctggccctggtggctatgctgctcctagttttccctaccgtctccagatcgatgggcccgaggagcggggagcatcaaagggcgtcgcgaatcccttctcagttcagcaaagaggaacgcgtcgcgatgaaagaggcgctgaaaggtgccatccagattccaacagtgacttttagctctgagaagtccaatactacagccctggctgagttcggaaaatacattcataaagtctttcctacagtggtcagcaccagctttatccagcatgaagtcgtggaagagtatagccacctgttcactatccaaggctcggaccccagcttgcagccctacctgctgatggctcactttgatgtggtgcctgcccctgaagaaggctgggaggtgcccccattctctgggttggagcgtgatggcgtcatctatggtcggggcacactggacgacaagaactctgtgatggcattactgcaggccttggagctcctgctgatcaggaagtacatcccccgaagatctttcttcatttctctgggccatgatgaggagtcatcagggacaggggctcagaggatctcagccctgctacagtcaaggggcgtccagctagccttcattgtggacgaggggggcttcatcttggatgatttcattcctaacttcaagaagcccatcgccttgattgcagtctcagagaagggttccatgaacctcatgctgcaagtaaacatgacttcaggccactcttcagctcctccaaaggagacaagcattggcatccttgcagctgctgtcagccgattggagcagacaccaatgcctatcatatttggaagcgggacagtggtgactgtattgcagcaactggcaaatgagtttcccttccctgtcaatataatcctgagcaacccatggctatttgaaccacttataagcaggtttatggagagaaatcccttaaccaatgcaataatcaggaccaccacggcactcaccatattcaaagcaggggtcaagttcaatgtcatccccccagtggcccaggccacagtcaacttccggattcaccctggacagacagtccaagaggtcctagaactcacgaagaacactgtggctgataacagagtccagttccatgtgttgagtgcctttgaccccctccccgtcagcccttctgatgacaaggccttgggctaccagctgctccgccagaccgtacagtccgtcttcccggaagtcaatattactgccccagttacttctattggcaacacagacagccgattctttacaaacctcaccactggcatctacaggttctaccccatctacatacagcctgaagacttcaaacggtgagtggaacaggtttgagcagcaggtgggagaaaagaaatacacttgatgtgtccttttcctaccccatgctcctggcagtccacagaatcagggggaaagccaggatttggcaaaatgaaatggagacattgtagaacctaacccatctactgtccttattgccagagtctcattgtcaccccctagaatttatggaaattggcccctcttttacaaagatggagataattgggtgattggggagaacctggtggaatcggtacccttgggtgctaatcccagctcttcctctctttgggagagggcttatcctctggaccccgttttctccacttacaaaatggggagactcctcagcattttctgaaatgcagacacatatgaggtcaaaggtggatgcgtgttttgacttctcagaagaaagcactatggaaatccaagatcatccatggagtcaacgagaaaatctcagtccaagcctatgagacccaagtgaaattcatctttgagttgattcagaatgctgacacagaccaggagccagtttctcacctgcacaaactgtgaggtcaaggggcctgctgggttaggcatgcccgaccccgggacaggactaacccaagggggaaagctagtgttgatgaaacttttgatcaaaaccacattgtaaaacattgcccatctgtcttgctcactcttaaactctcccaagaacaaggccggggtaaggtaaagtcagcagaaatctggcttctcccttcctcccgacatctgcatcccttgatccactggcatttgctgccctcttgtcccttatctgtcttatgctggttatttcactgcttcaccttcca

SEQ ID NO: 151646 - DNA, 2149 bp, Homo sapiens
gtcagaactaccccggtagcctgacagcaggagctcgagagaagcatggctcagcggtgcgtttgcgtgctggccctggtggctatgctgctcctagttttccctaccgtctccagatcgatgggcccgaggagcggggagcatcaaagggcgtcgcgaatcccttctcagttcagcaaagaggaacgcgtcgcgatgaaagaggcgctgaaaggtgccatccagattccaacagtgacttttagctctgagaagtccaatactacagccctggctgagttcggaaaatacattcataaagtctttcctacagtggtcagcaccagctttatccagcatgaagtcgtggaagagtatagccacctgttcactatccaaggctcggaccccagcttgcagccctacctgctgatggctcactttgatgtggtgcctgcccctgaagaaggctgggaggtgcccccattctctgggttggagcgtgatggcgtcatctatggtcggggcacactggacgacaagaactctgtgatggcattactgcaggccttggagctcctgctgatcaggaagtacatcccccgaagatctttcttcatttctctgggccatgatgaggagtcatcagggacaggggctcagaggatctcagccctgctacagtcaaggggcgtccagctagccttcattgtggacgaggggggcttcatcttggatgatttcattcctaacttcaagaagcccatcgccttgattgcagtctcagagaagggttccatgaacctcatgctgcaagtaaacatgacttcaggccactcttcagctcctccaaaggagacaagcattggcatccttgcagctgctgtcagccgattggagcagacaccaatgcctatcatatttggaagcgggacagtggtgactgtattgcagcaactggcaaatgagtttcccttccctgtcaatataatcctgagcaacccatggctatttgaaccacttataagcaggtttatggagagaaatcccttaaccaatgcaataatcaggaccaccacggcactcaccatattcaaagcaggggtcaagttcaatgtcatccccccagtggcccaggccacagtcaacttccggattcaccctggacagacagtccaagaggtcctagaactcacgaagaacactgtggctgataacagagtccagttccatgtgttgagtgcctttgaccccctccccgtcagcccttctgatgacaaggccttgggctaccagctgctccgccagaccgtacagtccgtcttcccggaagtcaatattactgccccagttacttctattggcaacacagacagccgattctttacaaacctcaccactggcatctacaggttctaccccatctacatacagcctgaagacttcaaacgcatccatggagtcaacgagaaaatctcagtccaagcctatgagacccaagtgaaattcatctttgagttgattcagaatgctgacacagaccaggagccagtttctcacctgcacaaactgtgaggtcaaggggcctgctgggttaggcatgcccgaccccgggacaggactaacccaagggggaaagctagtgttgatgaaacttttgatcaaaaccacattgtaaaacattgcccatctgtcttgctcactcttaaactctcccaagaacaaggccggggtaaggtaaagtcagcagaaatctggcttctcccttcctcccgacatctgcatcccttgatccactggcatttgctgccctcttgtcccttatctgtcttatgctggttatttcactgcttcaccttccaggcttgacttaacaaatgtagatttgagaaatctcaaccagttgttacctgataggagtctttaatttagggcactcttgctgggatgctttctccagagcttatatatttcttcttactagaactttcttcccccttttattcccctctcttcttggactcatgagctgtctcttcatctctcctctctctcctgcatctctccccttactcttcaatttattctacttctggacctggacttacccaaactgtgatactaccataattgtcaccataatcagtcaaataaagtgatctgtgcatca

SEQ ID NO: 151647 - DNA, 357 bp, Homo sapiens
caaaatgttaagattggtgagattaaaaggattgtgttcttttttgtgcttctctgtatttttcacactgagatgaaaagttaatatttaaaagaggggcaaactttctatgccactatttttatcttttatcatattctcagtacaacttttcccaaaccaacctcatgaaccaaatactctgaatacttactattttctcctggtattgaaagaacttacccttttctatgtggtcatttcctccttcactatcagtttgttctcactgatgtttatgttcacatgtagatcattcattccattctgtaaaccctttccccagccctgcttggcccatccagctgacacctgagc

SEQ ID NO: 151648 - DNA, 604 bp, Homo sapiens
aaagggcattctaggtagatgagaaaagacacagattttgagaggaagctctattcatagttttgtagtcatctgatgtggttagagaataggccaattatggagagtggtaccagataataagctgtggccacgttgtgaaggcccttctaggatatgctagtaagtgatatgataagatctgtgttttaccacccccaaagctggcagaagacaagaaataaccaaaatcagagctgaactgaataaagttgaggtgcaagaaaccatacaaaagatcagtgaaaagagaagttggttatttaatataataaataagattgctagactgctaactagactaatacagaaaaaagaagatccaaataaacacagtcagaaatgacaaaggggacattaccacctaccccacagaaatacaaaaaaccctcagagactattatgaacacctctatgcatgtagggtagaaaacctacaataaatggatatattcctggaaatatacctcctaagattgaactagagaaaaattgaaaccctgaacagagcaataatgaattctgaaattgaatcagtaataaaaaacctaccaaccagaaaaag

SEQ ID NO: 151649 - DNA, 101 bp, Homo sapiens
agggtacacaacagtgtgaaagtacttaatgccactgaatggtacagtttaaaatagttaaaatggtccaggcgcggtggctcacacctgtaatcccagca

SEQ ID NO: 151650 - DNA, 484 bp, Homo sapiens
ccccatctcaactgatttcccactgtttttttttccttcttctttttgagacggagtttcactcttgtcacccaggctggagtgcagtggcgtgattgtggctcactgcaacctccgccttctgggttcaagtgattctcttgcctcagcctcccaagtagctgggatgacaggcgcctgccaccacgcccagctaattttcgtatttactattagtagagacggggtttcaccatgttggccaggctggtctcgaactcctgacctcaggtgatccacctggctcggccccccaaagtgctgggattacaggtgtgagccactgcgcctggccgatttcccactctttaagggtccgaaccttgtgaagagtaattgaaaaataggagtaggatggagacattacaacaaagaaaccatgcagctatactgcctagttcagtgccaggctacataatagttttttcacagactagtaagcaaa

SEQ ID NO: 151651 - DNA, 399 bp, Homo sapiens
cctgggtggagggtggacgggaagcggggggccttctgctgaagatctcaattaaactttggactggctcatccagggaggtggcgcgatttcctctggaggtttaaaataaatagcaggtacttgatttcatctggaatggagggtgtggccctgcctggcactgggatggacccaatggtctccccagccttctttgttctgatactacacaccccacccctcaaccgcctgagaaatttctggaactgcgtttagtctcagtacattaggattattgctagaaataaagcatccctggatcctttggcttcttggacaatatgcaggaaaacacccgccttctcttagacatgtagggttcgcgccgttgacctgagcttcagtgccagagagtcg

SEQ ID NO: 151652 - DNA, 515 bp, Homo sapiens
agcttactaaatctaaggttccacagagggcttttggaccctgtagaaactttaaaacatggcaccaaaattcctgacactcctcttgagaagtagggcctatgtaccctctccttgaatctgggctctgtgtgtggttgactgaaagaatatggtgaaagaagagttgctgtggcagtttctaaaccgaggttttaaaaactggcagtttctactccccatctcctggaatgtttactcttgaagagtaacatttagccatcatgctgtaaaaagaaacctaagcaactcatggtaaactccatggtctttagggaaagagcgtttccacaatgttagggagagccaagaaaaatttaaatagtgtattttccagcttcccgtctctacaccaaaattaagtattgacactcacaagaggaaaaaagttatcctctgtcagccatgtgaatgagccttcttggatatggatcctccagccctcagctgagctgccccagctgatgccatgtggg

SEQ ID NO: 151653 - DNA, 177 bp, Homo sapiens
tcagcatgtttctaaagaaactctcttttgtcatttacacaagtggcctgagtgtcatgctgctgacaagttaagaatgactatagataagttatgcttataatgctgccaccccaaaaatgaggcctctcagcccgtaggcatcagatgtggcctctgtcaacagcaggagcttca

SEQ ID NO: 151654 - DNA, 436 bp, Homo sapiens
gagagagagagagagagagagagagagagagaacgaacctaaaaagaaaaagagccaggtagcatttccattatcaaggtataaaaacagttggatttatggacaatactcagactcccagtgctcacctctgtggggtatcaggaagcactcccaattcacagggacctacagagaggatagcagtgacaccgcacctgcattaacttttacaacagacctgtggtcttaaaggcaggaagggatcaatccctggaaaaagaaaaagtaactgaataaataagccctcgtgcctctctcctcagtcacctggtgatacagttacactcaagttaacatgatttttacatccacagttttcatgctaagcaattgtggtcagagtcagctttcacaccttacccatttagcatctctactacggaatacaactgtg

SEQ ID NO: 151655 - DNA, 473 bp, Homo sapiens
ccttttttatggctgcatagtattccatggtgtatacgtgccacatcttcttaatccagtctatcattgatggacatttgggttggttccaagtctttgctattgtgaatagtgtgtagtattttagatattatttagagagtagatagaaatttattatttcctccagatcagctggttgaaccttgttttcttttcttttttttttttttctttttaggttctacttctaagtgtataccttagattctagggtgtagagactatctcccaagtgcacatgagaagacacgtgcaatgatttttattgctatgtatttgtaagacagacaaattggtttatcagtcagaatgggataggttaagttacaggaacaaacagcccccaaattctatttcttgctcatactgcctgtccattggagtcattaggggctgctgctcgttgtaggcacttgaaaactgagacttgc

SEQ ID NO: 151656 - DNA, 616 bp, Homo sapiens
tcgactctacaggatctccaccgcaatctcatcagaggacttttaaacagcatttccactaggaaaagctgaagccttatgctacaaatttggcatcttttttattcgcaggctgaaattctaaccctcctccttcaccagtatctctaagttaccaagaactcaagatattttttagaagtttgatatcttgaccaagttctcttgaacccccactggataggtgacagaactagggatattccttaatgcccgtatgtagacatattttcagggcagggataagaagtctgctactacatttgtagtctgcaattttatgcaattctaaaagataaaaaaagaaattgaagtcaggagtacaatgtagaaattcctatctacagctgagaatgttaatcatatagaagtgaagttggggacagaatgagcattcactgaatcaagatatgagtagattaagattcagcttggtttattttgtaacaaatgtcttacacagcactggaaatatccatcttaaccacagatgagataggtgcaataaggaagggttcttttagctttctgaatagaaattaagatattatagctgttctagattgcggtgttggta

SEQ ID NO: 151657 - DNA, 257 bp, Homo sapiens
aaaagttccggcaagccctgtggacaggtttgcgaatctggactcagcttctgcaatccagacctcagtttcctcatctctaaaagggggagaatggtacctagagcatggagcagtgaggaagcccaggatgtgacgcacaggagctcgccaaaagtaagcactcttctttctgagcagcctgttttctgcacagacgcctgccttcggtatgtgatggtgcgggagaaacgttacagatttcacggtgagacgct

SEQ ID NO: 151658 - DNA, 449 bp, Homo sapiens
ttaagaagccctgcagaaggagagacatttggtctgggccttaaaggatgaattgaaattctaaacgtccacaaaatagaaaaagcatttcaactgtaagtaaggaccgaacaagaaagaaagagacacaggagtgcaaattttggggtgtgttcagagaatggttaataattcaatgcagccacagactggaggaagcagtaaaagataagatgggaatacgagacacaaagatgtgtcagatctgtgcagttctcttggcatgggccacatgatccatgtcttggcattatcccagtctaaagaatatgtctaacctgaaaatggctattcttctaaatctgtgatttggcttcctggcagaaccccaatatgggtgatgaacaacagtagtctaagaaaatcttgcaatcttttctatacccatgtatccatatatccttatgttg

SEQ ID NO: 151659 - DNA, 160 bp, Homo sapiens
ccaccatgttatggcagtacatccatggaataatgttactccaagaaaatttggcttttggaattcctccacaaagtattggccctagagtagtccttactgcctgattaacttttgcaagtttctcctgaggcaatgatgctagccaagtttctgaaag

SEQ ID NO: 151660 - DNA, 414 bp, Homo sapiens
gggatattgctcttttatatagggtggtcagagacggcttcactgataaattggcattggaactgattcttggaggaaatgagggattttgctgtttagctctttgaggaaggtatttcaggcagagataatagtgcacatctaaggccatgagatgggaatgcgcttatctggtttgagaaacagtaaggagaccttgtacagagtaggcaagaggaagagtggtgggagatgtggtctggggcagcgagcaggtttcttcaggaagggccttggaggctactggaggactggagaggcatgatacagtctgacttctgtttaaatgggattattccagcttctgtgtgaagagagtgctttaggaggagtagggtggaagcagcaagggaagaccaattaagggagcttcta

SEQ ID NO: 151661 - DNA, 160 bp, Homo sapiens
aaaaaagagaaataaaaagtattcagattggaaaagaagtaacacgatctgtatttgcagatgacatgatcttgtagagagaaaactcaaatccactaaaaagctcttaggaccaataaacaagctgaacaaagctgtaggatacaaaattaatacacaa

SEQ ID NO: 151662 - DNA, 484 bp, Homo sapiens
ttcttagcccaaccccaggaggggtggatttcatcatcccattccacagataagaccatggaggtttcaagctggaagactgagggtcatacctcaactacatggaggggtcaagttaggggccagagtctgccagaccccgggttcccatattgtatgagtagcaggctgggccaaatccctgtcagctgggggagttctctatggaattgagtgacccagagctctcagcatctgtgccaaaaaaaccaaatgacctcacttttggtggcttttccttctttggggaaggaatgtgctggccactgctgggagctacagcctgctgaggcctgtgtgctctcagacctgcaagggccagaatcagactccagacatgggggaggggttacagcaggatcaaactgtaaccccggaggaccggggaggaggctgttctcacactggcctcccggagcgggtgccactctgcttcgaagaccag

SEQ ID NO: 151663 - DNA, 335 bp, Homo sapiens
agaggatccccccgcatgacgagcttcaggatgctacgttttactatggtaaaatctgtgccaaaaacagtcccccatagtttaccacaactccagtgggcactaccaagatcagctctcaggcttgaccagactggctgcagtagttaagagaagacgcagggactgtctttcgtaagtgtagtgatacatgattgctattaatcaaatggggcatttttttctaactcaagttaaaaatgagaaagagacatattttcattcggaactgtccgaaatgttgacttttctgtgggtccaccctgcttttctccaagctctccttgcttctctcc

SEQ ID NO: 151664 - DNA, 141 bp, Homo sapiens
tctataccataccaccattttgcctttatcaaggatgatgagaaaaaataaaacccatcctacagaggtccccaaatgtggctgaggattcaaaatagcacagggggagcctttcagaatgatgcgataggaccaggcgca

SEQ ID NO: 151665 - DNA, 789 bp, Homo sapiens
ctggctctcgcattcagggatgaagcaagctaatctccaaagtacctgacctacttcctacaggatcttttcagcattcttttcttcccatctggaccttttctcctcttctccttctcctttcttcctcatagattgaggggaggagaaggaaggatgctgggggctgcggtggggggcgtggaacagaaggctgagtccaaatcaatgactctggggcctcagacagttcactaatcggttaacagctaatcatgctcacgggcacatcagtgattaaactgcactttgcattaggctcaacaagtggcacgaggcacacttaggatccaactgctagatcactgctagctgccaaatctgcatgtgcttatgtgtggggagtgcatgcctcactgattcatttgtagctgacatctcactaattacgctgccaccaccagctaggcagagtaaagccttcattctcacccaacaccccaaaggatgtaattctatctaaacaacagagctttaaatgccaatttggcgcctacctgcatgtgctctccttccagaatctcctagaatccaagaaaggagcaaatcatctttgcaattcaatcttggcccctgggtgtgtttttaatgctgaaaaatctttatagagctatctcttcccactcttccctgctcaatagcctaaagagtggttaataacctgtccttttaaaatacaatactggaattaacaattccaaccatcatgaatcacgtgttgggttttttttgttgtttgtttgttttgag

SEQ ID NO: 151666 - DNA, 426 bp, Homo sapiens
tggccgtgtatgcgtgcgtgtgtacgcatgtgtgtgcgtacgtgcacgtgtgtacatgtgtgtgtgcttgtgtgcacaccacatgtgccgtgtccataggtctgtcatcatatcaggtaggactaggtcggctcatagcttggaagggctttggagacagccactctcctaacagatgggagaagttgttttgattcttactaaggtcccagaatcctattgatggctttgctgagtattgaaaggctggccttaaattaggtttgaaactgaatttggtaataggacaggatgtgttaaggaagggaaacatacagggagctgcctgctctggcagctgttgaaagtgagcaggccacggtgcctgcagcggtgtagcacagaagtcgaactctgcaaggaacccacgcgggttccgagctcgaa

SEQ ID NO: 151667 - DNA, 751 bp, Homo sapiens
cacctagatctgacgcccaggctgcctccagaagactctctgcccctggagacttctccccagccagagacaggtgattgtgccatgaaatcactgggtgctaggagggctgcagaccatgttggaggaaacgcctgcttgcctgctgcatcactgattgtttcctgaatatcaagaaagacgatgctgggaatagtccctccttgcccagatctctgaaaagccaggagaaaaaaaatcaacagaactctttcaccaaaaaataatcctccttggaaacaaattcaaacaacagaatgtaagcttcatgggaatcagactttgctgggtcactgctgtattccggtgtctggaagacacttggcatgtgaaatttgttcaacaagcaactttgaatgaatgaatatgtgagtaaatgagaccaaagagaagaggcttcacttggaggaggaggatgtttctgtccatggggcattcgccttgccccaccccttcacccaccttgctctcaaaatatcatcatcaatgagacacatttgagagagctcacagcatcctgtctcctccagaagctcttccccagctgaaatggaagtgaaagactggtagtctcctcctcaaccacccacctcctggggccctgactgtgtggatgaactcctcacacccaggatttgtgtctccagtgaaaagcagcaatttatcctacactgaaaatttcctgaataaaaacctggcctcgttggcctca

SEQ ID NO: 151668 - DNA, 437 bp, Homo sapiens
cacctagatctgacgcccaggctgcctccagaagactctctgcccctggagacttctccccagccagagacaggtgattgtgccatgaaatcactgggtgctaggagggctgcagaccatgttggaggaaacgcctgcttgcctgctgcatcactgattgtttcctgaatatcaagaaagacgatgctgggaatagtccctccttgcccagatctctgaaaagccagagagctcacagcatcctgtctcctccagaagctcttccccagctgaaatggaagtgaaagactggtagtctcctcctcaaccacccacctcctggggccctgactgtgtggatgaactcctcacacccaggatttgtgtctccagtgaaaagcagcaatttatcctacactgaaaatttcctgaataaaaacctggcctcgttggcctca

SEQ ID NO: 151669 - DNA, 337 bp, Homo sapiens
agtactttgacactctcttgagtctcactgctcagtgtgtgacaggtaactaaggcaaaacacacttgtgtgtggccaggtggctagttattatctcaattaggactgactcccttcccagccagaaagtgccataaagatgacacctcctcccctaacaaacctcaaatgtccattatgaatgtgcaaaaacagtccatatttctcaataaactgtgcaatattccaccccagtcccagtcagataacttaatttcacttattctataatagtattatagtagctctcctagataactcttttaaagagtagaatctatacttacttaaaagaatt

SEQ ID NO: 151670 - DNA, 476 bp, Homo sapiens
tgtagaactgaaagctaactcccacatacgagataaaagttcaacatcaggtgatggaaaatcacatattgaggagaaaagtcagtccttgggttctaaatcatttgtctttgttttctgttaaaatggggaaattttctatcttttttcctttcatttagaatagataatttctattcctgatcacctttaaatgcacacactgaggttttgttttcactgactaaaccctagggatatgactaattctcatcataaattttcattcaagaaatttctgagtccatattacatattgaacctaataatagagttcagatttatgatgctcaaaatgtcatgtaagagtattatggtaatgtacaaaatgaaatactgagaatcaccacacttttcaggaagtcccactgtaaggcaaaagattaaaataaaaaaccctcaataaaaggtgtgaaggtctttgccagtttcaggat

SEQ ID NO: 151671 - DNA, 492 bp, Homo sapiens
ctccataaaaggccaagagaacagggtttggaatgtcccgatagctgaacatgtggaggttcctggagggtggagctcccagggagggcatgaaagcttcatgccccttcccccatatgtcaccatgcagctcttcatctgtatcctttataattagccagtaaacaagtgtttccctgagttctgtgagcctaggtactagcaaattaattgaacccaaggaaggagtcatggacaccccaatttatagatgtttggtcagaagcacaggtaaaacaaccttgggcatgcaattggtatgggaaatagggagcagtcttggggcctgagccttcaacttggatctgacgctatctctaggtaaatagtgctggaattaaatgggaagtcccctggctggtgtccgctgcagaactgctggcttgctggtggggaaaaatttccacatatttctactgacaaccactattaacgttttggtctatgtcctcc

SEQ ID NO: 151672 - DNA, 447 bp, Homo sapiens
ctgtgttgcagccttgaggaagattcctttttagggaaacctcggtcttcgcttctaaggccttcatctgatgagatgaggcccatccacgtggtggagttcatctgcttgactcaaagtctactgctttcaacatcagtcacatcttaacactttcacagcaacatctgggctggtgtttggccagacaactgggagcaatagcctagtcaaattgacatgtgaaattaaccattcacactccaatctgtgctggtgaaaaagcttgatctctctctgctgtattaccagagagaacagacccagctgtgaaacagcccaaggacctgcgcttattgatcaaaatctaaaatgagctccttaatatgttaaattgctacaatgtatgtgtggatcgcaggtgaaattcaacattaatttaaaaaagaaatgcatgcctaagtaata

SEQ ID NO: 151673 - DNA, 288 bp, Homo sapiens
agagttgagtggccagagagagaatccattgggtgaggagagggaaggggtgatgttggggcacctcccccaggttggtgccaggtgtacgtaggaagaggctggtgccatttacttagggagggaatgaaggaggaacaacaggcacgaggggtaaagatcctgagttctgcatgttgagattgggtgtccatgagacaaaagtagatggtgaaggagctgttgaatattcaggcctggagcttagaaaaagaagtatgggccaggcatggtggctcaacgcctccg

SEQ ID NO: 151674 - DNA, 495 bp, Homo sapiens
cttgaattttaacagcagcgctaacaaagctctaatcccctccttccccctagccttttcccatcaacccaaagagatttcagaatggataatatatggataaaaggcacttgatgtcagagtgtactttataataaaatatgtgtcttttcattgaagggaccatttggatgttgctgccatacttttcagcggctgaaaaggtatttcctaaacatttttaggttcctttttggccaaattaattagtgtcatagaatgagcatacactttgaaggcagacaaaaatttaagaaaaaattcagatgtctctaagtctttctccactaacctgaaaaacacattttaaaactaccaagctgctgtccccttgataagttggcatttcttgtttgttctctaaattttaaagatgctgagtcattttgctagtacttagtacacttcccaaggataaccaagatgtactttagtttgcttgttagcgcgtgctgt

SEQ ID NO: 151675 - DNA, 405 bp, Homo sapiens
tcagtacctacagtgggggccagaacctgtattatcctttccagggagcaaggaatagattttagggaaaggctttggaatcaacatcctaatcctagtcaccataaaaggattccatttagtttacctttagggtagaattgagagacaggcatagtgacagcaaaggttccattccccaacccttttgttaaattcttgaaatccctttaaggaaacaaagactttcatttcacagatttataactgttggaaggaaaagaccgagtcaaactttcaagtatgagttgggactctttaatctttttttggagggacaagaaaataggcagctgggtgcggtggctcacgcctgtaatcccaacactttgggaggcccaggcgggcgggggagatgacttgagg

SEQ ID NO: 151676 - DNA, 1059 bp, Homo sapiens
  misc_feature (8)..(8): n is a, c, g, or t
  misc_feature (10)..(10): n is a, c, g, or t
  misc_feature (12)..(12): n is a, c, g, or t
  misc_feature (60)..(60): n is a, c, g, or t
  misc_feature (978)..(978): n is a, c, g, or t
  misc_feature (980)..(980): n is a, c, g, or t
  misc_feature (988)..(988): n is a, c, g, or t
  misc_feature (990)..(990): n is a, c, g, or t
  misc_feature (996)..(996): n is a, c, g, or t
  misc_feature (1003)..(1003): n is a, c, g, or t
ccgaattngncntgccggggggtgtattggccggctcctaccctgaaggtgcacctgcantcctcgccgataagaggcagcagttcggaagccggttcctgagagatccggcgcgcgtcttccaccacaatgcctggtaatcaccctgccccctcgcccggcctgtcgctggccgtctgtcccgccgcctcggagcattccgaaaagcccctgaccgccggccacgagtcaagctgccctacccggccacgagtcaagctgccctacccgaggcactctccaaggggagagaaactcctaggccagcgactcaccctgctcgcagccaggacgtgaagcccctaagctgcccgtttgattttctcagggacaatgtggagtggtcggaagagcaagccgcggcggcggagagaaaagtccaggagaacagtatccagcgggtgtgccaggagaaacaagttgattatgagatcaatgcccacaaatactggaatgacttctacaaaatccacgaaaatgggtttttcaaggatagacattggctttttaccgaattccctgagctggcacctagccaaaatcaaaatcatttgaaggactggttcttggagaacaagagtgaagtacctgaatgtagaaacaatgaggatggacctggtttaataatggaagaacagcacaagtgttcttcgaagagccttgaacataaaacacagacacctcctgtggaggagaatgtaactcagaaaattagtgacctggaaatttgtgctgatgagtttcctggatcctcagccacctaccgaatactggaggttggctgtggtgtgggaaacacagtctttccaattttacaaacgaacaatgacccaggactcttgtttatgctgtgattttcttccacagctatagaactggtcagacaattcagaatatgatccttctcgagtgttttgcctttgttcacgacctgtgtgntnaaagaaananttcccngtggccnagggaggtggatattataattcatttttgaacttacgacattgttccgaacaatgc

SEQ ID NO: 151677 - DNA, 828 bp, Homo sapiens
  misc_feature (8)..(8): n is a, c, g, or t
  misc_feature (10)..(10): n is a, c, g, or t
  misc_feature (12)..(12): n is a, c, g, or t
  misc_feature (60)..(60): n is a, c, g, or t
  misc_feature (747)..(747): n is a, c, g, or t
  misc_feature (749)..(749): n is a, c, g, or t
  misc_feature (757)..(757): n is a, c, g, or t
  misc_feature (759)..(759): n is a, c, g, or t
  misc_feature (765)..(765): n is a, c, g, or t
  misc_feature (772)..(772): n is a, c, g, or t
ccgaattngncntgccggggggtgtattggccggctcctaccctgaaggtgcacctgcantcctcgccgataagaggcagcagttcggaagccggttcctgagagatccggcgcgcgtcttccaccacaatgcctgggacaatgtggagtggtcggaagagcaagccgcggcggcggagagaaaagtccaggagaacagtatccagcgggtgtgccaggagaaacaagttgattatgagatcaatgcccacaaatactggaatgacttctacaaaatccacgaaaatgggtttttcaaggatagacattggctttttaccgaattccctgagctggcacctagccaaaatcaaaatcatttgaaggactggttcttggagaacaagagtgaagtacctgaatgtagaaacaatgaggatggacctggtttaataatggaagaacagcacaagtgttcttcgaagagccttgaacataaaacacagacacctcctgtggaggagaatgtaactcagaaaattagtgacctggaaatttgtgctgatgagtttcctggatcctcagccacctaccgaatactggaggttggctgtggtgtgggaaacacagtctttccaattttacaaacgaacaatgacccaggactcttgtttatgctgtgattttcttccacagctatagaactggtcagacaattcagaatatgatccttctcgagtgttttgcctttgttcacgacctgtgtgntnaaagaaananttcccngtggccnagggaggtggatattataattcatttttgaacttacgacattgttccgaacaatgc

SEQ ID NO: 151678 - DNA, 157 bp, Homo sapiens
agcatacagactgaggggtaagccagggccgagatccctctccatgccctgggggagccctctctctcagagagcagccaggcttggtgggggagggggataggcacctgtggaggcctataggactagtctccgaggagtggagtccagcagggac

SEQ ID NO: 151679 - DNA, 162 bp, Homo sapiens
gtgagccaccgcaccaagactccagctcttatgtaattactgtttccatgatttgacttacttttttctttcatcctgtatttgtctttgatttacggtgtgttggcccaacacggtgcgttgtgtcccaacacggtgcgttggcccaacacggtgcgttcg

SEQ ID NO: 151680 - DNA, 374 bp, Homo sapiens
attttttaagcctagtccttctctcaacttgtttccactgaaatcattatagaaaattattttgctttgttctacaaggacagaatgtattttaactctgtttaaaagacctagaattctctcctgttacagggagacccacatcaagtaccccaattattgtctgtatgtagacacattctcaaggtgcttactatagaatacagtggaacttttctcatttgatagtttacatcaccattgtaagaaggaagagaaactgggacataggtaatgttttcagtgatatgtatgggcagatattcctgggaagctttggtcagaccttttcatcacaaccacactcatcaaatcagaaatgaaaagggccttag

SEQ ID NO: 151681 - DNA, 442 bp, Homo sapiens
gatttcccggtcagtcctagaataaaaaagttcttggcacccagagttggaggaaggctgcgtgaatagtggtcctccaagtgggttcccttctggcctgtttctgcctgccccacccagcccctcgtacttagcttcatacctagttctgactctaggtggcaaatgaacctcctaagaaggtctaattattctcatcatcatcaccaagcacctgctatttgggtcagcgttaccacatcatcttctggagcaatgtggaggcttatgagaccctgtcttctgccttacaggtggtaagagatatgtgtccaaatataagtaatatttgctaattccagaatgtaagttctagaaagctgatggaagatcacattgggcttgggtgatctggaaaagcctcttgcaagaggaagtacttgaggtgggtcttttttttttt

SEQ ID NO: 151682 - DNA, 564 bp, Homo sapiens
acagaaagaaaattgagtcttggagagggtagagtagcttacccgatgtcacacagctagtaagtggcagacccaggaattaaacttagaaatgtctgactgcaaagcctatgctcctaacatctgctcgatataaagaaacaagtcccttgaaaagttgacagggcggtcaggcatggtggctcacgcctgtaatcccagcactttgggaggccaaggcgggtggatcacgagatcaggagattgagaccatcctggccaacatggtgaaacctcatctctactaaaaatacaaaaattagctgagcatggcagcgcatgcctgtaatcccagctactccagaggctgaagcaggagaattgcttgaacctgggaggtggaggttgcagtaagccgagatcgtgccactgtactccagcctggcgacaaagctagactctatctaaaaaaataaataaataagaaacaagacacaccccacaccctttcctaatactaaggtaggctttgcagcggagagaaaagtagcgatacattccacaccaacagggatctttaccagt

SEQ ID NO: 151683 - DNA, 395 bp, Homo sapiens
gtccagtcctgagtgagtaaaagggatttggaaggagccatttagctggagaaaggaggaaggaatttcttctctcaagcccatgaaagtggtcagcaggaagcttggtgggatgtcaaccctggggatccgatggtctctgatttcctctttctggacctttaacgccatcttgatgtagcagcctggtctccactgggctgtgcaataagctagagcaagggtctgtgtctgggccttggccagggctgtcaaagggaaagcaatgctcaccctctagagtaagcatggggctgacagggaccatgattgaggtccccaggagcaggtcaatgtccgaaggtccagctgcccttcttcatctgggaaatcgtcttccttttcttcctctggtt

SEQ ID NO: 151684 - DNA, 276 bp, Homo sapiens
ggcggaccagacttctgtcacagcattgcctggcgctgtcctggggttgctgaaagatccacatggaacaggattaaaccctcgtgggtgttgtctgtgaaggcagagccaggagcagggcgtagcagtgcggggtggacatggggctgtagggtcagcttcttaggtgctgctttgttgaaccagaggcaggtggacccctgggctgtgcctcactggattgggagcacagaaggagaatgagactgacttttaagaaaatctcacccagaattt

SEQ ID NO: 151685 - DNA, 213 bp, Homo sapiens
ttgaacccgggaggcagaggttgcggtgaaccaagattgtgccactccactccagcatgggtgacagagtgagggtctgtcaaaaaaaaaaaaaaaaacatacacacaattaaatgaaataggagccatcactactgattccacagactactgattccaaggataatacaggaatattatgagcaactcacatccacagagttgataaccttg

SEQ ID NO: 151686 - DNA, 226 bp, Homo sapiens
ctcagattagcatttagtatcagtagctatcctggacactctgagcttagtagcaacattgccagcaattccaggctgtttccagttggagaggatcagggaagcattctcctggaaaagcatgcacagagacttcactttcacataagaaactcacctgacttctcaagaccatcctggctaacactgtgaaaccccatctctactaaaactacaaaaaattagc

SEQ ID NO: 151687 - DNA, 302 bp, Homo sapiens
tttatactacacgtgtatattgatttatctatttgctgtggatacaggctttgcttttagccgcagctctcagagctggctccttgcttcatcttgctgtctttctaaatgaccatcagtgatgtgtacgaccctcccaacggggttctcaaaatgtctcacttcttctccagaaaatggaagctctgttttgctactgcacccaccctgaagattagtaggcccaaggtgggaaatgaaatctttttttttaaacgaccaccaggtgaatctgttgtgcagctgggtttgagaaacattag

SEQ ID NO: 151688 - DNA, 307 bp, Homo sapiens
cccataccttagccatcctatgcccaccgactcactccctagaagagacgtaaaaagcccggtatgtgccacggccacaccagcacagcttggtgaggtgcaaagactcccacatctttagagggaaaccttctcaaaatccatctgtgcatttaccaagctgcagctccaatggacagggctgacagccgcaatcacagccctctccggacacatggccagtgcgcggcacaccggggccgggctcaggtctcttgacgcccctggatctgagtttaagggatgattatcaatataaacaaacatt

SEQ ID NO: 151689 - DNA, 542 bp, Homo sapiens
tggcctgctacaacaaaatacctcagactgggtaatttataaacagcataaactcactttatggtctatgagtaaaaagtagaaccaatgtaacaatacatgcctaacaattttatagcatttactatgtgccgagcattgtgtcctcaattaacagcaagtgtatgacagaatccaggaagtcagattgtagagtccatgttcttaactattaatgcttttcaaaggaaggaaaacacagacttgtatttttccacaccttcaactcctagaatttaaaccgaaggagaggctacaagaaatataaaacattgtgtgcgagcttctctgaaatgaatatgagattgcacatgtgcagaaaagagttaacagagcaggcctaagaatgctatctttagaaatgcctgcttgcaaggttagcccctgaatggcacctaagccgctggattttggaagggttcctaccattcactgatgaacttctctaatggacaatatttcacatgtgtcgtcacaacttgctcctggaggaattaagtgca

SEQ ID NO: 151690 - DNA, 425 bp, Homo sapiens
gggcggcagtccgagccttggaggtttttttcagccctggcccgagagagctgctggccaccaccccgtccaagatagagctgtccgctctccgcctggttgttagaaagttctgatagaaagttccccctttgatgctttttgcctcattgtgacgtccacccatcctctcctctcagaactttctttccttagggatctcaacccgaacggggtgagaatgaatcttactgaagaaatctttctgttcccccttcttggtcttccccagacaaaccgtctcgttgaaagtatcttcacccattcacatcttcagttgaaagactagacaaacaagaaacaaacagactaacaaaacacaacccaggagtcgtccctattctctttgttttactttgttctgttctgttttatttaaagacagg

SEQ ID NO: 151691 - DNA, 395 bp, Homo sapiens
gccaggagagagaggcatgtcaggaaaggtttaggaaaaccccagtgccttgcacagtacttgtgcctggtgagtgctgtggaattaacgaatgagaggcgtcctggagaagctgtttgagctgagtgctgagaaacgagtaggcatccaccaggtggcaaaaggagtcagggcattctaggtacagggagcagctcagacaaggcctggaggcacaacatgacaccatttgctctggggactgcaagtggtggggcagtggagcacggctgagaggggtgcagaaaggggcaggcagggccgggccatgggccagaggagcccgtgtgcaggtagaaggagatgctggcatagctcaggtcttaggttggcccacagcagaagctaactgtagc

SEQ ID NO: 151692 - DNA, 349 bp, Homo sapiens
ataatgacctcattttagcttgattacctctgtgaaaaccctatctccaaataaggtcaccttctgaggttagggggagaattaggactccaacgtatgaatttttgggaggacacaagtcaacccttaacacaactccatgcccttccatcctagaacagttacactgaagccctggcatccccccactgagctggcactgtcatagaccttagctccactgttcatccttgggactgttttcagcatctaagagagtgaggctggagcatcacagtttttcagtgggtgccactgcataatattaatagcaagagtgaacacgtatggatggctgaccttctattac

SEQ ID NO: 151693 - DNA, 445 bp, Homo sapiens
agactggtgtccttaaaagaagagggaaatatggacacagacatagacacagaggaagatgatgtgaagacacacagggaaaacatcatgtaaagacaggcttggagtggtgcacctacaagccaacacagaatcacagcatctcagagttggaaggaattcttcatatgaccacattgattttttttttcctgttggtcggcatcagatttgtgaaggcccctggaagattggatggtgcctgcctatacggagggcggatcttcccctcctcgtccactcagactcacatgcaagtctcctctagaaacacccttgcagacacaccccaaaatgacacttttagagcccctagaagatgccttagagatgaaaaaaaaaacacacgcatttcctaatgaagaggcagccagatgcagcctctgagccctgactgcacagtgtg

SEQ ID NO: 151694 - DNA, 653 bp, Homo sapiens
agactggtgtccttaaaagaagagggaaatatggacacagacatagacacagaggaagatgatgtgaagacacacagggaaaacatcatgtaaagacaggcttggagtggtgcacctacaagccaacacagaatcacagcatctcagagttggaaggaattcttcatatgaccacattgattttttttttcctgttggtcggcatcagatttgtgaaggcccctggaagattggatggtgcctgcctatacggagggcggatcttcccctcctcgtccactcagactcacatgcaagtctcctctagaaacacccttgcagacacaccccaaaatgacacttttagagaagctgtgtgtgctcccgaaactgccatgcaggacctcagtagatgtgtgccatagaaccacaagcaagctcagataaatgactaggaagcaggaagatgcatctgatggcttctctgcatgaagaccaaataaaaggaaccttgtacgtggactctttttaaaaattaaaatttattttgtttcttgcatctaatatagaaataattcatattcattgtggaagatctgtgggaaaaaaaatagaaagaaaaaaagactcacctgtcatctaccaaacaccaataaacacagatcggcctgatg

SEQ ID NO: 151695 - DNA, 751 bp, Homo sapiens
agactggtgtccttaaaagaagagggaaatatggacacagacatagacacagaggaagatgatgtgaagacacacagggaaaacatcatgtaaagacaggcttggagtggtgcacctacaagccaacacagaatcacagcatctcagagttggaaggaattcttcatatgaccacattgattttttttttcctgttggtcggcatcagatttgtgaaggcccctggaagattggatggtgcctgcctatacggagggcggatcttcccctcctcgtccactcagactcacatgcaagtctcctctagaaacacccttgcagacacaccccaaaatgacacttttagaggaacaactgagtttggtggacttgatgaggccatttcctgcactcttaccgatcctcccactatgtgctaattgctttactttctcttaaaactgaagaagctgtgtgtgctcccgaaactgccatgcaggacctcagtagatgtgtgccatagaaccacaagcaagctcagataaatgactaggaagcaggaagatgcatctgatggcttctctgcatgaagaccaaataaaaggaaccttgtacgtggactctttttaaaaattaaaatttattttgtttcttgcatctaatatagaaataattcatattcattgtggaagatctgtgggaaaaaaaatagaaagaaaaaaagactcacctgtcatctaccaaacaccaataaacacagatcggcctgatg

SEQ ID NO: 151696 - DNA, 254 bp, Homo sapiens
agccacctcactgaaggccttcaacggagacatcggatatacctgcccgctaagataggtgggttttccaggacttgaaacgtgggccctgtttgaggacccactgttcgccccgacccaaggatcatcaatcggagccttctccaagcctggctttacctcgctcacagcacaattatattgtcagaagttgccttgcctgagcgcggtggctcatgcctgtaatcccaacactttgggaagccagggcagga

SEQ ID NO: 151697 - DNA, 717 bp, Homo sapiens
aaggtgggaatgctcgtgcaactctcttgtgggaaaagagtcaacatgcttctcttccctttcagattccctctgacctgctgcccctggcctttctcctgccccagtggggctttagcacaactgaccgctgctttcctgtgctctgtggccagggaactcatgtggtgaagcactctggagtttggctttgcaaagaagtgaaatctacaatgcaaatatccagatctccaaaccctggtcaaatggcagtgactgaagctcatgccccacctcccagctgtgcaaccttggggcaagtcacttcacctctctgggcttcaacttcctccttggaaagacagaatgccaacatccatcctgcctcttgccaagatgttttatagactgcatggttttatatcttgtaaaacataaaatactgtgattcagaaagagatcacctttaaaaaagtccaaaatccccccctcttagctagcacgagcaggcatctctccaggtggccttgacctccccaataaccctcctggcaggagtgtggaagaacagaacatgcaggcttctggccactgtccttagagctttccaggacatggggatcccagggcaacctgtggcactgccaacgggccccgtcacaagaggagagagggatctgctatcgcacaccagtctcaaaacccacccacagttcacttgctttatggacagtcctt

SEQ ID NO: 151698 - DNA, 162 bp, Homo sapiens
cagggctgccagcactctctcctgatgactttatcttggctcctggaaggatgggggtgacaacagtgtgtcggcaggagaggagagcctaaagcagggactctggaccctggtgtttcggggggatgtgggctgcaagagtagggtggagggggcgactgc

SEQ ID NO: 151699 - DNA, 460 bp, Homo sapiens
tacagcgtcaggggaacggctctgccggcccccaggtgccctcgcgcatattcatggaggcccgcaggtcagaaccgcagtctcacctgtcttggcggaaatgccctgcgatcctcccggagatagaaggcgggaagttttatgaggagccaggtacagtttccctactatctcctgcagttcatatatctagtctttcttcagactttatttaagcgactgcttcatgtttgatgtctcactcccacatcctacatccattgccaggcaactttctagatagcaccgtgacccatccttcccacccccaagcagccctttcctatttctggtgccagtgtcctccccagtccctctttcttcaggccctcgcttatcaccttcatggacagaaaatacttagttctctctcaacctgcggtttatacctgacacgcgtcagtacctgacaaattcctta

SEQ ID NO: 151700 - DNA, 832 bp, Homo sapiens
ccaagatttattttcctttcacatatgtatatatttataaatgttataagtacaacagaaggcaagaatggagcaaacataagagtgaggaggaggaggaggaggaggagaagaatggtaagtgcaaattaaaatggtagtactaaatccacacactggaaggtggtttttgcaacacataaaactgaaaaagcaattgtatgcagaatacatcaagaattcctacaaacctttaaagaaaatacaagaccttgaaaaaatttgcaaaggatgtgatcaaacaattcacagaagaggaaacaaacatggccacaaagcatatccaaaatccaaaagcaaagcatagtctccccagtaactagggaaatacagattaaaggcacggatttatacccagcagattggtgaaaacttaaaagtctcgtaattccgagtctgagttgggatgtggaaaaacaagccagaagtctcacacaggagtggtgaaaggctacgctggtgcaacttcttcaaaacaattttaacaatttctagtaaagatatgatctttgtatcatatcaaagatgcacattctctttacccggtgatccagcagtcgacttaatgtggaacatagactcttgcatgtgagttcagaggcatatgcataaatgttcttgggggtttccctgtgataattaaaaactggaaataaactaatcttattgccagagagtagattagaatgtaggatctttatacaatggaatactgtgaagaattaacatgaattgctactatgtggccatagattctgcctatagattctttaatgttctatatcatagaaca

SEQ ID NO: 151701 - DNA, 212 bp, Homo sapiens
aacacacagaggtttctgttatggcctaataattacccacatttgtaaaagttttctattttatatataaaaatgtagaatcctttggtcctaagaatttggagaagtctagtgtgaatttccaagaatttcttctcaggcttcatctgtttttgttatttttcagcccagtagggcttttgtgctgctcagatgttaccagtggatgcagg

SEQ ID NO: 151702 - DNA, 194 bp, Homo sapiens
ccacacagctagtaggaggtgacaccatatcacactgaagatcatcctgcccaggcttgcggatttaaacttccatgttttaaagcatctacggattttattaactgtaccttccctgcctgtgggctcaaaagatggccagcagaagaagcatagtttgcctgaagcaaacagaaaatagtaaaagtcaagct

SEQ ID NO: 151703 - DNA, 454 bp, Homo sapiens
tctagaggatcccagttcgacggagtctctccgactgaaggcatagtaagatcacttggattttaatcttaagtgtgatgggaagcccattgtaagtcggagagtgacttggtcagatgaacattttgcaaagcttactgtggctactgtggggagaatagacagactggaggataagactcgaacagggagataggtggaaagaccattgcaatagcgcagtgagagggactttaagcttgcactagagtgacagcagtggagttgtgagaagtcaagatgtgaaaagtgatctactcccattttgaatagatctagctgaatgcaggagatgaggaaaggagaactgtcaagttccatagctagttgctttgagtttcagtattgaaagtgtgagtacccataattaagtcatactcattgggagaggaaagaagagagggtggggtggcta

SEQ ID NO: 151704 - DNA, 330 bp, Homo sapiens
cacaggatgaagacatgaagagaaagtttcaagatcttctgtctgaggaaaatgaatccacaggtctatcccaggttctagcccagccttctactagtcgaaagcggcctcgtgaaggggaagccgagggtgccgagaccacaaagcgcccggctgtgtgtgctgctgtgttgtgaactccgtggtttgaacatgaaagaaatgtaccttctttcactctgtcatctttcttttctttgagtctgtttttttatagtttgtatattaattatggaaataattgctttttcacagtcactgatgtacaattaaaaacctgatggaacctgg

SEQ ID NO: 151705 - DNA, 164 bp, Homo sapiens
gttcagggaggtggggcagagctgatgtgacccggtccctgctctgcctctggcccttagtagctgccaaaggttgtaaaagatcgattgctctcagaaagcaagacacagaggttaagaatctttgcagcagagcctggtgctccatttctgagttcactgct

SEQ ID NO: 151706 - DNA, 374 bp, Homo sapiens
agagaaagtgcagagggatctcacaggtccttctcatggtatactgggttcactgtcttttctccatgaaggctgaaaggattgcaaaactgtcaatcctgaacccattaattacaatcagtgtgccaggcaccatgctagacccttgatagaaacacatactattttggctgggcacgctggctcatgcctgtaatctcagcactttgggaggccatggcaggtggatcatttgaggtcaggagttcaagacaagcctgcccaacatggtgaaaccccatctctactaaaaatacaaaaattagctgggcatcgtggcccatgcctgtaatcccagctactcgggaggctgaggcaggagaattgcttaactg

SEQ ID NO: 151707 - DNA, 626 bp, Homo sapiens
ataaagccaaaaatagtttctcaaggtcatttatctaagtcataagcaataagaaagaatgactacttcaaaaaaagagtctgtctgcttccaagacatgccaggaactcgagaactgagaacctttaatgttttttatgccagctggacgtcttctgttagtgaatttcccattctgtactgggtcatacgaaatgagtttttaaaaactcattaatcagttattaaacaaaacatttttccttagactaatccaaaccacatttgtgatctttttaaaaatcagaaacattaacaaaaactcatttttctaaaaactgacatatttctggagccttgaccaattcattattataattttgagtaactaatagtgattgacatttatgtagtgcttattattgccaggcactgttctaagtgttttttaaaaataaactaatttagtctttgtaacaaccatgtgagggaaaaactatcctccactttacagatgaggaagctgaagaaaaaataagaaatgtactcaaaagttgcacagtcaatgaaggatgaagctaaattcaaacagacattctggctctagggtctgtgttcttaaccactctgcaaactgcctcctaggg

SEQ ID NO: 151708 - DNA, 680 bp, Homo sapiens
ataaagccaaaaatagtttctcaaggtcatttatctaagtcataagcaataagaaagaatgactacttcaaaaaaagagtctgtctgcttccaagacatgccaggaactcgagaactgagaacaataatgtaaagcttgtgtttcagagttgagattagcattatgcttaagattttctttaatgttttttatgccagctggacgtcttctgttagtgaatttcccattctgtactgggtcatacgaaatgagtttttaaaaactcattaatcagttattaaacaaaacatttttccttagactaatccaaaccacatttgtgatctttttaaaaatcagaaacattaacaaaaactcatttttctaaaaactgacatatttctggagccttgaccaattcattattataattttgagtaactaatagtgattgacatttatgtagtgcttattattgccaggcactgttctaagtgttttttaaaaataaactaatttagtctttgtaacaaccatgtgagggaaaaactatcctccactttacagatgaggaagctgaagaaaaaataagaaatgtactcaaaagttgcacagtcaatgaaggatgaagctaaattcaaacagacattctggctctagggtctgtgttcttaaccactctgcaaactgcctcctaggg

SEQ ID NO: 151709 - DNA, 1349 bp, Homo sapiens
ctccaggagctaggggcagggcctcgacctcagggcccaccccggctccctgccccaccaggagccttatctacaggaccagtccttggccctgtccatcccacacctccaccatccagccctcaagagccaaagagaccttcacaattaccttcccccagctcccagcttcccactgaggcccagctccctcccacccatccagggacccccaaacctcaggggccaaccttggagccgcctcctgggagggtctcacctgctgctgcccagcttgcagataccttgtttagcaagggtctgggaccttgggatcccccagacaacctagcagaaacccagaagccagagcagagcagcctggtacctgggcatctggaccaggtgaatggacaggtggtgcctgaggcatcccaactcagcatcaagcaggaacctcgggaagagccatgtgccctgggagcccagtcagtgaagagggaggccaatggggagccaataggggcaccaggaaccagcaaccacctcctgctggcaggccctcgctcagaagctgggcatctgctcttgcagaagctactccgggcaaagaatgtgcaactcagcactgggcgggggtccgaggggctgcgagctgagatcaacgggcacattgacagcaagctggctgggctggagcagaaactacagggtacccccagcaacaaggaggatgcagcagcaaggaagcctttgacaccgaagcccaagcgggtacagaaggcaagcgacaggttggtgagctcccgaaagaagctgcggaaggaggacggggtcagggccagcgaggccttgctgaaacagctgaaacaggagctgtccctgctgcccctaacggagcctgctatcaccgccaattttagcctctttgccccctttggcagtggctgcccagtcaatgggcagagccagctgaggggggcctttggaagtggggcgctgcccactggccctgactactattcccagctgcttaccaagaataacctgagtaacccgccgacaccaccctcgtcgctgccccccacccagccccatcggtgcagcagaagatggtgaatggcgtcaccccatctgaagagctgggggagcaccccaaggatgctgcctctgccgggatagtgaaagggcactgagggatacttcagaggtgaagagtctagacctgctggctgccttgcctacaccccctcacaatcagactgaggatgtcaggatggagagtgatgaggatagcgattctcctgacagcattgtgccagcttcatcccctgagagcatcttgggggaggaggcccctcgtttccctc

SEQ ID NO: 151710 - DNA, 549 bp, Homo sapiens
acagccatggtcctcgggcagtgatgagcgcggcagtaaattttgtctccatgggtgctaagttaaagttccttctttcctttctgggaagggtcagaagcagtgagcagagagagttggagcataaggacagactggggggatgtggggaggtgagtggggatgcggagcaaaggggagatcatttcttccctgtgtggccccagagaaaagccacattgccatcatggtactgctttgtgacatcagtttcttgtctatgtgactgttttcccactggtgctctgagagcaagactcttagagaggctgtgaggactcatcctgaggtcaggagatcgagaccatcctgcctaacaaggtgaaaccccgtctctactaaaaatacaaaaaattagccgggcgcggtggcgggcgcctgtagtcccagctactcgggaggctgaggcaggagaatggcgtgaacccgggaagtggagcttgcagtgagccgagattgcgccactgcagtcggcagtccggcttgggcgacagagcgagactccgtctc

SEQ ID NO: 151711 - DNA, 354 bp, Homo sapiens
ggcttgagagtgtggggatgtctttgtccactcgctgccgttgcggagacccctgttgcgagtctccatgtgcacgtgctggggcgtgagagcgcgggggtgtcttcagtgtccttcggctgttcagggaggaggctgagctgtcctgccctttcattcagactaaatggctttttcactgttttccaggttctcactttaaccactaatgtgctgggtagttcactctttggaccctaatcattttctcttacctcaacttggactggagttctgctaagcggccgttttggaatgcacaaagatcactgcatcttgcctttcacttaattcttgcggatcacattggaatca

SEQ ID NO: 151712 - DNA, 195 bp, Homo sapiens
gctggagccagggaattccaaggggccagagcctgcctgagcactccaaggcctctgtgctcgtggctggcagcctaggcaggaggaccctggggcagctcagggctctgggatttttcaaagctccatgtggctggacaggcctctacagactccctgccctgggagtctggccagcctgtggagactgtgcag

SEQ ID NO: 151713 - DNA, 440 bp, Homo sapiens
accatatcgcactgatttaaaatatttacttatttgtcttcctcataaagctattaactctctcccaattctaagtgcagagaattcatcttatttgattctacaatcttgccccagcaactacttaagcatttacaacagtcacctttcagagggcctgcccaactactgtagtaggcccccacatccctgtgagggtgaggctctgtagctgttttatttgctataagcctagaccccctgatcacagcacagtctagagggagtttcaggacaatcagtccaaaggctagattggactaggccattcagattctttagggaatatgtaactggctggtggcactagaccaaaccgcccgggtggccactttttaccaaagccagtccttggagaaaagaaaacttgagacttgaagcatgggccaggcgcagtggct

SEQ ID NO: 151714 - DNA, 239 bp, Homo sapiens
agggcctggctgcaaccggtgtcctgggaccaccccaccggatgctcccacccgagcaggccaagatccccagacctggtcttgtgtcctccttccagaatgtggggccaggcctgcaatggagaagcccacccgggtcgtgggcgggttcggagctgcctccggggaggtgccctggcaggtcagcctgaaggaagggtcccggcacttctgcggagcaactgtggtgggggaccgct

SEQ ID NO: 151715 - DNA, 452 bp, Homo sapiens
tctagtctcactccctatagagagaaaatcaacagcatagtgtgtcctactgaatattatataagttgttagtatcagcattaaaacaagggagtcttactccttaggtgctgctacacatcatctggataggcaatctctcagcacaccacctaggccttatcttctgcacattgctcaggctaaggccatgcctggcaggtagtcagtatgcaacaaatgagccatcaaatataacaatataatgaaaggccattaggtagtctctagaaatatctgtccttaatcttacatttgttttttctcactgtatgtctaaacattgctagtttatcccagaaacctagttgcttcttttctgacagtggttgtattaggtaagatgggattgataaaataatcttggaatcttaacatgtaattaggtgaacaataaaactatataaccaagg

SEQ ID NO: 151716 - DNA, 197 bp, Homo sapiens
atagagtttactcagtgctgttatttagcagctgtgtgtatgacttcataatttagggggctgtctgttttgtgttctaagccacgtggctgctgtggtgactgctttagaaactttcagttccctttgctgtgaaacaggtttcagtgcatcgtccctgtgtataaggtcaggtttcttacatggactcactctgt

SEQ ID NO: 151717 - DNA, 475 bp, Homo sapiens
tggatgagtgtctgggagccccccagaaactgcaaacgtgcatttcccaggtgcgtaggtcctcaactttcatggatattttaaaggttaagaaccaaggctcaaaaagcagaactgtttatctataaaaagggttactgagccatatgtggcttatccagagaactttatcaccactgacataagagtgtttctgtggggaaagtctacagtcagaagattccagtcattctatcctagcacttaacacgctctgccattgggttctatttgcttactaagaaagataagaaactttttaaagaatggagatagggttttattcccagggccaaactgtctggcacatggaaggtgttcaataaatatttgtaagatgattaattgttattacaaaccaattttttttttttgagacaggatctcactttgttgcccaggctggagtgcagtggtatgatcatggctcactgca

SEQ ID NO: 151718 - DNA, 474 bp, Homo sapiens
acaccacccagtacacttgtgaccccagatgttgtaagggtttctccccacaaaccaaacaaatctccagaaaacaccatctgaatgtcctctaattcagttcaaaactgggaataatgtcacataccacaggctgagggctcagtcccctaagactgtctccacttcagatgccagttacaagccccagtggtgacctgtgcttttgactgaccagctgtaaatgtgtttttttgcaagtccctcgtcgggttcaattaatttgctagagtagttcacagaactcagggaagcactttacttatttattataaaggatattacaaaggataccgacgaacagcagatggaaaagatgcatagggcaagacatgtgggaaggggctcagagctcccatcccttctccagtgtgccaccctccaggtgcatccatgtgttcagctatttggaatctctccaaaccccgtccttct

SEQ ID NO: 151719 - DNA, 346 bp, Homo sapiens
tataggggcttcaagggacacagaagaggctgcaaaaatacaagtaagattttcttttctgtaagttgaataataggcaaagtcctgttatatcattataaaatatgtacctgcgttttagcctttgtggtttactttccattttctatatcttttacccctacaattgtcaatgggttattctcaaatttgcctatgacagaattctttctgttctcttcaatatattttcccttagctcattttaatcaaaaatggaattttgcatcttggaaaagttcaattcaaagactgtctgtatttggttaacaggtagcatggccaaaaataaataggtttcttcagg

SEQ ID NO: 151720 - DNA, 954 bp, Homo sapiens
agcacttctctctcctgccaccacatgaagaaagacatgtttgcttccccttccgccatgagtgtaagtttcctgaggcctccccagccatgtggaactggacatggtcacccaggctggagcacggtggtgcaatcacagctcactgcagcctcaaacttcaaaggatcctcacatctcagcctgctgagtagggcctctcagcttgtggcatgattcactgaaatacatcaaacatgacagaagatgcaagcatttggagacttacatcagccatcatcaaattaaaaagctaaaaagtgctatcagctggcttgctcatcattgagagacctgaagtgatggatgatggagaggaggttgctgtgagggtagaggtggctcagtaccctgcaggagcaatgcaaagagagactgtgcccaagaccatctccccgggggggatgggtggcattcctgccttccttccaccaacaaatgttgactgtgccatgcactgggatgacagagatgactcagatgtgcccttgttctcaatgtgttcatggttggatgaggagaacaccagtcttactctagagactgaaggctaagacaaagactccagcctcaaacttgaggaaggaagttcatgtttcttcctgggttggccaatagaaagtggtatttgtggccggacatggtggctcacgcttgtaatcccagcactttgggaagccgaggcgggtggatcacgaggtcaagagatcaagaccatcctggccaatatggtgaaaccctgtctctactagagatacaaaaaaattagctgggtgtggtggcatgcacctgtagtcccagctactcaggaggctgaggcaggagaatcgcttgatcctgggaggcggaggctgcagtgagccaaaatcgcaccactgcactccagcccgggtgacagagtgagactccatctca

SEQ ID NO: 151721 - DNA, 211 bp, Homo sapiens
tctgtgtgggaggacactccggctaggggtacatttcatcacttgccagaggaacacagtcaatttcaggaagatacaaggaataacaatgtatttcccccaaatcatcattaaccaatattttggccacacttcctacaaaaacctgaaattagctaaaaccaccctgctgttttcattgcactcaacaagccccagagtagttaccatc

SEQ ID NO: 151722 - DNA, 354 bp, Homo sapiens
agacagccaatacaaaattaataaaagttttgaaaagctaatattgaaaacataaaagcataatactaaaactaccttttcagctactaatctgtgacagtaacatcttagttcattcaccaagcacttttccaaatggtgggaacactggcaatattttcacccaggagatgttactaaataagtatgaggtttgcccaagagaaattatttttaaatatttatttaaaaactatctatgtccttttcttttatgcaatatatgcatttatgcattgattaattcatttctacatgtattagttgtcacaaataccaccaaaagttttaagaagctttaaggtagctacaggt

SEQ ID NO: 151723 - DNA, 233 bp, Homo sapiens
tacataagaattttccaaacatggattttattgctaatgacattatggatatacaggtggaattgagctttgaaccactaagttacaacatgcataccaacagttaagctgaccctcacttgattttaaattattgaaccattttaatgactgtgtcagaagaaatgcaaatgactgctaatttagaaaagctacatttctgtcatctaaaatggttcaataatttaaaatcg

SEQ ID NO: 151724 - DNA, 459 bp, Homo sapiens
  misc_feature (433)..(433): n is a, c, g, or t
tcattatgtattattgattcaatctctaactgttgctattttcgttaaggccgatgtcattgtcaacagcgttcccatgaatcttcagcttggaggaggaccactatctcgggcatttttgcagaaagctggtcccatgctccagaaagagttagatgacagaaggcgggaaaccataggaaaaagtatgtaacatattcatgacaagcggctgcaatctggactgcaaagctgtgctccatgctgtggcttcatactggaataatggagcagagacttcttggcaggtaaggaacgctcttagttctccaacgtattgagaggctttgggaatctccttctggagtggtatagatctgtgctcaagggaagcaatattgccccacagaggacagttcgggttgctacaactgctgctggtaaagatggaaanaaagaacaagagttggggacagtacg

SEQ ID NO: 151725 - DNA, 761 bp, Homo sapiens
  misc_feature (735)..(735): n is a, c, g, or t
caagcctgttgggtggggcgcaactgcagtcccagcgagctgaggatggctgcgccaggcccccttcctgccgctgctttgagtccaggggctccgacccccagagaacttatgcacggagttgcaggtgttacttccagagccggacgagatcgggaggcggggagcgtgctgccggccgggaaccgtggggcgcggaaggcctcccggcgctcttcctcccggagtatgtccagagacaacaagttcagcaagaaagattgtctttcaatcaggaatgttgtagcttcaatccaaaccaaagaaggtctgaatctcaagttgataagtggagatgttctgtacatctgggccgatgtcattgtcaacagcgttcccatgaatcttcagcttggaggaggaccactatctcgggcatttttgcagaaagctggtcccatgctccagaaagagttagatgacagaaggcgggaaaccataggaaaaagtatgtaacatattcatgacaagcggctgcaatctggactgcaaagctgtgctccatgctgtggcttcatactggaataatggagcagagacttcttggcaggtaaggaacgctcttagttctccaacgtattgagaggctttgggaatctccttctggagtggtatagatctgtgctcaagggaagcaatattgccccacagaggacagttcgggttgctacaactgctgctggtaaagatggaaanaaagaacaagagttggggacagtacg

SEQ ID NO: 151726 - DNA, 280 bp, Homo sapiens
caggtgtgagccaccatgcccggcccctggagtatatttctgatcaatatttacttgattattatttaatattccagacacatcaaaacaacagtactatacaagctttttaaaagaatgctcagatgactttgaaaaaaaatattttcataagagactaaaagtaagactagttttggttatgaatattttgtataagaatatttaaagataaacatactcttcaaggaaccaaacatgctatatgcaaatcatttttagcataatgttatgttgatac

SEQ ID NO: 151727 - DNA, 388 bp, Homo sapiens
gggatcacatattagaggatttcatttatatgaaatacccagaataggcaaatctttagaaacagaaggtagagtggttgttgcctagagggtagggaggatggaagattttgcaagtgatttgctgatgggtacagagtttcttgttggggtgataaaaatattctaaaattgattgtagtgagggttgcacaactctgaatatgctaagagccattgagttgtacactttgtgtgggtgaattgtatgtgaattatatctcattaaagctggaaaaataatcaatggaattgaaaggttaaaggatttgtcattggcctagaaaacagtggggggtggcaaacatacggaagtgataacaaaactgaaatgcatggctgtggagtg

SEQ ID NO: 151728 - DNA, 782 bp, Homo sapiens
gtgaaagaaacgtcaggaatgtggcttggcttggtggttcatgcctgtaatcccagccctttgggaagccgaggtcggaggatcgcttgatcgcttcaagattgcagtgagctatgattgcaccactgcactccagcctaggtgacagtgagactccgtctataattgatttttgtggatatggaatgataattttgttttttttttctaagtctgtataaattggaatttggtgaagttttgagaccgattattttggctttatgctatagattgctaccttcaggtgtaaaagtgtgtagatttttataatgctttttgaccgtaacttctcttcaattgagactgttgtgatccctgtgctttgagaagagaacacagtgcccagattatttatcatttttgaatttgggaattgtgatttcctccaacgtagctgaaaaataggggctatagctaaggtagaaccttggggagaaataggtgatcaagctgactagattagaaatactataggaaagagccaaaatgcttaggaaaaaaaaaacaaaaaaaaaaaaaaaaattgtttgggacggttgggaccttgagaagaagttttttaagaacatttcgttgtggggggcggggccccatgtgtgttatgtgaacactgtgacactagggtggtgcaaaggaaaatctggcacagagatagtggttgggtctttccaccataaaaaaacggcgcgggaacacgacgtttctggaaaactcaagatgggagttcggaggccaacggg

SEQ ID NO: 151729 - DNA, 457 bp, Homo sapiens
ctctgatatgtatgctgtttggggagaggaggagaggagaagcttcgtgtgctgtcatgggaaattaatggtctaacttaaggagtttacagactatcatttttaatcaaacacaggcagcctgccagctaacataaagcaataaagattgcaaaacaaaagaccttctttatctgcttcagcctcatctttacaattacctaaataaaaactagtcctctttacataactttaccacaaaatacatttggaagtgcatatttgtaatttgtctatttggatatcaaaagcaactccaagaagaaacattggatgaaaatctattttagggggcaatggtccaaaggtacacaggagcacaaaacctgaacgatgaactgtgtgaattcctaacaaccctgttcttgatatcctggttctgacagagaactatatgaccttaatttccataaaaaaa

SEQ ID NO: 151730 - DNA, 200 bp, Homo sapiens
tggagggacacaaacatttatcctatagcaactggttggatgtcgtgcaaccatcggattccttgaagcaggtccagaaaggagcacgtgcgactctgcccaaacctaacgggattcctgtctccgtctcatgactttgattctccgcagaacacccagggccaccccagtgaccttctgtccatttctgtttctctcca

SEQ ID NO: 151731 - DNA, 407 bp, Homo sapiens
aggaatgtattcaaaattaaggatgatgtggcaatcagatggaaatagaaagcagaacataaatcctagggaccaggaagggataaaataccacctaatacccacttggactttgcacctgaaggaagagaaattgatgatgactcttggattgctagcagttgttgtatctccttttttacattattattattattattattattattattattatttttggagacggagtcctgctctgtcacccaagctggagtgtagtggtgcaattttggctcactgcagtctgcctccccgggttcaagcgattctctggcctcagcctcccgagtagctgggattataggtatgcgccaccatgtcctgctaatttttgtatttttagtagagatgtgatttcaccatgt

SEQ ID NO: 151732 - DNA, 232 bp, Homo sapiens
gggccatggtaccagtgctggggccttaggctgtcaggctatgccccaagggcttcaggcaagatttcacaggagtctgagtcagaaatcctgtccttccaatgcttccccctggccaggacacagatgccaggatcgggccatcatcttctgctccttctttggggtccctgaaactggtcagggaatcctccattgtgtgagcgtctgtgtctcctgacctaggccctga

SEQ ID NO: 151733 - DNA, 178 bp, Homo sapiens
gacaaaccagcacgcaaagttccaggtttactattaggtcactgcaaacaggcagagataattcaaacgctaagttctgacaaacgccccagtcctctggatatccacctggagaagcattactggtcccgtggggttagccattccttggtaactcacattatggacgctggtgcag

SEQ ID NO: 151734 - DNA, 432 bp, Homo sapiens
ctctagatgaaacatgatgggagcctaaactagaatgatggcaatgaggacaaaaagagagacgtgggtgactgacacatttgttgaattgagtgttaagtgggaagtatgatttggtttgtagtctggtagaagccacagagtattggaattgattgtcatgggggttgcttaagctgcaactcacagccacttgaaactcatctctacaaatagataggtgaaagcaaaaaccatgtttgtgagttccttgagttatgtcctcaagtttctgcctttgttatgggtttttttttgttgtttgtttgttttggagacagggtcttgctctgtcacccaggctggagtacagtggtgcagtccgctcactgcaacctcaatcttgcaggcttaagtgatcctcctgcctcagcctctcgagttgctgggact

SEQ ID NO: 151735 - DNA, 706 bp, Homo sapiens
aaaaggtgtaaagaaagctgcttttatgaaagcagacgtttcccaaaggacttgaccccctccccaagtatttccgcagggatggtgtggctatgcagaggtgagggtgcttccctgaagtgctttggtgagaatttgctcacctggcgaggggtttgcttaccagttcatcttaacctaattaagtttgcattgtctctggaacgccacgtttgggggataaaactcatagaaatactgaaatatagcaatgttgttgaaaacctgtggttatgtaaatatcctcagaactctttgtgctggagtaatatgaaatctcgatggctttgcagcagccttccaacaggtctgcggggtgcgggtgaaggtgacctttccaacatcaaggagaagggccagagaggcgcccggactcacagtggccctttcctggacccttcccaggggcggagggccagagaggcacactccgattatggtccatctttatagtaatgctgggacacaggcattgtcatgccaactccataactgatggccagggagtgtaagtgatgtcaccaaggccagaagccacagagaggcaccaagatcccagcttaggcctgtctgctgccgaagcctatatccctaaccaggatgtgagacccccactcattacataacaaaactaggaaaacttttctgcttatttatgaaaaaaagg

SEQ ID NO: 151736 - DNA, 285 bp, Homo sapiens
gtaatttgctcaaggccccataggcaccaaagctgtttgaaccaaggccattctaattccaaagcccttacattcaacattcttttcagaggagggtatataaaggggtttagaaggagaggtaaagtctaaaagctaccgcagctgcacataatttatttcctaatagtttgctgtccgtggcagaaatgactgccctctggggtgtgaagccaccgctgcagcaatgattgaaatcacctgggaagcttaaacaatcgccctgccctcacccaggccaccccc

SEQ ID NO: 151737 - DNA, 415 bp, Homo sapiens
gtgcattgctagtatgaatataaactggtacaggtgttttagaaaacagtctggcatttcctaaaaatgttaaacatagaggtttttgacccaccagttgtacccctgggggaaaatgaaaacattttcacagaaaaacttttatgtgaatgtttgtggcattatttcataatagccaaaaagttaactatccattaacaaatggataaacagaatggtatatctatacaattgaatatttttcagtgataaataaggttgatacatgctacagtatggatgaaacttgcaaacatccatgaaaggccgtgtattgcgtgattccttttatatgaaatgcccagaataggcaaatctataaagataccaagtagattactgattgctggggagatagggaggattagagtgataa

SEQ ID NO: 151738 - DNA, 305 bp, Homo sapiens
agaggccaaacacgcaatctctgataagtttttatgtttgtctttatcattgtaggaagttacagggggaggggacttgcattcatcatgtactaacatttgaatagtattttgaggttaaaattttctacttggttttttaatttcggttatgtggatcataattagtggatcattggccttcaaattatatttcctatttctttcattcttatgctccattaaaaatgtatgggttgcttttaggtgaacatatctatattgatatagatataggaaagatattgacagattgcggaaataaa

SEQ ID NO: 151739 - DNA, 362 bp, Homo sapiens
gagtttaattagccctggcgcttgattctgaaagaaatggagagcagtgatgaacacaaacaggagagatctgggcagtaacaagcctggcatatggcaccatggatcacccattggccttagggctggactaagtcctaggtgactttacttctaaatgttactcatgtttattctttcaagatgctagataattaagacctgactacccgaaaccaaaaatacgagctgcttttggatgattagtggtgcatgcagagtcattggaaatgtagtgggagtagggaaaacagttctgggtttggattcaaaagactgagcttgaccccagactttccccacaactacctgtatggtcatgg

SEQ ID NO: 151740 - DNA, 236 bp, Homo sapiens
tgagctaagtgtgtcccaagtatggtgaacagctttaggtcaaggaagaaagcaaagaggagagaaagcctatagctgagtgtaaaagtttgaggatttcaggagggaagatgatgatgaatcaggatctgtcagttctgatggaatatactaacagtggctgggtttaaatcctggctccagggccgggcacagtggctcatgcctgtaatcccagcactggaaggctgagatgg

SEQ ID NO: 151741 - DNA, 303 bp, Homo sapiens
catatttttttcaatgaagattgtgctatactggactgctcctagttcatcactctcttcattctcagaaatatttcttcactattttattcagtgaattgagatcagtaagcatgaacttcctggtttttgcctcttgaagcattttgccttctctctcatacttaccttcaatgtgtcacagctttagagtatgacaagcttctatatctgttcaagaccaaccctggaactaaatttcttgcttgttttcccttcacccctctggaactccttagctctcagttcccctcttttcctatc

SEQ ID NO: 151742 - DNA, 572 bp, Homo sapiens
gtcaggacttgactcctacacacacatatgtatgcacatgttcatgtagacacacatgtactttttaacaagaaacaggcccattttcaaccatattgtcaacactcttattgtaagactcttgctttttaggcttaacttcagggttaatcataaagcaattggcttatttgcccccaagcataaacatgtgttactcccatgagaacaaggacattatttcatgcttagaaagcaggcataagtatcagtgttcaaaacagcctaagcgaaaatttaggcttggacaaatgtcaggctaggcctgtggtctatttcactgttagaaagaacttttgatgggtaaaagttaatcactggggctaagcattcctgcactcggattccttcttccagcagtctcaggacttcacaccaaatatgagaaatggagtgattactagcttcctcttttctcctctcacacatcaaagtgggagctggaaccaattgaggccatgtaggaatctggtttatcattgggattgtaaaagatatctggggtcaatactggtttggactggtccgctggg

SEQ ID NO: 151743 - DNA, 433 bp, Homo sapiens
tgcaacaccaaggtaggagagggaggcgtggtcctgattaaaaggtggggcagggcaagaaggaagacacagaagtggaagcacacacagggcgaggcctagggcagtcctgatgagtttctgaaaagaggccagccatcaggctatgccacactctggctacagtgcgactaaaatgatttgtgtaaataaaagagcattttattgggcaaatttatgcacatcagacttcataaagaacactttcagcaaagatcaagtctcatctctatgattatcatactccccctaaaaaactaagcagtacgctttcaaatttgtgttaaacatggccgggcgcagtggctcacgcctgtaatcccagcactctgggagccaaggcagatgggtcacttgaggtcagaagttcaagaccagcctggccaacacagtg

SEQ ID NO: 151744 - DNA, 409 bp, Homo sapiens
aagttgcgaatgtgtgtggccaccggtctgctttcggatggtgagagcaaagttctttactgtctggaaaggtgatctggggaccttttcacaggtcaccagccacctgtgctctgtgatgtgcagctgtgagcacagtagggtcgcagttctaggcagccacaaggcctcatggtgtcctggatacaggatgctttcccagaacccttctggggctccacatctatctccacactttgggtggggaagttgcttcccttgggtggatccaaaaattccagctgacttggagggaagtgagttgagagcccctccagcggtgcttgctcaggtgagtagcttttgctattacatgcccaggcccagctggcctagactggaagctcccagagtccaaaaaacaggggct

SEQ ID NO: 151745 - DNA, 539 bp, Homo sapiens
ttaactgggcacccatccattccttggcttctggaagttctcggatgccttaaattatatgtacaatgtctataatgtaagcacccgagagaggccaacacataatggctagtttatgttgaggtgctggatactcatctccaacagactctgtgtaccaacccacatggcctcctgaggcacagagaaaacgagtctgtgcacaagattgctctactccccttatacagaacaatacttgagttctgagcagccctcctaccccaaagagcagaatcactctatcgtagtgatgttctggtttcccaccttggaatgggaggaatgtaataaaaaacaagcccattctccccatcagagctcctgctgttggatacttcccgccttaacagctgaaaaagaggcaatttctgatgaggaaattggattgggttgaagaagagtcacaaataccttcttatttgctcctgacccactagtgtgtactagggaatgcctggcctcgaccttttctgaggtcaaggctgctacagaggaat

SEQ ID NO: 151746 - DNA, 301 bp, Homo sapiens
gatggaaaagaaggggcacatttgggccaacgaaggggctgggtgtcctgggtaataagtgtggccacactgtagatgatgagcttagcaaacccatcagcagcccccaagaactacagcctagtcaaaggcaatgagtttctgagtgctacactaggcatctacatgcacgctgcctcctcctgagaggtggttaccccaggctgaaaagcaaatgcgccaggtggaatctggaccaactggatgaaataaaagcaccaagaaccaaatcctatcactgtcttatggaacagggttgctg

SEQ ID NO: 151747 - DNA, 612 bp, Homo sapiens
ataatgaacattctgtcattcttaataaggcttccaagacttggagctaaagcagctgtcaacctggaagtaccaatggacactgacaaaacaataaacaaatctccaacaaaagcctgttctctctagccaaaaatccaagacagtcttgagaagactagtaagacagaaaacttttagacaataacagctctactccagccagccacaacaacaataacaaaaaaactgtggctctaccccacccatggcaaaagccaagtggggaagccaagctttccactcatgcctgactgtgacaaggcactcacccttccttccagggtaacgtctgggaaagctgagtaaggaattggtagtttcattctcactgggtggtaaggagtccaccttactgttagcagagtccacatgactttagtagtgttggtagttgtggtggtattattagtagaggccatttagggagccatgacaaggcactcatatccatcgcagtcagtgagttaccagcagacacctcgtgtggagttggaagtcccaaccctagcagttggagacagactccctgctacaacttgagagtcaacagaggccaaataaggaacctgg

SEQ ID NO: 151748 - DNA, 1031 bp, Homo sapiens
tgcaatattacttcttttgctttgtgctggttacaagcaggtcacaagcctgctgaaattcaaggataagattctagaagataaggagccgaaggaaagctttaccttcaacttctgaagatgtgttaaaagtcactgacaagagtcaaattaataacagaaaaggcatacaaatttaattgatcatagttttacataacacaggagccttcagaatgaagatccaaagatacagaggaattgtacattttaatgcttagggtcgacaaaatatggacagccatgtacaaatacgattgggcaaaaagagaatgatctactgccaatagagttgggaaacccagcaaggcctgtctgtctagactcctcttggcctcactgcgcagcattcgttcctccttggtgtgtggcaggaccctctatggaaagagggtgttatgacctacaattaaaaaagacttggagctaaagcagctgtcaacctggaagtaccaatggacactgacaaaacaataaacaaatctccaacaaaagcctgttctctctagccaaaaatccaagacagtcttgagaagactagtaagacagaaaacttttagacaataacagctctactccagccagccacaacaacaataacaaaaaaactgtggctctaccccacccatggcaaaagccaagtggggaagccaagctttccactcatgcctgactgtgacaaggcactcacccttccttccagggtaacgtctgggaaagctgagtaaggaattggtagtttcattctcactgggtggtaaggagtccaccttactgttagcagagtccacatgactttagtagtgttggtagttgtggtggtattattagtagaggccatttagggagccatgacaaggcactcatatccatcgcagtcagtgagttaccagcagacacctcgtgtggagttggaagtcccaaccctagcagttggagacagactccctgctacaacttgagagtcaacagaggccaaataaggaacctgg

SEQ ID NO: 151749 - DNA, 312 bp, Homo sapiens
acagagcagtgggtgggaggtgaacagcacagagaatgtggagaggctgtgagggaaaactcacaattcagggaccccggagtcctgaaaaagaggacacactgcccacctatggaagcagtctaatttcccagtttccatttatcatcttcaaatcaaccacttccattttcagagcttaagctttcgaagaccttcaatatgaatgaaataaatgtggatgttagcaagactcttgcttaaaaagaacaagttctgtgccctgttacaatggattttcctagttctaagtgacccatttgtattcgtcac

SEQ ID NO: 151750 - DNA, 1312 bp, Homo sapiens
ggggaggcgcggggcggtcggctgcggtggcggcgtttggatgattgtctctcggcggcggagtcggatactgtggcgtatgaggacctgtctgaggactatactcagaagaaatggaaaggtctcgcactcagtcagagagccctgcactggaacatgatgctggaaaatgaccgtagcatggcttctttggcaggtaggaacatgatggagagttcagagctgactccgaagcaggaaatttttaaaggatcagagtcatctaatagcacatcagggggactctttggggtggttcctgggggaacagagactggagatgtttgtgaagataccttcaaagagttagaaggacaaccctcaaatgaagaagggagcagactagaaagtgatttcttggaaataatagatgaggataagaaaaaatccacaaaagacagatatgaggaatataaggaagttgaggaacatccacctctgtcttccagtcctgttgaacatgaaggagttttaaagggacagaaatcctatcgatgtgatgaatgtggcaaagctttttattggagttcgcacctcattggtcatcggagaatccacactggagagaaaccctatgagtgtaatgagtgtgggaagaccttcaggcaaacctcccagctcattgttcatctcagaacccacacaggggaaaagccctatgaatgcagtgagtgtggaaaggcctataggcacagctcccatctcattcaacaccagagactccataatggggagaaaccctataaatgtaatgaatgtgcaaaagcttttaatcagagctccaaactcttcgaccaccagagaacccatactggggagaaaccttatgaatgtaaggagtgtggggcggcctttagtcggagtaaaaatcttgttcgacatcagtttctgcacactggtaagaaaccttataagtgtaatgaatgtgggagagcattctgttccaatagaaatctcattgaccatcagagaacccacactggggagaagccttataaatgtaatgaatgtggcaaagccttcagtcggagtaaatgtcttattcgacatcagagcctccacactggggaaaagccatacaaatgtagtgaatgtgggaaagccttcaatcagatctctcaacttgttgaacatgagcgaattcatactggagaaaaaccatttaagtgtagtgagtgtggtaaggcattcggtctgagtaaatgtcttattcggcaccagaggcttcacacaagtgaaaagccctataaatgcaatgagtgtggaaaatcct

SEQ ID NO: 151751 - DNA, 244 bp, Homo sapiens
aggagggacggtagatttccatcaaggaaggtgttctgaaagacacctgtgttgtagatttggggtacttttgtcctgatcattgatccctgaagagactgcccatttgacaggaactatcaggtcaatcaagaacatttcctggcaagggaaggtatgcaaaagccatgatttggagctttgactcacaaaaaaacattaaaaagcatctgaggcttcaaaaaagggcaaaatgactccaaat

SEQ ID NO: 151752 - DNA, 460 bp, Homo sapiens
caggtacatctacatgcttatcaaaaacaacagcaaaaccacctaccatgacaaatactattgcagcaaaactgaacaaataaattctgtgccataaagtttcctaaacctcatctattttgtagaaatctagtcacttgagtatcatccttcacaaagttctttctattctttctactgtacaaagttttctgttgtcaaatagcaagagatctctgttttctacttggaatgggcctggagaagggagacagcacccgctccctccaccccttgtccctgagcacagcatggtgacctgccaagccagagggtgacctggacactcataactcaatgcagggccaactgtagcctctggccggtgtccctgagtgagggcaaagttgtaataacacttgttctctcctttctccaatttgctcccaagctccattgctttcgttcaggccctccccct

SEQ ID NO: 151753 - DNA, 392 bp, Homo sapiens
ccactgcctcaacacacctgaggcttggtttcatcacttgcagcaatgatgctgagcgcagagacttccctccaccttttatatatgaagaaacaagacccaggtcacctgatttctgaggctcttctttttgtttgattcttctcacagtccaccctcctactccctcagcttcagaagaagctcaatctcaataggtgatgatggggactgaggagggcagcccaagtggacagactaatgagggtaagggtatggccttggggaggctcagagacctgccctgactcactcagaaccagctaagtctttgggagctgccccaaagggatgagcctcagccacctgccaggttcagggtaatgccctcccccagccatgggtgccccagg

SEQ ID NO: 151754 - DNA, 527 bp, Homo sapiens
ttctgtttgtatggtgaatcacatttgttgatttgcttatttggaaccaatggtgtatcccaggaataaagcccacttgatcgtggtggattatctctcagctgtgtgactagatttgttttgttagtcttttgttgagaatgtttgcatctgtgttcatcaggaagattgacttgtagttttctttttttggttgtctctttgactaattttagaatcaggatgatgctcactttgtagaatgagttagggaggaatccctccttctaaatttttggtaatagtttcagtaggattagtcccagcttttccttgtatgtctgatagaattctgctatgaatccatgtggtgcagggcttttttggttgggtaggtttcttattactgaatcagtttagtacatgttattgatctgttcagggtttcaatttcttcataattaaattttaagaggttgtatgtttccagaattcagctatttcctctagattttctagttggtgctcatggagacgctcatcataat

SEQ ID NO: 151755 - DNA, 374 bp, Homo sapiens
tgcctgaattccccttcctgatcacagtgccactgttccataaggcctgctgacccctcaacaagccctgttccccggagatggaattatggattctttcacctcaaaacacaggccagctcagcggcctgccctgctgccatgttgcccatagaccagcaggttcctgacaaaggacaaaggttgcttttccatgctccccaaaaactgtgaaaaacgaaacaaatacccaggctctttttagaaataaagcagtacaggccagctgcagtggctcacacctgtaatcccaaaactttgggtggccgattatcggactgcttgagcccaggagttcgagaccaacctggacaacatacagagaacccgtctct

SEQ ID NO: 151756 - DNA, 122 bp, Homo sapiens
tgctcggagggctgggacaggagagtcgcttgggtgtgggaggcgcaggttgtagtgagctgagaatgtaccactgcactccagcctgggcgacagagcaagacaccgtttcaaaaaaaaaa

SEQ ID NO: 151757 - DNA, 287 bp, Homo sapiens
cctcaccctaaactcacacacacactctccacaatgtcttttttttaaaaaagagggaaagggagaaagaaagagagaaacagggtctcactctattgcccaggctggagtacagtggcatgatcatagctcgccacagcctgaaactcgtagactcaaacaatcctcctgtctcagcctctggagtaggtgggactacaggtgtgtgtcaccatacctggctataactttttaattttacttagagacagggtcttgctaagctgcccaggatggtcataaactcc

SEQ ID NO: 151758 - DNA, 591 bp, Homo sapiens
cgcatttagatccattgtagtaccggccgcaggtgttatgagtatctagcagaatatcaggctacatctaggagtcgcttgtgttcactgaagaatggcctgcaccagtgcttcatgatgggtgaccgtggggcaggtgaatgtctaatctgtgccacactgttagggataactgatgcagccacagagggctccctgcctatgtctgagctgtaatgatttgcagccaggcacatgtttggggggcaccaactactgaactacaaacgtgcaagtaagtatgatgtgctaggatgcctctccttgaatctgtgctaactagaaggttagactgtcctttaaatgctacatctattaatctagatgaggtcaggtgctacgaattccaagtcaatctaccacactcccctgttttcctgtagggtaagctacactacatttgactgagttacatagggaagaaaatacatattgaagacaacaacaaaattaattctagggaggcaatgtagtgtagtctaaggaaaatggacttctaagaggccttgaggcctgtgttcaaattctagtcccacctcgtatgactttggg

SEQ ID NO: 151759 - DNA, 408 bp, Homo sapiens
ggtgaaggaatcgttctggaagacaggcgggaggggaggggagctggccagctgtgggccctgctcttcttgtttcctgcaagcaggtggtaagtgaacactagggcaaggtgcaggaagagaccatgacatgttcaggttctaagcccatcccactccgtctcactcagactgacttatccccgggcagtggcagggagtcttcgcccatcttgccctgtgggaatcttggaatccagtccatctcccttccctctgtgtcccgtaaaaaagccttagaagaaaagcaggtgagaagtcattaccactctctgcctttgcagcccagggggaatttagcccagactcaattatcaattatcacaacatctttgatgtggcactaagctcttagattgtgctttctcg

SEQ ID NO: 151760 - DNA, 274 bp, Homo sapiens
tgagtcttgggcatcaagtcaaccaggagaaggtttcggagaccatcacccatgtaatggctctgcagtgagcctgctgtgaccccagtggttctcagtcctggctgcacattcaaatcaccttcgaagcttgttagactacagaagcccacctctggagcttccgatttaattagttgaaggtggtacccaggcattgctacttttaaaatatctgcctggtgatcccaatcagttttcaagtttacagaccagctcagaaactgctttggag

SEQ ID NO: 151761 - DNA, 438 bp, Homo sapiens
tgcctctgaggatatttaaatgtggccaggctgggccgaaatacctctgaaggaactgtgcattcgttcataagctttgtagcgtcacaaaactctgaccagtatttttgattgaattctgaatatttctgagcttttgtgtgattccgtggttacggcttccagtgtcattcagtggacgtgttccaggtgtgtgaacacacgcacacacacgctcacacattcacacacgcgtgcacacaacctacacacatgcaaacacctacattcacatgtgcacacacacctacaaacatgcacacctacactcacacatatgcacactcacacacgcacacacacctacagtcacacatgcacacacctacattcacatgtgcgcacacacccacacacctacacacatgcacacacctacactcacacatgcacactcgc

SEQ ID NO: 151762 - DNA, 303 bp, Homo sapiens
ggcgtgggaaactgttgggctaaaaccaggatagttttggcggagaaagtggccaaagggagtgtctccctccgatgccctgtaaacttctgatagcttcttccagttctcccttcaacaaatccagcaatccaacaaatcttaaaaacaatcccatcggccttcgcaggaatttgggctaagagtgattttcctcactaagaactccatacggttttcataccaaggtcaggaagaacaatcctctgccccacccccagcgcctggcagatcgttttcctgcctgctgaccagcatcatctg

SEQ ID NO: 151763 - DNA, 313 bp, Homo sapiens
aattgcagctacttcggaggctgaggtgggaggatcagttgatcccgggaggttgaggctgcagtgagccatgatggtgccactgtactccagcctgggtgacagagcgaggcctgttatactaacatcctttcttagacaaatggaaacataccagaaaaattttttttttttttttttttttagtttttagcttaatatattctggaaacctcttcaacctgtaacataacatggagctctcattttttttcacagcagactggtgctcccttatgtgcatgaagcaatttatctaaccagtgccttgcgg

SEQ ID NO: 151764 - DNA, 804 bp, Homo sapiens
cctccacacataccatgggtgtcggaaggaggacagaaagaagagcagtgactttttctcctccatttcaggcacatggatttcacttaatctctgccacaggccactgagcagctcccagcccctccaatctagcctcccaactcccaacttctcaggactttccttgagcagaattgagtacacccctcccccaagagcctctggggcaccccagagcgggagggataaaggcctacccctccagtccacacctctcccacccgatccatgccagtgctcccccacacatgcccttcgttcctgccagcctgaactgcaggctgcttggctcctccaaccgctgcacaggctcttgccgctgcctggaatgcccactccctcgctatcccattaactcctacaccaaccatcctctccctggggagcctcccctgtcctcccaggctcctgaggaggccgctgcatgcggtggacagaatggacacacctagccaccaccctgacaggcacggccgctctgcctcaggctttccgagcctcagatttcctagttgtacaatgggaggcaggattgctctgaccagtaaacatgaaacagtgtgtgcctggcattagtgatgccaaccagggtcacctttctccctgttccaccctcctactctggacttgaagctccttgaaggcagggagtatggcttctgattcagaggccccagcaacttacacagacttcagcacagaccagatgctccctgtatggtgaacgaacccccatttcacacccaagaaaacccaacaagt

SEQ ID NO: 151765 - DNA, 435 bp, Homo sapiens
agtaagtgatctggagatcccatcttccaagaaggcaaagacagaaagtgggagttgcagcgatccaggaaaacagagaagcaaagtgaaagtaggaaggagatgtaaaggtgactcagaagtcaggtgaggggaccacatggaacaggagggggtgggtgacccgtgagagcagacagctaagggaagaaaacataggatgctggagagctggtttggttggaataacacggaagacacccgtgaaagacaagaagcacactggcccgcaggagacgaggaggaatgaggatggcaaatagtgaatttttttttttttttttttgagatggagtcttgctttgttgcccaggctggagtgcagtggtgcgatcttggctcactgcaacctccacctcctgggttcacgccattctcctgcctcagcctcccgag

SEQ ID NO: 151766 - DNA, 661 bp, Homo sapiens
tgtgatcccagctactcgggaggctgaggcaggagaattgcttgaacccaggaggcagaggtggcagtgaaccgagatcacgccattgcactctagcctggacaacaagcgaaactccatcccaaaaaaaaaaaaaaagtaacctgaccaaaaatggttaagtagtaatgttattattgattcattagcctggatggcctattttctaaactccacaaatgggttgggaatataccaagtgttaataatcacatctgagctagtctccatctttggagttcacaaccccagaataccctagataaactgaagcataattctggaagaagttctaagaactctgtcatcactgccgaactacataactacattgttagttatccaatgctacttaatttaaaattggatatttgatctcttaatgaatggctgttgtcacatttacccagaattagaatttctcagagctctctggagaaatattggacccaactaatggatttgaagtttcaggaacccagcctaattctaaactgattacaaataaaatcattagatttgttaagccaagaaaaatgtatgatccagtatgtgattgattctgtgtctgcaaatttatatgcacagcgtatttaggtaaaacattgctcttataccatca

SEQ ID NO: 151767 - DNA, 113 bp, Homo sapiens
aagtctcaggaaggatataaaatgattattatgcaaaaagtctacactgaaaaacatcaatataaaatgaaataaatgaaaaaatgtcatgtgtccttaaaaggagattaaat

SEQ ID NO: 151768 - DNA, 289 bp, Homo sapiens
tttgaccactgaagtcaaggagaggagcttgctctgaattgttacacacattaagaaacttctagatgttttagcactttgtgctcaaaggcgaaacctgcaggatttagaaataagtaaattcggggtgctcttcctcggaggttgttttctggctgcggtttatactgctttctcctccgccattcgattagaccctgggctagtagaatcctttgaaactcacttgtgcctactgtgtgccgatgaatttgggaacctctttttactttgcagaaacttttatttc

SEQ ID NO: 151769 - DNA, 253 bp, Homo sapiens
gttcttgaaaaagatcaaaattaacattataaaggcagaaactgctggtgattatagctcagtaaatgacattgattgaacaaaattgtaggtggaaaacttgcgttcagttttttccttcaccttttctgaaaaatgagcatgttcataagattatggcaagtttagaagacttagttttactgtgctattgagacctctgctataaagcctctacctgcttctcagatgggcaaaaaactcgacatctgta

SEQ ID NO: 151770 - DNA, 304 bp, Homo sapiens
ttgtcctgtgaactttgtcctatggtagtaagtggcacaggtgagattcgaacttggacctgtcagatgctgatccctgtacacagctgcctcgatgctggtcctgacagcctggttccaggagcctgtgctattgctgattacattttatagttagtcaggggacattgtcagctcagtaaccctttgaatacaatactcttcaatagcacagactttctattatattttgcatttgtaaaactaagtgaactgagtctattcctgtataacagaaacgagagagagagagaaaggaataaag

SEQ ID NO: 151771 - DNA, 372 bp, Homo sapiens
tctgaggatccctgtgcgcgggatcctcacacctgcttggagccttcccctcctcgttaacttcaacacagtgaggtctcaccgcaggcctccctgctgtagaaagccttcctaaccgcacaccaggctcgacgctcatctctggctggcatgtgactctgcctcctgcactgggcgtggtaactgtctggctcctcgtctgttccctgcatgaacctcgagttccttgagggcaggaaaccagcccaggacctgcccacagggccacctggtaagggaacaggtcagggaaagcccagcccaggtcctggtggtcctggcacgtcccctctgcctagccatccaggctcgcatcctggcagcccctccccc

SEQ ID NO: 151772 - DNA, 189 bp, Homo sapiens
atagagcacaagaaagagacgtggatgaagtgtgttgataagggtatcagtgtcacaaagaaaggtaagagtggatgaggccgcatatattacagccaactcggaatgtagactgagaagcatgtactgttaaggttagggctcaatttatcaaacctctggtatcatctctttataccttagatcctc

SEQ ID NO: 151773 - DNA, 542 bp, Homo sapiens
agtcgagaccatgccactgaactccagcctgggcaacacagggagactccatctcaaaacaaacaaacaaacaaacaaacacaaacaaaaaaaacaaagccaagccaggcctcagggagatatgttgctggggtgctgtctagccctcccactacatcatactcccaagcagccttacaggatcgtcctgcaggctccaccagactatcaaactgaagccaccaaaagccctctcatgtgacttcatacacagatcacccagcacagttctgatgatataagctgtcacttatctgcaagtgaactgaatgtcaagatcagtggtttgtgatcttgccatctgatgtcagatttagctcacaggagatactcattaaaatcatttaggaagccaaataggatgtacagcaggtcaaaacccccaccacgaggaaggaagggaagacatgacccattttctgcagacttttactttagtttggtattattctttgagagtcttcaaccaggattacaactggcttgaatcctgctcattctag

SEQ ID NO: 151774 - DNA, 326 bp, Homo sapiens
ccatccctcttgtccctctgtccttccagtgctttgacatttggtgggcacagagtagaacaatacaaagtactgaacaataactttggttttcttgccaattttattgcttggcaataaaattgtatacctaaggaaagaacgattttaattttttaactttagaactcaacaagcacttgtttggtattgatactttactttgtaagccttccacaagaaatcaaataatgtctcttgcgctgaaatcgtcaacgggttacacactctgcaaagttatgggaagcacagccctgaccttaaataaatgccaaattgggtggtaa

SEQ ID NO: 151775 - DNA, 145 bp, Homo sapiens
atattcactgtgggcaaagcaacatctctaaagatcatatttcccttttggaaaactgtgttcctttttgagggccataaagagtttggaatctggactgagaacacttgaggaggccacagcagcaggacatcaaggccaatgg

SEQ ID NO: 151776 - DNA, 569 bp, Homo sapiens
aaattcaagcaaggtgggtgtttggaagctgagggaaattgcccacaatggcctctattttcccaatcaagtaggaagctaagttccagcatggaggagactggggagggggacactgagggaggtagatgctgaggacactggaaggagctggcaagacaaagaaccaataagctccagatgaggttggaaattttgagtttgtagtggtgtctacttggatgtgattttcttcggcaatgatcaagctcaacggaaaaggtaaaattttagtactgatccatgctggggttttgctgggaagataagcaggaagaaatggaagggaatctaaaacattagcttaaaatgataatgataaagtaacgaaatcaacaaaaagaaacctggctacaacagttagtatttcttgagatgactacacgtcaggtactatcctatgcattttgcatttatcatctcactcagtcttcacaacaaccctgaccaaataggaccctgcccactgcccctttgatctgctttgggcaccctgtactcacagcacttaggatgctgccctgtcactg

SEQ ID NO: 151777 - DNA, 335 bp, Homo sapiens
tctgccttggcctcccaaaatgttgggattacaagtgtgaaccactacatgctggggttttgctgggaagataagcaggaagaaatggaagggaatctaaaacattagcttaaaatgataatgataaagtaacgaaatcaacaaaaagaaacctggctacaacagttagtatttcttgagatgactacacgtcaggtactatcctatgcattttgcatttatcatctcactcagtcttcacaacaaccctgaccaaataggaccctgcccactgcccctttgatctgctttgggcaccctgtactcacagcacttaggatgctgccctgtcactg

SEQ ID NO: 151778 - DNA, 235 bp, Homo sapiens
aacaaagaaaggaaagaaaacaaaaataggacgggtatagtggctcacaattgtaaacccagcattttggtaggtctaggtgggaggatggcttgaggccaggagttcaggactagcctaggcctaaaaactaaaaaagaaggccaggtgcaggggttcatgcctataatcccaacattttgggaggctgaagcaggaagagtacttgaggccaggagtttgaaaccagcctggg

SEQ ID NO: 151779 - DNA, 450 bp, Homo sapiens
gtactgcttctggctgcctatctctaaccttatttatctaacccatcaggagaatttgtgagttctctaacatttttctgataaactcctgatctgcttaaattacagctcatttatgatactggtaagtaagaatcctgactaacagagtggttgcaaactagggaaaacgtgttagaccaaaacctaaaacatggtacagtagagggatggagtattctgaaaggaccagacactgtgacattctttccttcaggggagatgactcaccctgaggctgtacaaagggcaacccagatggtctcactagcaggtcatagcaggatccatgcctgtgtctttggtatcctctaaaattcagtcatgaatttcagttagcatgtgaaagctcaggcccaagaattttagctcttggagacaaatgtcttcattagaagagtaggagaatca

SEQ ID NO: 151780 - DNA, 357 bp, Homo sapiens
gaccttgccacaaatcccacctgctccctccctatcattacctatatcctccagatatccaagtcaaaagcttgtgtgagtgatgaagaaagagactaggaaccccactcaagaccttcagagagatggccctttctgagagagtctgctagctcttcaaactatagaaagaacatgggctttgacatcaatgctttaggtttgaagtgtaaccatcccataagttaactgcatgctcttgggtgaggaccctcctctgtgaagccaaaatcctacccctcactctggcagttgttgtgaggattaaatgagacagtatatgtaaagcccctgcccctagcaggctccttttccaca

SEQ ID NO: 151781 - DNA, 277 bp, Homo sapiens
ctaagcccagggttctccatgacagcattcccagtatcaaatctgtttcttattaacatgtccctgcagtggagtcgacagtaaagggcctcggagggttctggagaccaaaaaggaggccggatgaaagaggccagtctcatgcatcatcagacattcctgcaaatgtgtaaagaatccacgaggagggagggggagggcaagcattgccagatgtctccaagccaaccctttaacccattcctttacctgcttcccaccttcaagttttgtttct

SEQ ID NO: 151782 - DNA, 496 bp, Homo sapiens
ccaggcaattgagaaggtgaggcaaggaaaatcacttgaacccagaaggcagaggctgcagtgagttaaaagggcaccattgaactccagcctgaaagacaaagcaagactctatctaaaagagaatgtcaaccatatgcctgcagcccaggccactcctcagagtcccttggccattcctccctatcattttcacatggggtttcactggtgccagataagttcacttatcccaaacttaactcttgcctttcttccccaaatcagctcctctctcctgggcctcctgaccttagcaaagacgctgtcacccaaacaactgctgaagcccaaaacctggggagtcattctttacacctccctctccttcaccaccccatccaatccaacaccaagtccatttcaaatccttccccattgctccatttcactgccactagaataatgcatgccccctcatctctcacctcgcacgccccctccatctctcacctgg

SEQ ID NO: 151783 - DNA, 362 bp, Homo sapiens
agtttgtccatggtaaagctttgtgaacacaatctagctactgtttcccccagcaagaccatgcttatgtcctagaaaacctgacagattcagaaatggtcacagattatataacttctaaatgaatcaggtaaaaatggaagggaagaaaactcaaaccaatggaaaacactaaagaaatagaagaaaaaaagttcaaaaaatacaaggtaatatggaagaaataaattcaaatatggtattaatcacaataaacgtcaatgggctacacttgctagttcaaaaacaaagagtctcaatttgcattaaaacatactgctttattctgtttagagaagacatgctgaagacataaggtaacc

SEQ ID NO: 151784 - DNA, 883 bp, Homo sapiens
gagctctcctgtgcaccccaggcctgaatagccaaatgcctacttgatatctcaactggtatgtcctgctccattgatgagccaatgaccttgctatcaactcagaagttgatcctgtcacctcgctcttacctcacctacaaaatgcactcagtcactaaggcctgctaatccaacctcttaaagagatctcaggcctctcagctcacaccgcttctcacagccattaatctggcataggctctttcctgcatccctcggatcacccacctggccctcgagtcctcagtcttgctccctcccagcacacacacattcgttcccacatttgggtcacagtcatctttcttaccccaatccgaccacgtccctccccttcccccttcttttcctcaaaataaagttcaactccttaataccgaccataaggcccccccaatctgactcttgcacccactctggccccaattcacccccgccatctagtcagggtgtggggaagagagatgggctctgggaaggagctcacacccttatcatcccttctaggctgtttctcctcctacgaaaaatcaggatggacatttcaggtcttcccagggctgaaatccagcaggtgcccagaggagtgtttcccaatcctttggccttcaaagaccccttattattatctcccagggtcctcagctttgtctgtaaacaagcagtgtttatgaagttggcattctcagtttaagctgatcagagacacagaaaggccaatgaaagtttctgggctctcaagggacagggtgttcagccctgggaagacctgaaatgtccatcctgatttttcgtaggaggagaaacagcctagaagggatgatacgggtgtgagctcctt

SEQ ID NO: 151785 - DNA, 145 bp, Homo sapiens
tatttcattgtcttcccttgagacagggagagtgggtgttctcccctaacccaagaagaaaccgaagcccagacagtgaaagtgagtggcccaagaccacagtgactcagtgacacagctggaataggactagaacccaggtcct

SEQ ID NO: 151786 - DNA, 444 bp, Homo sapiens
tcacctcttacatcccacctttcagactaggtcaccctagacccagactggcataagtcaaacaaaagtttgccaccccactgaccccccttaccactttgggcaagtctgaatgttagactcctggttaggatgacctggagctgacctggtcaccagttctgatctgatcctgacttcccttccttacacctcagctcatgtcggtgtcacactcatgtctctgttatgaatccaggtggcttatggctgtttatagaactgtgttctataaaacctggaagtttctcaaagattcactcattttattcaacaaataccgaatgcctgactaatatgagtgctataggttctgcaagaaagtgtaaaaatagcaaaatgaagtccctgtcctgtcctcatgaatgacactctagtaggggtggaagtgggagagagtggaca

SEQ ID NO: 151787 - DNA, 350 bp, Homo sapiens
cagttcataatttccatagtgggctcataaaatatttcccatcccatgtgctcttcttacaatctaaccctgacattccatcagggggtgaatctgggcaggcctgtgactatggcagaaatggccctgtgggaatcccaaggctagcttagaaaaaatagcacagcttctgcctggagtgtgctcacactgacacactctggaagccagccctgcaacccagcaaccatgctgtgaggaagcccaagaaggcctacaggagggagacacgcatgcagccaccagcagacctgtgagtgagcgagccttcaggtgactccagccggcagacttcaagccgccttcagtgc

SEQ ID NO: 151788 - DNA, 539 bp, Homo sapiens
tacacgcatctcagctgtaagcctacctaagaagataaaaccgcctatttcaatttaagtttccctgaattccgtcctttccccaatacaattggagcgccggttctgaccctagtaacctcagacacatcagctcaggacagtagtttaaaaaaaaaaaaaacagaaaagaaaagaaaaagaaaaacaacgcatcattgtgagtcagctcaggtgagcaggctgaggttggcttttgcctgattgtccatgacgaagatatacctggctgatgaaacacattcccacctttgccctgagttccagtaaatcagacctcaccggagcggattagtgataaaaatgcatcttgttccgaccgtggggtttgatcctgacaccttcacaccactctccttgcagcttgtcctttttatatatttcctctgctgaggtctcagttcccataaaagaccatgttcagcacacggaactcaaaccctcaaagctctttatctggccaggcgctgtggctcacgcctgtaatcccagccctttgg

SEQ ID NO: 151789 - DNA, 404 bp, Homo sapiens
  misc_feature (286)..(286): n is a, c, g, or t
  misc_feature (399)..(399): n is a, c, g, or t
tgttgagtaggttcagtcagctgggtacccatttccatttcccttaaaggggcagagggcagtcagagggcatggctagctataatgccttccttttgggctttgtggatgaagggcaaaagtgtagatggcagaggggccttatagggggacatgtaaaaatcagggattgggagagtctgaggcctccattcttggcatatcactgctcttccccaaactgggaagactataacgaggagcaggctgggacccaggtggcagggcatggcgatgctcccaagcnctggctgtgcctacccctgcccacaggaaagctgagagaagaatggagagagggaggaaggagccataacttcggtgggagcagatgggtcagataggataaaatatgcagangagag

SEQ ID NO: 151790 - DNA, 388 bp, Homo sapiens
tggcatgggctggaacggctcaggactgactgccactgcgtctccctgtaagcccctccctttctggggagggaagccccccaacaacccacagccagcctcgaagccacgtcgccctggctctggttcccgctaacccttgctggggagtcccccgcacaacctgtcctgctgtttcctgctgtttctggagctagacaagcctcagctggcctcctggctcccggcatgggtgtcaggccctggggagtctccagtccctcctgtgggtactgggctgggctggctctgaagggtcttgaagaacgtggctgtgtgcctccctggcattcgcggtggtggctctggagcttgcgtttggctgagcaggccagcaggtgactcgcgc

SEQ ID NO: 151791 - DNA, 566 bp, Homo sapiens
ctacagctgtgggaatgtggaggggagacactccaggaggaggtggcgcctgggcctgcaatgacgcggacagggtcaaggcacaaagcacacgagaggctgactcagctccaagactgttgagagtggccagtgagggctgtgaaaataggcatgaccatgtgcaaggctgggaaggccacagtccaccaggacagcagtgagaactgaacagccccaaaggcctccatgaagagagaggagccacaaggggccagaatctcccggcaggagctgcggctagctactatgtttttatgttcttcctgcctcagtcttttcaggcaggggtggctgaaccaagaactcactggggtcctctctggctcaggggctcatcaaatcctagccccacacacacagaagcaggctcccaggaaaatgtgtccctggtaactccacagggcagcagggcgagaggtcctgggggctgcagggtctaagaaaggcaaggcagaggcagtgggacagacccctagccccaggggatgcaggagtggcccctcagatgctggccaggtgagact

SEQ ID NO: 151792 - DNA, 783 bp, Homo sapiens
ttctcaggttgaagatcatctcttctttttttcatggtgttaagcataatatggcgtaagtgacattttacaagttccagagcctgggactcaagatgtcttggagattctgtctttgcagtcttataatgatgccctgagatcatcattaaagaaagccagtctggcctactgaggatgagaagctacataaaggagaatgaagattccccagccaacaggcaatatcagtggtcagatatgtgaataaagccatgttgaacctctcggctagacgaccctccagcatatgaaaccagcagatgaatatcccagcctgcctgaagagctgtacaggaaataaggaatcattgttttttaagccactgggttggtgggtggtttgttacattgaaattgttaactaaaacagaaattggtgcatagaggtcaggtgctgtcataataaaaatctaaaacatatactgttggctttggtgatgggagtgattggtagctaaagaggcagtgaaacaatgattagtagatactgggaagttaataaggaaatttctattggagggtggagaaagggccacccttgttatatagtggccaaagaatcagcaaaatgttgcctgctgcaacctggaaagtagaaacttttcttaaactcacggatctggctgggagatttccaggatgcatgcaacaaatgtgaatcaactttgtatagctgtgtataataaagtgtgctgtatttgtccattctgatgctgctaataaagacatacctgagactga

SEQ ID NO: 151793 - DNA, 526 bp, Homo sapiens
gactagaggtcccctcacgcttatacttcagtctcgctgtctctaagtctcagactcatagatccaacaacctgctgaacagacagacatgcacataaacgtatagatgtttcttagacacctcaagtcagtatttccaagactgaactcaccatcttctttccccaccaaatcggcttctcttctcatatcccaaacttagttaatggcttaatgtccagtcacccagaaagccagaatcttgtgagtcattctggactctcttctcccctcaccattgcccccaaagacatcaaaattctgctaaattcgcttccccaagtatcctggtattttctctttcccttctgtgcctgcagcaatgatctcattgggtctctcatggtctttttcctaaacactgcgaggcctctagtcctgctgtccatgaattcttcttccaccccgcagccagtcatccaccttctgtgtacatctgactacactactggaggtgggaaaatgttccatgggctaaccagcagcc

SEQ ID NO: 151794 - DNA, 567 bp, Homo sapiens
  misc_feature (74)..(75): n is a, c, g, or t
  misc_feature (226)..(227): n is a, c, g, or t
ctagggtcaccagacccaaaacatatttctgaaagtctaggagctgaggtggaggtctcgagaaagatctgttnngtgaatgggattaccctcggtgttgcatttgtgcatggatcacctctgtgacaggcgaatcaccctgatgagatgaagaactctaagtggattgagggaggcctttgactcatcccagccccacattggatattggacattgtgttcaaanncatttgaaaatggacaatatttggacatttatggaattacaagggaccaggctggggaatatgaatgcagtgcggaaaatgatgtgtcattcccagatgtgaggaaagtaaaagttgttgtcaactgtaagtgtcatcaccttttatcaaggtaagttctgagaaaagataaaacaccttgaaaaattctgactgaaatttatgttgctgtttttaagaggttgtctattggtaaaaatcacctactaacactgaagacgtgtagatgttgaaatgttggttaaattagtctatgtagcaacaattgtcccaagtaaacccacaatagttcagtctgaag

SEQ ID NO: 151795 - DNA, 288 bp, Homo sapiens
cagaagggattctggagaggtatgctatttgtgtgcctttaggtaagtaattgaacctcattgtaaaaagcagttctatctggctgcctatctcttgagtttgttttgagattaaatgaattcgtggttgaaaatccactctgcaaactgaaagtcctatactatggtatgagacggctatttcctccactcatttgagcaaaggcctatttagtactcactgtgcactggataccaataccgagggactgagtgtgagtcctctctgtcttctccctgtccctctgc

SEQ ID NO: 151796 - DNA, 247 bp, Homo sapiens
tgaaagcaaaggtgctaaggtggcaaaggtaaatactgggagatggagcacaaggaagaagggggagattagtatgacactagtctggtctggagagagacagaaatcttgcacagtttataatggttttttttgttttttgttttttttttgagatagggtctcactctgtcgcccaggctggagtgcagtggcacaatcttggctcactgcagcctcaaccacccaggttcaattgatcctcctg

SEQ ID NO: 151797 - DNA, 786 bp, Homo sapiens
aggaaatattaggtttaacaatttgaaaagatctgtcgtttttgtgagtcaaaaatgattgattatggacaatttcatgtggttcaacctaatcaaacctaccagtagattgtaatacatcacaatatacagcatgttgcaaatatagtttgctcactctgaatagatttgtatatctttttctttttttgttatcaaaaattatttgtaagaaaatatttactggtatcaaataaatctaattttattaggtgtcagaaacacttgatgtggacatttttaatagagattaaagctcaaaagaaacctttaaagtaatgagggggcaatagagtacaaatgacctcaaagcctaacgctgatgaactgagccaacttataatgccctcatcaatctctcagctgatattccaggactcagagattttccacagccatatatccacactgcagatctccccgattcctaggagtctgaaatctcaggaaagatgagagtcaatgtaagtagtaataataataatagcagctaacacttaaacagtatttactgtacccaggcactgttttaagtgttttacatatattaattcatttaatcctcaaagcaatctaattaaataggtaatattaacatcaagaaataggtgaggaaatgcaggcacacaacagttaagcaatttgcacaaaagtgccacagtaagtaagtacctgagccaaaatttaatcccaggcgttctggcacaagagtcagtacttaaccagcagcaaactgcttctcaatat

SEQ ID NO: 151798 - DNA, 761 bp, Homo sapiens
  misc_feature (300)..(300): n is a, c, g, or t
tctttctttcaattttgttctaggtgctgtctctcctgctgttgttgtcctttacacgatggtgttgcaagaaaatggatatggtgttgagaaagacattccaaccttactaatggctgctagcagtatggatgacattctggctctcactggattcaatacatgcttgagcatagtcttctcctcgggtggtatgcttaataacgccatagcctctataaggaacatatgtattagtcggctggcaggaattgttttgggaatttttgttcaatattttccaagtgaagaccagaaaanacttacattgaagagaggattccttgttttgactacgtgtgtttctgctgtcttaggcagccacgtattggtttacatggatctggaggattatgcacactatgtgttgagtttcattgcgaggacaagatggtccgaagaaaagagatgacatctcaccatgttgcccaggctggtatggaactcctgagatcaagtactccaccaagcttaggcttccaaagtgcttagataacaagggggtggtcactgccgcgagccgatggaggcacctacttttgaatatagatccaatgcagccggccactaatgaggagtttccgcagtttgttcgctgtaatggagagcgaacttggagctagtaggagcccttatggttagtaatgtcctagtaaccatgtgactggttagcacgatacgatagtaacgacgaggacgataacaacgttacgcccgggggg

SEQ ID NO: 151799 - DNA, 402 bp, Homo sapiens
ggagccattcccaccgctgcagtaaacattcttataaacatctttacatattggtggaactatttctgtagtacagattcctagaagtggaattgctaggctaaaagatataactatagaaataacatgtttgaaaaactaatcttttcatttatcaaataatacatattttcatttatcaaattgagaaagctttttggttttctggggtttttcttgttgttgttgtttttgttttttttctgggttttcttgggagacagtcttgctctgttgtccaggctggagtgcagtggtatgatcatagctcaccgtagtcttgaattcctgggctcaagcgatcttcccacctcaacctcctgagtagctggggttgtaggcacatgccaccatgcctggcta

SEQ ID NO: 151800 - DNA, 392 bp, Homo sapiens
ggaaaatattcgataaacactcctagcaattagggcatagctgataaggcttgatctgtttgtcgcagaaaatgacttgaacttgtaagttctattgttcataaagttgttttccacaattttagataatcaaaaatgtacatgactcatttttcttacctattatttcctctaaagtttctcatgtatttattgaaaagttaaagaaaatctgattttggttcacataatttgacaatggtgatttgtctaaaagtcatttcaaaaagtagtatgaaaaggatcataaccctagaggtactgtcatagacgtgaaacatttattaaaatatatattccatggctcacacttgcacactcaaagccacattggactcattttttctgctacc

SEQ ID NO: 151801 - DNA, 803 bp, Homo sapiens
cacagctgcggaaaacctcattaagggaagatataaagttgtaaactaaaatgaaggacagaggcaatgttgctgctcaatgcccagaaactctctccctctacagaagtctgcatctctcccagtccattcctacatgtcagaaagatctgcaggtccatttacacagcctccttattcggaacagggggatttaaatagaggtgcttcagtgggaccacctgggaggatgttgcagagctgcccaggtgccagggtcctgtaacctctcaaattcttccagggatgcaaatcaggctggatggacacagaacatgaagtccttctccagagcacagcacttgtgagtggctgctaggctgggtggtctttgcttcctgtggtttctcacctggcatatgtcaaaggaaggtcccttattctctgatcctcatcctcacaatcttccagagcacaccctggagacctccatccctatttaaaggaggaggccacttcccaggatgcacagtggtgaagtggtgaagggctggtctggtctagtcaccgccttcctgagaatctaggatactagcatgtgagtgctgaaaaaacactctaagatgcttggtctcttgcctcatgcaccccccaccccagcccagttccactgggctcaacacacagggtttgttctattcccgaaggtttgacctgtaaggatgctgggtttacccttcccctcagctaaatgagctctctagagcatacgaaacagtgatctcctgtttagagatctagtgaataaatgccaaagaagtgga

SEQ ID NO: 151802 - DNA, 301 bp, Homo sapiens
ctgaatacacttagccaatatgtgtctgccccctttctcagggctctggtttctgcctgccaggttcaagcctcacctccaggatttttggaaaatcatgtagctgccctggtctcctcatctctaaaatggatataacttacatcacatggctacacttagaagaatggctatagcatgtggggtcagtgctcaaagtggtagctgctttttttttttttctgaaatggagtatggctctgtcgcccaggctagagtgcagtgatatgatcttggctcgctgcaacctctgcctcccagg

SEQ ID NO: 151803 - DNA, 484 bp, Homo sapiens
gagtggtctcttattgggcccataccataggttggttttatggtcatgaaaacttcctggagttttcctttttttcttttaatttgggaggctatctgttgcacattgaggatgcaatttttcattttatcaaattgatcattagagggcttaaggggatattgagctaagggcagctggttcacagaacctgtggcttttgcagttacatcagccaagtaatttaccttctttagtatcagtttttgagtgtcctgggattttcattattgcaaaagacttaagagttttggatagtttttagtaatttaggacatagtagctgttttttatcttttggccagtagcagttagaaaaccactttgtttccagagtgaaccaaaataatgtgccaccccaaaggctcagcagctgtaagtgtagctaagtgcagtcctattaattgacagtataggtgttcagagagagtagcaagttctgcct

SEQ ID NO: 151804 - DNA, 337 bp, Homo sapiens
cgtgcctctggtaggtattattgtccctcagtgtggacaggactcggagaggttagtctgtccaaggtcacaaagctggtaaatacaaagctagggctcaaaccaggagtgactccaaagtcaccttactacctggctattccacctcctaataaataaatcatgagcccaatacattcttatttaatctctggcaggtactaatttttcccccctttttcgtagagataaaattgctacaactggcagccaaccaagaaacaacttcaaattaatcatgtaatcaatcttttttcttttctttcctttttttagacagggtcttgctctgtcaccc

SEQ ID NO: 151805 - DNA, 745 bp, Homo sapiens
agaagtggggtggaggggacagagctgagaggcccaggtggagttgaatcagcaggcttttccagtctctgggagtctgagatgatcttggttctgctgtggacttgcggaatgcgaggacgcagccccctgctggaaagggagctctggctgcccatggagtaacactatcgtgctaggtgtgagggctggttgcagagtgggacttctggccaggcctgggggcagcaaggaaaggaggggacagggagagcagggttgagcaggggaggcctggcagatgagcaggatagggtgcttccgggcagtcgagcttgggttgctggcttcagaggcattgaggccagggcaaagggaatgtgctggcaggatggattccagcctccagcagagcgatagaagatcggggagcagaaggaagagggaagcaagatcaagaaggaggatgtgagcaggttagtggccaaggaggggagcacattctggagaaggcctggtgcttggcactagttttcagcgggactgggctcagaacacataggaggttagcctgagagctcccgagtagcctttgtaattgggaaaggggggcctggcctgaaaggaaacatcacacctagaagcaagtctgtacccttggccccccatagtctgctgctgctgcctgggatagcagtgggagagtcccagcttcccagccaaagccttctgagctttggtcctgcctctgccactactgtctcag

SEQ ID NO: 151806 - DNA, 142 bp, Homo sapiens
taagcatggcaccgcttagcggtgacatgcttcagagggtgccgtgacttggggtgtgccagggcctcttggtccaaggcctggaagacccaagtggggatgacagtgcagttgaatatgtgagttgggatcaggagaggtc

SEQ ID NO: 151807 - DNA, 355 bp, Homo sapiens
atggtgcggaggttggggaaccctgcagcagacgccgagcacaggagaactgggaccgtgttctccgcggtctcccggcgcccagaacagtgcctggcacccgggagtctcggggaatgcaggaagaaggaatgagtaaagaactgcgcgagaacaggacggagcgagggacggactactgactggcggacggacagcgacgcggaccccgaccctgaccccgaccccgaccgtctcagccccgcccccccctccccgccccggcccgacccctcgcctcgcctcgcctcgcctcgatctccacgcgcccgatcccgccccaccgcgcggtcccgaggcgcgagccccgggtcgg

SEQ ID NO: 151808 - DNA, 542 bp, Homo sapiens
gtgatctgcctgcctcagcctcccaaagtgttgggattacaggtgtgagccaccgcgcctggcctggtgtggtattatctgaatgtgagtggtgtgtgtgtgtgtggtatggtatatgtgtgagtgtgtgtgtgtggtgtggtatatgtgtgagtgtatgtgagtggtgtatgtgtgtggtctggtatgtgtgtgtgcatgtgagtggtatgtgggtatgtgtgagggtgtgtgtgtttgagtctgtggtgtagcatatgtggtttttgcaagttaggggagaagggctcaggtacgtgtgtaacccggggaagcaggtgatggagggtgagtgttgtgggagagcaggggcaggctgcttcggtccctggaggagatcttggtgatgtctcctcccccagaggcataccagacagcaaggacagagtggttgcagcgtggataggaaggacgatgagggagcttaagctggctggcttccatgtcctcaaccatgtgggaggtgaggtcacggtgcgagcaaagggacgaagcaggtgggg

SEQ ID NO: 151809 - DNA, 261 bp, Homo sapiens
cctgcttctcctgcagcggtgaccacctgtcaggtgcctaccattgtggaagaggtccaggatggtaaggtcatctcctcccgcgagcaggtccgccagaccacccgctgagcactcagctttcctggccggccccccaggaggcagggaggcagcggtcccatctgccccgcggtctccggcctctccaccctcagccccctgcttcagtcccttccccatgcttccctgcgtgatgacaataaagctcgttgactcagc

SEQ ID NO: 151810 - DNA, 533 bp, Homo sapiens
taacaccttgtgctcgaccttagtgtctgcatccaatctatgccaacacacgtgactgtctctgtgaacctatggagaacataagacactaatacaagtagttcatctaagactgtactttgaactaatcttagataatttatctttcaggaaaatatgtacagaaaaggaactttcaggctcttattaaatgagacaatgaaaatttaattacatgggctataaacttaatctgtcactgaatgtaaacacaggatacatttcaggacaaaatgaacaatttctgttgcttttagaatgtgttgcacattcctgagtactaacaagtggcactctacgaaggcatagactttgaagctggaaaagacaaaaatttgaatcctagattcgtttgccagctagattaccttgggaaaatgatgtgatcgctccaaacttcagtttcctcatcaatactctgtgggattgctggaaagaattagcaaaataaggcttatgatggggaaactgaagtataaagcgttgaggggtac

SEQ ID NO: 151811 - DNA, 520 bp, Homo sapiens
actttccctgacacacttacagtacagtatgataggcagtacagtaggggtctcagagaaacaaagggccccaaggtcccacagacagatagagaaccaaccttgagggataagaaaggttccccacagcctcaatgtacatttgagatagcctggcaaaatatatgtgtatgatatggtagtggaaatgcatgctggtgtgtgtggggggcagaggatttccacacagaggatcaataaaggagagagcatggcatgctcaggaacctgaaacactgtagacagtggcataagttgagcaaaagtcaaaggcagagaggacagtcaaggccaaattacacagggtcatacggagtgcatgtaaggccacaaaacttaacaggcatcttggactctcttggctgccttcttctttccaaaggtaccatcttcttacaccatacttcttagatgttatgatgtgtgtctaaccaataatcagttgtctccttctttcttactgaggcaaccctgatttttt

SEQ ID NO: 151812 - DNA, 331 bp, Homo sapiens
acagcgtcagggaaacggaacacttcagttcctcaaggtagtaagagaaaaagactccttgtatgtaatagccagacattttatcgataaaacttgggagcacaattttaaaaagtcagggttggcctcactggtggaaaaaatataatgcattcattcaagcaaccaaacacaggaggcatttctgtagttatctgagggcacctctcacgtttactgagtccgcttccgggattagatacttcaggctgccagcagaaatcctatcaagtaaaagtgggcaaaatagaaaatggactttaaaattgtcgtccttccctggtgaggcaac

SEQ ID NO: 151813 - DNA, 307 bp, Homo sapiens
gatttaaaaaatacttctgcataaagtaaaaatattttagaaacagatatgcctttattttagaaattactctttaggaaaatactattttcccttaggagttagagtaaataaatggctgttatctcttttaactcttggttatgtttcagtctttaggttgaggaagggcgagggtgattgaataccagaagggggaatgctaactgagatggttttagtagagcaacaggcagctaagtttctgtcaatatgatcaattaccttgggaatcgcttcacagtctagcaactggcacccccacttg

SEQ ID NO: 151814 - DNA, 193 bp, Homo sapiens
agacaggtatgagcctctgctcctctgctccactttgtaaattatcccacctgttactttcttctcctcttgtctttgggccctacgggtgagttactctccacaggcataatttacttcaaaacttagtactccaagtcccttccccaatctcgtttttcctttatctgatatactccctctccagcatctc

SEQ ID NO: 151815 - DNA, 446 bp, Homo sapiens
agcgcctcttcttttccaaggagaatgcatcctacattgatgtaattgaagtccctccctaacttcctctggggctcttcaaaataactgtgcatcctttcagagtgatgtctgcattttctggaatgtcaatagtctgattgccaagaatggtcttcattctctcagtagatacaggaaagaattgaaataattgtttttaaatgtataatttgagcaaagactttagagaatttccttagttggatcagacacagactatgaaattgctttgtcaatgcagttacacctaagtgccagggtatgtcttggcctttaaaggattaaaagcttactcccaaagttgctgggctttggggtataaatatattttattgtttgatgtctgatagtatatttttctttttattttttgaggcaggatctcactttattgtgcaggcggg

SEQ ID NO: 151816 - DNA, 173 bp, Homo sapiens
tgcatgtgtgtgtgaataaatacatcacttgttttcaaataaagagaaacatacattatgtctccatgtcaatgccactcaactgagggcttgcatttcaatattggtagcaatgccttagatttaaaaagatcatgaaataccttattagaacactccttggaaggtgttta

SEQ ID NO: 151817 - DNA, 523 bp, Homo sapiens
tgaggactccaaaggatacttacattccctggtttggtggaaatcctgggcatctgagttggaagagtgaggacaggggaggagttggggacattgagactgttggaacgtcttggaaacaatgacccactcagtgtctgaattcattttctgtcataactgccctgaaaaagtccagtgtgtttagaggcgtgttttggggatgaggaagggttggaactggttgaactggatttggaatcagagtctaggccctattgtcctgcatacctgccccatagcactgcagtgaggcagctgcagggcctgatgtatttccccattctctttgctgaattgaggcaaagaaagacagtgaccagcacatatgtgtgtttgtgtttttgtaaaagcacccacatgctcatgaggctaagagtgggttgtgaggacagatgggtggctgagcagggaggtaggcagagggacagagggaatgttcttctggaaaatcctcaggctcattgtgttctgcagaaggcca

SEQ ID NO: 151818 - DNA, 596 bp, Homo sapiens
tacctctgccacaagccttacgtggacaatgaagagaaggctggtgctggcaatttagtgctctagtgtctaccagctctccagctgctaagctgtccctttcatcaatctaaaatgagtcatcattgtttcacccgtctaaagggcaaggcaaaaacagtgaaattaagaaactccatggaaaaaagaatggagaaaataaagccagagatgtcattaaatgtaatacaagtaagggggtaaaaacatattattcaaggaatttctagggctaatgcaaagctacttcttacggaaaacttggaaaatactaccaacgtaattttgtttcagaacacaagaattttttctaaaaagttgtgtttataagctcatgcatattcataaagtgattcatttggtaggaacatacagtcatccagatgcgatgaaaaagcaacagctttaaatgctcaatctacccatcagacttaaaggttatagtagcatttcttgaaaacacattagtcatctctgctctaactatacatctctgtagagaaaacatggaaaacagggttgactggtagtacacaagtttgtcactgctgatcgtt

SEQ ID NO: 151819 - DNA, 565 bp, Homo sapiens
ggggtcggggggcggggggcaagaattgcaaggtaaccagggaggccagtgcaatgtccaggtgggagaggatgctagctgagactagaagtgctaggaaaaggatgtgtgcagacaagaggtcactggggaggtgaaataacaaggcttggccatgagtggaacccaacacccatggtgccctcttgagagagggaagatggcacctgagatggaagatggaaagaccagggtccctgtgactgaggactgagcctctgtttgaggttttggcagaggagtaaaggcaacaaaagaggcaagagttggaagaaaggtgacaaggaacaaaagtcagctatgcctgatgctactgggtggccagcaacaatgctgacttggccaaggctctgagagctttactatgctgggactggaggtcagagttgaggctagggtaagagcaaggggctcagatggagggggaggaggacctgaacaagtccagaagggaagagatttgtccctctatccaacagagtacccagtgagcagcacagagggcacagcaagggacatcacccgg

SEQ ID NO: 151820 - DNA, 613 bp, Homo sapiens
ctcatcactaaccccttttctaacccgtccaccagcccctgatgagcagtccatatggaacgtcacggtgctccccaacagtaaatgggccaacatcacctggaagcacaatttcgggcccggaactgactttgtggttgagtacatcgacagcaaccatacgaaaaaaactgtcccagttaaggcccaggctcagcctatacagctgacagacctctatcccgggatgacatacacgttgcgggtttattcccgggacaacgagggcatcagcagtaccgtcatcacctttatgaccagtacaggtgagaggggacctggcctggccatcccctgcaagcatggggcatttcattctcatcctcagcttcctgcttgcctctctcctcggaaagaagactcatcccccaccccatttcccaccttgcatggcgtgtctcagctcttattatgtatcagctgaaggctcccaggaagcctagaggagcccagtgtgcatgcgtagtggagaggaaacagtgattgtggccccgtgcgggtcagaaggaaacaaaggatgtttaatgacaacagagaacacttagccccctgctctgcctggtgtgtgtgcaca

SEQ ID NO: 151821 - DNA, 615 bp, Homo sapiens
ctcatcactaaccccttttctaacccgtccaccagcccctgatgagcagtccatatggaacgtcacggtgctccccaacagtaaatgggccaacatcacctggaagcacaatttcgggcccggaactgactttgtggttgagtacatcgacagcaaccatacgaaaaaaactgtcccagttaaggcccaggctcagcctatacagctgacagacctctatcccgggatgacatacacgttgcgggtttattcccgggacaacgagggcatcagcagtaccgtcatcacctttatgaccagtacaggtgagaggggacctggcctggccatcccctgcaagcatggggcatttcattctcatcctcagcttcctgcttgcctctctcctcggaaagaagactcatcccccaccccatttcccaccttgcatggcgtgtctcagctcttattatgtatcagctgaaggctcccaggaagcctagaggagcccagtgtgcatgcgtagtggagaggaaacagtgattgtggccccgtgcgggtcagaagggggctttctatctctaaagactacagaggtttcttgtgtgaaagctctccagggtgttcccacatcac

SEQ ID NO: 151822 - DNA, 499 bp, Homo sapiens
ttttctactatttactatgagttgctctctgtttactatgtttactatgaggtactctctgttgttttaggtgatggactggacaatggagtgtctagtgccctgagctacctgtttcatggatgtgggggtacacttctgagtggagctgggtccccttgcttgcccatgaaaacccaaatggtgactgtaggtgccaaccctgacaagggtggctgtgcggagctcctggtgaaatttactgaggtgtgtgtaaggttcgagggggctgcactggcttcacgtcttaggcagaaatgtgatgtcttccctctcaaactcctgtcctagcactcataactgcctgcttagatgcacactgtagtttatttccagacatcaatgtggctgagagccatgggaaatgcctatcttgtgactctttgtgggagtggttttgaagaagaacctcctcattcggcccagtaaagatagccttatggcttccctattctccgat

SEQ ID NO: 151823 - DNA, 735 bp, Homo sapiens
acttggcagagatggtcaaaaagggtgcccacagtgtaaattgggttggaaggcttcaaactacatactactccttacgtctcttcagggcccctatgaatagctgttaagtataataccttcagggtagaacagtgaccccacccagcctgatatcacagcaatatgcccctttgacaggattattaagaaattattgaaaagtatttttaaactgttgctttaataaaagagaggtcagatccttttatatagtgtgtgggtatactttcttataaattgccatgtggcttttagcttctttatatagctcaattacaggtgcctgaatacattgtaactctgagccatgattctggggctgagctctgctctccttgacgtgtgatgaaatctgcctattgccaagatcctttgtagaaatctctcttccatttgcaccggctgacatcataagaagtttgcaaaagaaagaaatatattccacctgatgacattagagttgctcctctgtgtttacatttgacctggttggaattacttgagttttcaagttgtgaccttcccacatgttaactggcagagcttgagcagccatcttggcagacatgcagtattttctgaggcaaaagacaaagggttttttcatccattattaattgatgttactcttttcagcagaccaaacatgattctactatacagctgccaaaattgttctagacccaaaaaaga

SEQ ID NO: 151824 - DNA, 431 bp, Homo sapiens
tcaggaggaaagagacaggaaacggaggcctggctgcctgggctgtgacgttgcccctctggcatgctgtccgggcctggaaaaatgcagctggcactgccttgaggattcggagcagacaggagttatgtggttgcttggccaactcccgagtacaataaacttaatcttggaagtcttactctcgagggtgaggaaagggtgaaatgtcggtatgtagactctgtcgccaagaagcacaggagaaatgaaagaagaaacaaatcccttcagttaaaatgccagtggaaaaacacttctgaaaaacaaacaccgagaagcacaatgtgtttttatgtgcttgagattttttaaaaacgagttttggaaaatagtctcttgatgtttacatagttccccgtgaataaagggcaactgggaatttggactgg

SEQ ID NO: 151825 - DNA, 450 bp, Homo sapiens
cctacagggatcactgcctggtgatgcaagggagggatgctgagtaacagcaggtctgagtcctcccttggtggcggcaatgtagccggtgcctcaggttcagtgctcttccccatctcctggagagtcctgccttctccctttcagccagcttggcccgtttgcgttcctgtggttagtgagggctggctgtggtccttttccaaaacaggcagctgagcagaaggaaataaaatgccacctcttcactctccctttcagggtataggcgtgtaattgtacctggccaccttaaagcaccgaaagaggggccgtctcccaagcccaagcctcaacttttgggcctctcttttcctactgcccacgtcaccccattctgtccatatgccgtcacagccctcaccatgtccactgtgatgtatctgctagactgggaacccctggagggca

SEQ ID NO: 151826 - DNA, 496 bp, Homo sapiens
ggttttgtcggcataagttggttgtaaagattaaatgagaaaaggcaggtaaagcccctggcgaggggtctggtacaaaaagcaataaatgccagtttctttccccaggcttgaagactgatgcctaattctggctggttatgagacccaggaagattacttaaaatctcagatcctcagttttcacatccatggacttaccagatcgatctttccatctgtccattcaataaatttcattcaatcatcactaagttggcccagactaagtcctggaaatctttaaatccctcatttaaaaaatatggagaatttcaaatgtctgaaaaacagattatgcataaccaacccccatttacccaccactcaattcgagtaagccacctttcagctttagacttcagagggcccttgagttaggatggcatggagggtggaataaaaatatcagggggtttctgttaactccaagtttaatacgagttaccagtataat

SEQ ID NO: 151827 - DNA, 285 bp, Homo sapiens
atagggaacaaaatgggacctgggattaagaaacaaaatagaagacctgtggtctgatggtgggcagggagttgtgagtcacagaggagctcatggtaaacatgacctcatgctgaagagcagagcctggaactgctcatatttaagcctctgctactttcattcagagaattggaaaacatgcctgataccactcttccattcatccatctaatcatccatcgatccatccatctctccatctattatttcatccatccattcatccctccatccatctaccca

SEQ ID NO: 151828 - DNA, 242 bp, Homo sapiens
agaaatgatttaaattgtataggaggatgtgcacaggttatatgcaaatactacgccattttatataaaggccttcagcatccacaaattttgttacctgcaggggtcctggaaccaatcccccacggacatcaagaaatgactgtatgtatgttatatatacaatatttacatatacacaataaaatacatattatgtaaaatgtatacgtaaattaaaatatataaaatgaaatactgta

SEQ ID NO: 151829 - DNA, 589 bp, Homo sapiens
gaaggggagttccaggttttatgaatattcaacagctgagaaattcccatcagggagctgaattggtggaaggaatccaccatggcaaggaagcaggcactttccacacaccattcccatgtaacccgtgatagagctctccaaggtgtcattgttgtccccactttacagatgaggaaactgaggcatggggatgttaagtaattggcccatggtcacacagctaataagaggcagagccacaattcaaatcaggttgtccaattccaagcctgggccagcgccacactagaaacacctctgcaggagggaggaatggtccaggggccaaaaccgtatgacttggctccttcctgtttggggtgggattcggggaaggcaggtattgacagtgtaatggtcactccacagaggacaggcaaggccacctctgagtgatagtcagagggctggcccagtggcccggccagtgttcagagccacactcttgtcatgtttaatgcctcggtggcacagggggctcagcaccagacttcccctgtggctcatgtttctgaataaaggcccgtggagggctgaggcctctacc

SEQ ID NO: 151830 - DNA, 369 bp, Homo sapiens
atccaatctgaacaagtgactttcccacttaaaacccttcaactgttctcaggaaaaagactttcaaacgtggcttatacactcttctgcatctggtcaaggcttagtttttcagcttacctctcatttctcagattatttcttcccttaagcacacgacactccaaccatgtcaaagtactctctatgctgttccccaaatatgccaatgtccactagtgccccgtggtctttgcagaagctgttatctctctaggtgtccaccctttttaaccccccaacaccctgagcaccagccagccccttgcatctattctctaacttcagcagtcgtgtctggagaaaatcttcacactactgctaggcttg

SEQ ID NO: 151831 - DNA, 590 bp, Homo sapiens
gcgacggagtcttgctctgttgcccaggttggagtgcagtggtgcgatctcagctcactgcaagctccgcctcctgggttcacaccattctcctccctcagcctccagggtagctgggactacaggagcccgccaccacacccggctaatttttttgtagttttagtggaaatgcctcggcctcccaaagcgctgggattacaggtgtgagccaccgcacccggccaagaattgctatttttaatttgactgagaacacaaacgggagtgttgatgaagactaatgaaaaatgtttgggtattctggtacttaaatgcaaaactgtgtgggaaaaaaaaatcttaaaacagggcatctatattcaaattcaaaacattttatcccaataaataagctaaaaagcacatctttaaaaagatgttatgacacataaaaataattttatgtgttatgacacataaaaataatatgaacttcagccaggcgtggtggctcacacctgtaatcttgggaggccaaggcgggcagatcacgaggtcaggagatcgagaccatcctagctaacacggtgaaaccccatcactactta

SEQ ID NO: 151832 - DNA, 301 bp, Homo sapiens
gaagctactctagtccacagataatatttaataccagctttgtcagctgtgttacacagaataatgatccccccaaccaaaaaaaaaaggatgaccacaccctaatactcagaacccatgaatatgttatattatgtggcaaaagggactttgcagatatgattaaatgatgtatctagggagattatcctggattgtctgactgggctggaggcaggagggtcagagtcagagaaggagatgtgatgatggaagcagaggtcagacagagatttgaagatgctataagattggctttgaa

SEQ ID NO: 151833 - DNA, 445 bp, Homo sapiens
gcctcccaaattgctgggatgacagacgtgaaccaccgtgcctggccgacagtcacctttagaatgtgaacagtggacactgtgttggggtctcctacctgtgcctgtgatgtggactggcccatctcgtcatggacaagtagagatggggtttcaccatgttgaccagtctggtcttgaacttctgacctcgtgatccacccgcctcagccccccaaagtgctgggattacaggcgtgagccaccgcgcccggcctgagacggctttccaaggctgcagaaatgaagtctgcaatagcagatcctctttgcctgggtttgcacgtgatccagcaaaccacccaccgacccgttgcctcatgtgagacatcctcagggaacagcaagtctcgctgttcttggaagggacttccagcctggaaagaaaagggagggataagagagc

SEQ ID NO: 151834 - DNA, 693 bp, Homo sapiens
gcctcccaaattgctgggatgacagacgtgaaccaccgtgcctggccgacagtcacctttagaatgtgaacagtggacactgtgttggggtctcctacctgtgcctgtgatgtggactggcccatctcgtcatggacaagtagagatggggtttcaccatgttgaccagtctggtcttgaacttctgacctcgtgatccacccgcctcagccccccaaagtgctgggattacaggcgtgagccaccgcgcccggcctgagacggctttccaaggctgcagaaatgaagtctgcaatagcagatcctctttgcctgggtttgcacgtgatccagcaaaccacccaccgacccgttgcctcatgtgagacatcctcagggaacagcaagaattttgaaggtccctgataagacatctttgaggtcaggcataaatcatcacttcacatcttgacggcaatgcaacgaagacaagtatctgtctctttgggtctgtctaacaaggagcaaagcctggcctcccaccagcatccagacaatagtggattccctctccatagatgtcaaaaaagaaacagatgctcccgcaggtgaaatgagctctggtccacaatgcaacgcaggctgtgcagaaaatcaaagaggaaccaacccagaagtatcccccaggacaaatcattaagggggaaaaggcaa

SEQ ID NO: 151835 - DNA, 848 bp, Homo sapiens
ttgaatcaatttttattcatttaacattacaagaatttaacccaagtattgtgttaagtgtatatgacagtgtgcttaaacattcccttatttgcttaaaatttggattgtttccacttgttttccatgataaaaatgctatgaagaaaagctttacatatagaggtaaagacaaattttcatatgtggaattattggatcaaagaggacacttttaaatggtcaatattatcaatatattaattgcagttgctttccaaaggagtagtaccattttatactccttctctcattgtgtgataataagtttctccttactatcttcatcagcattggattttcgtttggacattttttgcttatgcaacaggcaaagttcttttgaaaaaaaaatgtaacacccactatctattgaattcacccaataatcttatgaagtcaacagtttacagatgaatagatactgagatgattaattgatttgctcaagttcatataactattatcagagctggaccttgatcttgcttcttctgaatccggccctgttgtgtgtttccactctaccacagctgtccactacataacaggaagggcagaggctaatgagcccttcaagataagcttgaagaagctcagtggttggtgtgtatcaaggtggaatagatgagcaggactggagagtaaaatgtccaaatggctttgtttcttaaaaaccaaacatttcctcaaaaagagtgaataattttgattaatttatacatgctgtttcactcatccacatgtacattaaaaaggtttaaaaagaaaaaaaagtatgttatttaatggtggcttggtgttggaat

SEQ ID NO: 151836 - DNA, 302 bp, Homo sapiens
agagaagtacaatttgtttataccacagatctgaaccatgtccaaattgaatattttgcaagaaaataatgtttactaaagtattaccattaagaaataaaaaattctacacatctctaagatggaggcaatccagttattaaatttcctccaaataataaaaacaaagcaactaggttagcaaaaccatggacaacaaatacaacaagaacaggcgacaaaatatctccttcattcacaaaacacagtcaggtaaagcaaaatcaccaccagctacaaaatgggcttgaaaagaaggggct

SEQ ID NO: 151837 - DNA, 522 bp, Homo sapiens
gcatctctggtttccggtatcccttgcctttctctttcccagtttaccctcttgtttgggagcacagcttctatccttcctaaagaaaaagagggagaaaattccatggcaccttgcacacctggcagtgtcgtcgttgattgtttgactgggcatggcattttaggggtcagtgtattcctccagagctttgtgtgtgaggcttctttgtcttcttgttctcagtattgctgttgagatgcctgcacattttgattcctgactctttgtatgtgacctgatttcttttggaagcctggtttctcttggaagcctcctctttcccccagagttgagaggctttagtgatctctttgggatttgggtctgtttccacccctacgtggggcactgagtggggccttttagtttggggagtcacatccttcagttttctgcagtgtagtcaccgaccatgtgggctagcagggaataggggaggttggatggcaaggtgagcatccagaaggcacgatcctagcg

SEQ ID NO: 151838 - DNA, 890 bp, Homo sapiens
ttaaagatgcacacgtggatgacaaaactatcaagaaaatgaaggaaatgattgccataaaaaacagaatagtgactattcttagaaccaaaagagagttgcaactggataggggacaaagagggctcccaggtgcctgataaggttctacttcctgataacttttgctacataacaaattatccccaaatgtagcagcttaagataactgtaatcatttgttatctcacagtttctatgggtcaggaatttgttagcagcttagcttagtttagcatggactttcttaagaagttgcagtgaagatgccagcccaggctgagtcatttgaaggcctgactggagcaagagaatccatttccaaggtagctcactcctgtggctcatgagtttgtgctggcttttaataggaggactcagttccgatcgtgtgaccttctccatagagcttcttgagtatccttattatgtgaccactgacttccttcaagtgagtcatctaacttcaaagttagaatgacctaagagctgcagttatgaccaaaaaatcaactccatcatctccacaaaatcctgttggttacacaggttaatcctgttcactgtggaaggagactacactaaggatgtagaaaaccacacagcaagaatgactgggagtcattttggagggtaccacatggttacaagaatgtttgactcacagaaatgtattaagctgtacatttgttttatgtgttttctgtacgtatttaaaaagtgtttaaaaatgacttgttgacataggaaaaagttataaaattacaaatattaaagaccctttttatcctcattgttgctaaacaattattaagcatttgtgtttgggatgcagtggtaggtagggagga

SEQ ID NO: 151839 - DNA, 664 bp, Homo sapiens
atgattacagttatcttaagctgctacatttggggataatttgttatgtagcaaaagttatcaggaagttgcagtgaagatgccagcccaggctgagtcatttgaaggcctgactggagcaagagaatccatttccaaggtagctcactcctgtggctcatgagtttgtgctggcttttaataggaggactcagttccgatcgtgtgaccttctccatagagcttcttgagtatccttattatgtgaccactgacttccttcaagtgagtcatctaacttcaaagttagaatgacctaagagctgcagttatgaccaaaaaatcaactccatcatctccacaaaatcctgttggttacacaggttaatcctgttcactgtggaaggagactacactaaggatgtagaaaaccacacagcaagaatgactgggagtcattttggagggtaccacatggttacaagaatgtttgactcacagaaatgtattaagctgtacatttgttttatgtgttttctgtacgtatttaaaaagtgtttaaaaatgacttgttgacataggaaaaagttataaaattacaaatattaaagaccctttttatcctcattgttgctaaacaattattaagcatttgtgtttgggatgcagtggtaggtagggagga

SEQ ID NO: 151840 - DNA, 183 bp, Homo sapiens
ctttagcatcctgatttattattcagtagttaataaacagactttaaacttccgcctggctggcttttgaaataggaacctgagagaccccaaactcagccactcttgtagcttccatctccagttcttttaatcctggccaagatggcgggcgtggagactttcttccggtcatagtccaga

SEQ ID NO: 151841 - DNA, 347 bp, Homo sapiens
cacaggctctgtcagccagggatgtgtaggtacctttggtcctctttggtgtctagtatacatacacacagcctctggctaacccaggatatgtgaggaatctcctgtggcttaaattttaccttttaaaacttcctgataaatcccctctagtccatcagtcctttgcttagctgaaacagaactgcaacctcagattgatggagccactggtccttcctgtttgcttgccattgagatcacttatctgacagtactctaaaccaagtgtgtcctttccattatcagtggcaaagctgctggttgtcatggtgctggaaggagctggggttagggacatggggtgt

SEQ ID NO: 151842 - DNA, 330 bp, Homo sapiens
cctttctgggaaaaaaattactggcaaaaaaaacaaaccaaaccaaaacaaacgccaagaaaccccacaacaacacagctgctgtgatttctgtgggtcccaaagaaaagaggagctaactgctgcttcagcctgtgtaatagccaggtcctgggacagaattagctacagttagaaaataaagtcaacaaggtgagtacagctggagatggaacatttactgctacccatctactagcttggaatcagggaagtaattagtccagtgtggatcagcattggtcatggactagaggaggacatctacccttgcccaatcctgaagcccct

SEQ ID NO: 151843 - DNA, 1032 bp, Homo sapiens
gcgaccgcgaaggccagcttcttcgaaaggcccatttttctccgtggctgagcgaatgctcctagaataccacgtttataataaatcatgtagggtggaattcctgctggatgtatacacctttctgcatcagagctcttcaaacccagaatggtgaatagctacccctgggcttacccttttataattttcaacaaacctgcgtttagccccggctaggtgccagcaagttgctagggactgaggaggctctgcagaggacccgagctgaggccctaatcctcaaggccaatggcaggggtcaccgcccaggcacccccagagaacgcggtgtgaaggaaaagacaccaaactcggtgttcaaatgtgtgggatctattctagttctgattctgacacttgcaagtcatgcatcctccgagcctcggctttctcacctataaaatcttcaacgtgacctataaaaatccataaaatcacccctgcttcattgtttcccagggctcatagaaacatcatacaaggtggagaagagtacccaagaaggacaagcttggaatggggccccctccccaggctggagatcagacattgttggagaaggtatcattgcagccccctacatagcagagagatttgctgagttgcatagtctagagctggttgcaattattggacaagcaggaaacaaacctccacagcccatgcgagccacactgctgggttgagtgtatgagcatgtagaatgattgggtctccagtgcggacagaaggcatggatcgcgtggtgcctgtgttgggaggatactaagagggcgatcaccatgccaggacaagactagttgcctgggatcttctgggcacgtgactggagcagagtaccactggatctcctcacaccagccagacccaggaagagaagctcctttcacctgcactgttctctcagcaccctccacggagaaagcttcatgttatgcttagtgtacaggagaaatgctcatgggaatcctgtccattatcacagagcag

SEQ ID NO: 151844 - DNA, 266 bp, Homo sapiens
ttgcttaacttctcagagccttagtttcttcatctgtaaaatggattactacccaatttgaaggactattgtatacattagaaataactatatatgccttgtcatgtagtagatgcttatagcagttcttataataataaagcgaagtccccgtggtgtattgtaaatgtgaaccacactcctcagcagtgatccttgtgtgctaagctagtggaccagagtttccagctgaagtagatctggaaccgagtcttgaaaaatgtgtg

SEQ ID NO: 151845 - DNA, 230 bp, Homo sapiens
aacacccaagatgagctggaacacccaagatggggcactcacatgcctgccagttgatgttgactattggctgggatttcaactggggctgtcaactgtagcaactacccatagcctctgcatgtggcttgagcttccgcagcatggtggctgggttctcagggacagtgtcccaacagcaagtgttctaagagtcagtaagcagaagctgccagtcttcttgaagtcta

SEQ ID NO: 151846 - DNA, 435 bp, Homo sapiens
ctagaatacaaaaataatttgtatttttaacattactctttagtctaacctttctgccttataatgaaaaccctagaaaataaagatcctgtctgaatacattgctaaaatgtccttgatcaaagcgctatctgcatttttgacattcaatgcatttaaacttatacataaacatgtgataagttctttgagggaagatgttctgttattggaatcgttatcactttcatggtactgaatatggtgcttttacctggcaggtacattgaaatttttggtggataatgaatgaatctattttctatgtttagttaattaacagtgtcccattttgataggtttacttgttttctctttttcatggctaaatgtactatttttaggacaattaattttggaataaaaataaaatttgttcaaaagagattgtctcag

SEQ ID NO: 151847 - DNA, 345 bp, Homo sapiens
gtgagccaggggaagctggaggctgctccacagccctttctaccgcagtccagctgtgccaaggtgaccaaggggggaggggaacacaggcactgccaggccctgggatggaaagttactcatgacatctccgtaagaatcactggagggccatggttttgggtgtggacatcctggagggctgttttagtgcccacaccaatgccctagttaaagaaccaccctgtccccttagccttctgcaggacaggtgggaaagggccgggtgtctggtcctgctgccaggggacagtgcaggtgtgaccgtccgggcagagatgagtcaccctccacactgtcttgctg

SEQ ID NO: 151848 - DNA, 231 bp, Homo sapiens
cacccctccccattcttatagtccctcccagaggtcacttacctcatcaccatacccccaatgactcgagttgccaatctccagttgcacttccacatcagttgatagagtgactggacactgtatgactcaacaaagagggcaaaacccacctccaatggcgtggcattgagagccctctgtgtctgtgccccacctgtttctgtctctttttttttttgagatggaggt

SEQ ID NO: 151849 - DNA, 311 bp, Homo sapiens
tgcgtacttgtagtctcagctgcttgggaggctgaggcgggaggatgacttgagcttggaaaattgagggtacagtgaacaatgatcacatcactgcactccagcctggatgacagagtgagacccgtttgtcacatttgagcacatgaggcctttcaaatattcttggggaatttgttgcataagcgaaccctgtgagaaaagttaaactttttgaagaaagttcttcaattgttggcttgcttttttttttttttttttcttcttaagatgggatgtgcctatatattaagtggtgacttaaaaatact

SEQ ID NO: 151850 - DNA, 550 bp, Homo sapiens
gaaatatatgcagctggaaacaatcttggatcctagggtttacagcaggcaatggcctaaaatccttaagaatttcacacccaggtgcagtggctcacacctgtaatcccagcactttgggaggccaagggggggcggatcacaaggtcaggagatcgagagcatcctggctaacacggtgaaacactgtctctactaaaaatacaaaaaattagccgggcgtggtggcacacgcctgtagtcccagctactcgggaggctgaggcaggagaatggcgtgaacccaggaggcggagcttgcagcgagctgagatcacgccactgcactccagcctgggtgacagagcaagactccgtctcaaaaaaaaaaaaaaaaaaagaatttctcagcaggcctggcacagtggctcacgcctgtaatcctagcactttgggaggccaaggtaggtggactgccctgagctcaggagcttaagaccagcctggacaacatgataaaaccctgtctctactaaaatacaaaaaattagccaggtgtggtggcacgcac

SEQ ID NO: 151851 - DNA, 216 bp, Homo sapiens
cttgggtcatggaaaaactgaagatgcattagatcatcaaagaaaatggcacaaacaaccctgcaaaagaaaggatcttcttccagattaaatctcttataatataactcctctattggatggttaattctaactatccaatgtctccctttttttttctttaatttaccatgttggtcaggctggtctcgaactcctgacctcgtgatccacctg

SEQ ID NO: 151852 - DNA, 742 bp, Homo sapiens
aggaattttgtgtgaagtgatagtggagccaggacagcagtgtggcagaaaccagtgagtgacacttcaaggaggccagatggccaagcagcatctggaatcgctttgcctgcagttaacagcatattttatctctgctacacgagccaaccttcaactatccatgtaaatggaagacaaaactactgaagataaaattgatacccccaagaaaattccaaatctacactgaaatcaactactttcattccctaagtatttttcatagaaattccaagttatgtgtgagtagtatttccataatttaaccaacttcctgtagtcatccttcttttgttgaaaagacctaatctaaaattgaagtgactgtggagagaaaacccaagttcactgaccatgtaaattctataatttgccttgcataagtaggaatttatgatattaacaatcaggagcctagaaaacattccaggagaaattgagttaaaattaaatcagtaaggccaggcacggtggctcatgcctgtaatcccagcactttgggaggccgcgggaggtggatcatgaggtcaggagatcgagaccatcctggctaacacggtgaaaccccatctctactaaaaatacaaaaaattagccaggcgtggtggcagatgcctgtagtcccagctactcgggagggtgaggcaggagaatggcctgaacccgggaggcagagcttgcagtgaacagagatggcgcc

SEQ ID NO: 151853 - DNA, 134 bp, Homo sapiens
ccctccccccgccaaaaatgcctaggataatagccagcacacagtaagcattaacacatgattgttgatcattattaatattattaattaattaaaataatataactattgttgatattgtaacttaaacattt

SEQ ID NO: 151854 - DNA, 359 bp, Homo sapiens
ggtcggccttgtcctagctgggtgacataagccaaaccccttgccgactcttcagggtcattttgatcttcccgccacccagatgtcccctggttcactgatgaccccgataactaatgtgtcattttcctctatgtgcttttcttttagagacaacgtctccttctgttgcccaggctggagtgcagtggtgcagtcatggcttactgcagccttgaactcctggcctcgagtgatcctcccttctcaacctcccaaagcactgggattacaggcatgtgccattgtgcctggccttgttttggcaaaaccatatggatgtcccatctaacactccagcctctcatttcaagggccct

SEQ ID NO: 151855 - DNA, 153 bp, Homo sapiens
cccatttcccccatgggcctgatcctagggtagcagcttcccattcctctgcagtggtgcctgcagccacagatttaatttaaaaatttctagtagccgctgtgcagtacagtctcaaactcctaggttcaagtgacctccctgccttagcct

SEQ ID NO: 151856 - DNA, 144 bp, Homo sapiens
agttgaaggataaattcctagaaacagaattgtgtttctatgggcagatgtcacagcctcccatcccgggtttgtatctctgtcctcatcgcttgaatttctgtctcacaaaaggcacctgagtggagccagtgaagagagaat

SEQ ID NO: 151857 - DNA, 244 bp, Homo sapiens
ctgacttcaagtgatccacctctctcagcctccgaaagtgctgggattataggcgtcagccagcacacctgatgcttagttgtacattcttccaagcctaatggtatgtgctaaaagtgccttaccaattgccaaggataatttttaatccacatgaactgtcttattatcgtttatctttccttgtggctgtcctatcaggagaaagagatcagcaactccctccccattagatttttctttt

SEQ ID NO: 151858 - DNA, 308 bp, Homo sapiens
ctgagtgcagggtttgcaaaatatctcaagcactgatcttaagttttacaataatgacgctatccctaggagcaatctggggaggttcagactcttggagtcaggggctgcatgacccctaaaccataatttccaatcttgtagacaatttgttagtcctacaaaggcagactggtcaccaggcaagaaggaggtcttttcaggaaacggctattatcaattttgtttcagagtcaaactgtaaactaaattccttcccaaggttatttcggcctatgcccaggaatgaataaggatagctttaagat

SEQ ID NO: 151859 - DNA, 520 bp, Homo sapiens
cacctgtagtctcagctattcagggggctaaagcaggaagattacttgagtatttagaaggatccaggaggtcccagctggaatgactgatcaagaatctaagaaaggctgggtgcagtggctcatgcctataatcccagcattttgggaggccaaggaaggtggataccctgaggtcaggagttcgagaccagcctggccaacatggtgaaaccccgtctctactaaggatgttgaggctacagtgagctatgatcatgccactgcactccagcctgggtcctgggtgacagagtgagactctgtcttaaaaaaaaaataaaaaggctgggagtggtggctcacgcctgtaatcccgacactttcggaggccaaggtgggtggatcacttgaggtcaggagttccagaccagactggccaacgtggtgaaaccccatctctaccaaaaacataaaaaattagctgggtgtggtggcgcgtgcctgtaatcctagctactcgagaggctgaggcaggaga

SEQ ID NO: 151860 - DNA, 313 bp, Homo sapiens
gccgggggcaggtcagagctgtctaaatggccagatgactgtggttcatggcccacggccctgctctgcgaaatgctacctttagttcagtaaatgccagcatctttaggagagtctgagtgcagaggaaggtgcggtgaggccagtgagaaacgcagcccatgctctgagcactcagagttttccccagcacaatttttagtttgcttcagctttttcaattaaaacaaatctaggccaggcacagtggcttatgcctgtaatcccaacactttgggaggctaaggcaggcggattaccttaggtcagtcag

SEQ ID NO: 151861 - DNA, 724 bp, Homo sapiens
cataattatacacatttatggggtacatatgatgttttgatacatgtatacagtgaataatgatcaaatcagggtaattgggatatccaccacctcaaatgtttaccatttctttgggttagaaacatttcaaaccttctcttctagctattttgaaatatacaacaaaatattcctattttgctattgaaccctagaacttattccttctatctaatggtatttttgtacccgttaaccagtctctctccatctcccctccccactgccttcccaacctctcactttttaaaaagtagatttctgaccaaatcatagagcactctattctctgatatgtttaaaagatacaataaagtatcttataaatgtcaaaacataaagatgaaaagccagataaaggtaagcaaggtatttatattagaccagagaaattcagtcaacaaaaatgttaagtgaggtgaacacagtctcattgtgaatacacatgaagatgaagcagttatgaatatctacaggttaaatagcatggcatcaataattggaaagacaatgcacgtaccattgaaaatagtcagaaacactgaatacaggttcagctgcttgctgtttgcaaaaccaaattacaaggacaaagttcagtggaagaaaagtgactttatttccaaagtagcattggggaaatggtctagacttcctgccttaaagaaaccatttcaaattt

SEQ ID NO: 151862 - DNA, 507 bp, Homo sapiens
acacgcaactgtatactaaagttcaccatcatttaaaaaaaaaaaaaaaatcctcctctctctatccatccctgcaccgccaacccccaccctcccaaaaaatcagaatttttttcctcatgttttccactagaactggcataattacaacaacttaaagatatcaacaaacaaattaggtaaataaccatgtcttttttcagtgaacaagccaggctcattctttataattgctgtatactggagtccaatgtatcaggctaggcaattaactgaaatactgaattacaacttcaaatgaataaatcctgtttttaactgtaactttcattgcttctgaaaaccagtctggcaacattttaacagctattatgccactttgtctttaagtctcgggggcactaaaatataaaagttatttaaacgtgttttctcaaacaatgacctgtcaactctatatactacagataaacaaggctattctccaccacgagttgacacgttgcc

SEQ ID NO: 151863 - DNA, 823 bp, Homo sapiens
attctgtcccctctgtaggaaacccttgctacaactccagatgacaatgggtttgatgttgcattcccccacaccaacacctagagtgcaaaatgtccttctgccttattaacaacaggcctcatcctccattcccatgcccttagacaacctagtggggcagacatccacatgcagaaaccaggaagtcctgcaaagcctgcatctgggcaaacaattccaccctttcttccaacaaggcaggcagggccatggatctccttggaaaatctcatcgaatctgctttaatccaggccatcatggccccaagtagcacatttcatgtcgtttagccaaaagaatttgggtctggaattttttaaggcaggtaaaaccaatgtctgccttggctatgaatagctttcaataaaagcacccagagagcatagcacaccaagtaaggccacttcctcatgtaggaaagggacttttcagacttgcttttctcatttcagagtctgagaagacactggttagggtcaatagggcaatccccaacacagccaagcaaataaccacaaactgactttccaaataggtcaacccttgaccacactctctctggccatggcctggaatgaccatgacagaatgtgagagaacaagctctggggcatttactcgtgcagtaggaagaataatgacctctcaaagatgtccatgtactagttcacagcatctgtgaatgcattaccttgcatggcaaaaatgactttgcaaatgatatcaaggttatggattttgacatggggagattatcctggattattaggcaaacccaat

SEQ ID NO: 151864 - DNA, 331 bp, Homo sapiens
agttctctctttaaacatacaaagagggttctgctctacatattgttctgcagcgtcaggcttctattaaatctctttaggaacttgacctcaactgtagcatacaccattttgttttgttttattatatgcctggaaatcagtggtaccacatttttaactatatgatcaaataatgagaaaaagagatgtacgtgaaaatgatattaatactttgatatgtaatgcctactatttacagcatttcttaaaacttgatcattaattttcagattaaattaatctgacagtaatgttgttttccaaggagatttctttcccagactgaaaa

SEQ ID NO: 151865 - DNA, 523 bp, Homo sapiens
agtgcagctgtgcccctcctcaacacctcagggctggttggagcctgagatctctacaggccttcccctccacgtccaggagcccaggagcggctgtcctgccctgaggcccaggattgtgggctttcagatggccccgtgggagatgcctatgcccagcctgtgtgggcctggaggcagtcaaggagtgggcctcgtcctgaggacagtgggcatcacagagggttctgggagcgctggggaccgaatggagttttaggaagaccacactggctgctctgtggaagatggaaagagcagatggggtgggtgtgggaggtgggaagtcgtttctgtaggaggtggcctcaggcggcttcctggccagaggcgctggaggccagagagagccagagagagccagagcttggtggcaagaggtgaggatggagacttacattcagcagctcccacaaggcagggtgtggagggagtgggaaggagcaggggctggacactggaggagggcaggcttgtggtgaag

SEQ ID NO: 151866 - DNA, 402 bp, Homo sapiens
tcatgaatggtttagtaccatccccttgatgctgtcctcgagacggtgagcgacttctcgcgagatctggctgttttaaaagtgtggcacctcacactctctcttgctcagtcctcatcatgtgatgtgcctgttccccctttgccttctgccatgattggaagcttcctgaggccttcctggaagcaggtgccactatgcctcctgtacagcctgcagaactgtaagccaattaaatctcttttcttttaagtattccttcatagcaatgcaggaacagcctagtacaccactttacacaataaaatagtaacaaatgtattttgcaagtttaatcactcagtatactaaccgtagttgcatgggtgttacattttgtaactgtggtcctctgaaatacca

SEQ ID NO: 151867 - DNA, 245 bp, Homo sapiens
tcaagtgatcctcctgccttggctttccaaagtaccgagattacaggcatgtgccaccacgccccgcctaattttatttcagcgtagctaacttaaatgtaaaaagtcatatgtggctgtgacccttgtactgatggctgtagaacgtgaggagttttcaggagccaaatgatggaagaatggtcagcaggtggttgagaactattcccaggttttagagatgatttaaaatgagacggctggcc

SEQ ID NO: 151868 - DNA, 393 bp, Homo sapiens
cccacctcagcctcccgagtagctgggactacaggcacacaccaccacaccaggctaatttttataatttttgatagagacagggtttcgttatgttgcccaggctggtctcaaacttggctctagcaatccacctgcctcagcctcctaaagtgctagaattacagatgtgagccaccgtgcccggcctttattctctatttattcaagtttttttatttttttagattccatatataacagatcaaatagtagtcgtcttctttctatctggcttatttcacttaacatattctggatgaacccatccagattcatacatgttgtgacaaatagcaggatctcccttttttttaaggctgaatagtatttctggaggtgtgcgtcaatgtg

SEQ ID NO: 151869 - DNA, 369 bp, Homo sapiens
cccaaagtgctgggattacaggtgtgggccactgtgcctggcctaatttatatatttctaaaactttgatggttttctttatggaaagatggagtgccctaggacaaatgtctccaagggggaaaagaacagaactgataagattaaatgataggtttggctatatgcagaattgttctgaagcgcaacagttttaaatggtgatgaagtccagtttatctataagaattgcttctgctttttggtctcatatggaagaaaccattggaaaaatccaaggtcacaaaaatttacgtctcttttctactaagagttttgtagttttaggtcttacactttgagttgatttttgtatgtggtgtgatgtgg

SEQ ID NO: 151870 - DNA, 288 bp, Homo sapiens
cttagagtttctgaattaatttagcaagatttcccacattatagaaatcaggcagattaccttaaatcagatcttttaagagtataaatactttctctctagttgtctttatcaactctcttacttgctatcttcttcaacttgcgttactcataccacattttgtgatcatttatttctacattgagtttttcatagaaaatgattcctggaagccaggccacctcactgttgtctttgaatgacacatttccgtgctttggctctgatgtgccagagaaccccttg

SEQ ID NO: 151871 - DNA, 703 bp, Homo sapiens
gctagtctcctgcctcagcctcctgagtagctgggactacaggcgcccaccaccacgcctggctaatttttgtatttttagtagagacgggtttcaccacattggtcaggctggtcttgaacttctgacctctggtgatgtgcccgcctcagcctcccaaaatgctgggatgacaggtgtgagtcaccgcacctggcctctttgcttttcttaagtgactccatgggggacccatgcagccagcagcatctcggctttttctccctggaaggtgtctgcaggaaaccagcatcccagttaacttcagacgcgagagtgttgattatacactcaaggccccacattagggaagtttgtgagtcacagccccacactgggtctcccagggatcaacaagatccacaaaccagcatggttaggacaagtggttttacagtccttttttttttttttttttgtgagatggagtcttgctctgtcgcccaggctggagtgcagtggcgcgatctcggctcactgcaacctccacctcctgggttcatgccattctcctgcctcagcctcctgaatagctgggactacaggctcccaccaccacgcccgcctaatgtttttttgtattttagcagagacagggtttcactgtgttagtcaggatggtctcgatctcctgacctcatgatctgcccgcctcggcctccca

SEQ ID NO: 151872 - DNA, 546 bp, Homo sapiens
gcttgaattaatataaaacgaaagaacccagccaataaaggactgcctaactatagctgagaacatccatgtgatcaaatgatacagagatgcaagatggagatcttaggagaataagggtaactgcaggtgctggccaggccgtgcatcacatgctgttaggtaaaagatgacgctgaggagcagccaataatgtgatcccattttttaaggaacaaaggtctaggtgttggtatgaacatgaacaaatccctgaagaaattcttctgaacccatttactgggtatctgatgggaggggagaaatgccaaggactttcaccttctactgaaacatttcctaatgttcatttttttctttttttctttttttttttttagatggagttttgctcgttggccaggctgaaggtgaaagaacgggaagggaagtaccacacccgtgtcgcacagttgcaatttgcaggcaggatgggagcccagggtcctctgcctgtttcgcagttcctcggctctcccctaaggagtaggaccagggttgggaggg

SEQ ID NO: 151873 - DNA, 394 bp, Homo sapiens
gaacttgctgaatggcaaagcaaagtgctttgaggctctagtttaaaaaagtcctgggagtgcagaaattcattcccatctttaattcctaagcaatcagccagccctgtagcatggaatccacccactcatgtagttaaatgtgtttcagtgtagaacacacacacacacacacacacacacacacacacacacgtgtgaggaagggcctgccatcatctaccctttctgggttgttaggttctgacagttaacctgaaaggctatactgtgacagccaaagcatgaaatgataaagactgtggggcaaagactaattgtcaagccctcctccagctcagaaggttcatggctttggaggaaattcacatatatgtgagtaattggtggtagg

SEQ ID NO: 151874 - DNA, 239 bp, Homo sapiens
gtagagaatgctgggggttgcatgtgggttacaggggtggacctggagtccttatgaatgaggtgagttaatgtgtgaaaagcactaagacatggacaggccagcagaggcagaggctgggacacacacgagctgtgtgtgttcacccagcaatgtaggcagggtcgtgaccagatcacagaagccataggtcatgatcaaggtcagagtttcggctttgtcccagtaagatggaaaag

SEQ ID NO: 151875 - DNA, 798 bp, Homo sapiens
  misc_feature (19)..(19): n is a, c, g, or t
ctttaggagataacaaagnccagttggttgtgaaaatgtcctcatcttctctgggacaggaaatcctttttacctacatagaaaagttacgttattggaatttacatccctcctccataagaaaaaagacatcttctcttccaaatgtccaccatgctaattttatctctttcttattatatttaactttaaaaatcttgatcattataattgctgtgggtcgtatattcactgtgaatattctgtgagagatgacagttttattcttaataacctgcatattaagaatcgccatgcctttttcatggttagtgttcaatccacatgttaaaagaatgaaaaatgcattactgaattatcttatattacccttttttgcagaatcattctttgtagtgttagtgaaatatgccgaatattaaaataggaaccaaactttttataaaatgctgcctctgctgtctcacaatgcctaatgctacctctaaacgatagttattattcttttctgtcatataaagaaacatagtcatgccaattggttttttgccactatatatccagtgggaatcacacagagaatcaattcattacaatgataaattacaccattaaatagtatattatgccagaataatctagaaggtcatgaaagaaagattaagagatgacaagagaatctacaatgtgtaagaaagtgcatgatacatgaaaaaataggttttggtttgatatctaccaaatatgttaaatgaatatataaccctgtaaaaattgaaaaattacatacttgtaaaa

SEQ ID NO: 151876 - DNA, 633 bp, Homo sapiens
caatgattttaagtttcttgaggcctccccagcaatgcagaactgtgagtcaattaaacctctttcctttagaaattgctcagccttggtcagttctttatagtagcatgagaatggactaatgcatcaaccctccctgcttgtctagttctcaattctggtatcatgtcacctgaattctgttcctgttctcatttatacagaaccacctactatgggcaagtcagtggcttgtttctgtttcatggaatcttctagctatggagagctcaggtatcagacttcagaagtagagcttggcttgccttgtgcatggagactttagtctatggccaccactagttaagagcagattaactctgcaaggctggctccatagacacctcactttttcctgagtggtgctgtcctcagtgtcttaacacttaaacacaccatgatattctgatatgcttgatcaaaggaaaatgttatattctttattcaagtaaaaataattgttgggacaatggatagttgagaaatgagtgagatcctttgtatagaattaaaaattatagtaatacactaagaggatgtaaaatgagagttgtccgatgaaaaagctatggacattgaatggtgcctaaagat

SEQ ID NO: 151877 - DNA, 294 bp, Homo sapiens
gagagagaggatcaagagaaaagggggtagtggtggagaggtttgcgggaagaattcagtttactcctattgggtttgaggagaggtagactagtggaaatctagcaaaaatacaggtctcagaaacataatcactttgaacccctttagttctttatttgcatgagttttagtttaaggagatttctggtagagggagaacctggagcagagggagaaggaagggtgatggaaggaatgccttagtgtcccagcccagtccctaaatgtgatggtgaaaaggcttaaggagag

SEQ ID NO: 151878 - DNA, 274 bp, Homo sapiens
tggcaggaatagggaaagcgcaggtgggatttgggaactatcagctggtccagtataactagagtagagcataaatgaaaggagacaaaactgaaagtttgattagaacttctttagtcagacgtgttgtgggcttgggtgaagggctgaggtggctccttgagccagcataaccatttaaggttttcatggaggggaacagtgtgatcagttgtttagattgagatacaaattttggtctgttatactaatttttctcaagtcagttttggtt

SEQ ID NO: 151879 - DNA, 421 bp, Homo sapiens
taggagtcaaccccgggtgctgcatcacctttccccctcttcttggacaggttcagcttgttctggtctacctatactcaacctgcttccccattagcttctggccagacttctttccatggctgcggaattgcaagaaataccatacttagactactgccagagaataatgacatttaccccttgtctgtgctttgtgtgagggctgtctgggttccatatatgaaggagcgtcactgggtggtcacgcaattgaatcacgcaattttatcttcttcccataacatatagtttctctcaagaggaattaccttcatgattacttcccatctttccccaaacttgatgggccatggtcaagatcttctgcaaatgtcctctctcaaatttgccttcatctgatctttttataatgtatctg

SEQ ID NO: 151880 - DNA, 195 bp, Homo sapiens
acaaacaaagagaagggggtgataaatgtgtctttgatgcccagggcccagcatcattctagggcacaaagaccatcgatcctttttattccttctcctactcattctagactctaaatccaaacacctttctgatcttaaaatcatttcctgaattattgtctcttggtgcagcatcacacagcaatatcttga

SEQ ID NO: 151881 - DNA, 364 bp, Homo sapiens
ggcagggctggggttgatagattgcgcagaccctaacagaggcttatatgatttatagatgaacagtattacctcttcctccctcctgtttattcaggtggttttcacaatcagttccttgggcttgaggctactatgtaaagcaatcttagcccttggtgagtcagcctggcaccttggttctgattagctaatacttcctatagcaaaatcagttccgagtttcagctacttgtaataaggatggctaaaacatcaaacctctactagactcccctgccccaagtcacaggacactcctacttcagaatatcattaactgagactgctttgtgcatttctgcagcatcaacaaacagaagat

SEQ ID NO: 151882 - DNA, 861 bp, Homo sapiens
ttctatactcccagttatagataaccacgtcccacccggcctcaggcgattctacggcagcgtcgtggtgccagtttgcaaagatatgcatttacttctctggctacaaaaaagaatagaaatgcacaaagcagagcagtgtgaagaagaagaggcgatgacccctagaccgaccaaagcccgtgctccactgcccagtgcctatgtcccaccactgtcgctgccaccctgcccgagagaaaggctgaaggggatgctaaaggagataaaaccaaggttaagtaggaactgcagagaagatccacaaggttgtctgctaaacctgctcctccaaagccacagccgaagcccagaaaggcctctgcaaagaagagagagaaggtacctacagagaagaagggaaaagctgatgctggcaaggaggggaataaccctgcagaaaatggagatgccaaaacagactaggcacagaaagctaaaggtgctggagatgccaagtgaagtgtgtgcatttttgataactgtgtacttctggtgactgtacagtttgaaatactattttttaatcaagttttataaaaatgcagattttgtttagctttttttttttttttttaagctatgttagtacacagaatacttcattgttgttttggggagaagggccatatgtcactaatagaaagcccctgaagctggactgatgtggggaaaacaccttttccttctggttttgagagacttcctcttgggtcccaggaagagggattccctgactttgatacacatggccaccttggtataaaagccttgtggtatggaaaaacaaattcgttttttatgtcctcttctctgtttcta

SEQ ID NO: 151883 - DNA, 827 bp, Homo sapiens
tttagtgcacttgattttgcagatgagtctggaagtgttagttgcaaagatatgcatttacttctctggctacaaaaaagaatagaaatgcacaaagcagagcagtgtgaagaagaagaggcgatgacccctagaccgaccaaagcccgtgctccactgcccagtgcctatgtcccaccactgtcgctgccaccctgcccgagagaaaggctgaaggggatgctaaaggagataaaaccaaggttaagtaggaactgcagagaagatccacaaggttgtctgctaaacctgctcctccaaagccacagccgaagcccagaaaggcctctgcaaagaagagagagaaggtacctacagagaagaagggaaaagctgatgctggcaaggaggggaataaccctgcagaaaatggagatgccaaaacagactaggcacagaaagctaaaggtgctggagatgccaagtgaagtgtgtgcatttttgataactgtgtacttctggtgactgtacagtttgaaatactattttttaatcaagttttataaaaatgcagattttgtttagctttttttttttttttttaagctatgttagtacacagaatacttcattgttgttttggggagaagggccatatgtcactaatagaaagcccctgaagctggactgatgtggggaaaacaccttttccttctggttttgagagacttcctcttgggtcccaggaagagggattccctgactttgatacacatggccaccttggtataaaagccttgtggtatggaaaaacaaattcgttttttatgtcctcttctctgtttcta

SEQ ID NO: 151884 - DNA, 421 bp, Homo sapiens
ggactccaggcttgtgtcaccacatttagctagtatttgtattttttgtagagacggggtcttgctgtgttcagagctggtcttgaactcctaggctcaagcagtcttcccgcctttggcctcccagagtgctaggattataggtgtgagccaccacgcctggcctgaccttaatatttttaaaattctttgcctctttcaggagtcactatctgtgcgcccatagtaaacagattctgtaggggtgcatagataagtctcttgaaattctaggcaaatgtctgtatttttctggggaaagagagagttgtgactttgatcagattattatggtgcagtggtccgtgacctcagaagtggttaagagccccgctgtagttcatccgtcatctgtctgggcaaaactgacaggatgaccttt

SEQ ID NO: 151885 - DNA, 234 bp, Homo sapiens
cattgggtagatacactcgtttcaaatgggagaaattggccaaagcgaaagagctacaggccccatgcaagtccaaaacccagcaggcaaatgtctgtatttttctggggaaagagagagttgtgactttgatcagattattatggtgcagtggtccgtgacctcagaagtggttaagagccccgctgtagttcatccgtcatctgtctgggcaaaactgacaggatgaccttt

SEQ ID NO: 151886 - DNA, 499 bp, Homo sapiens
ttctttcttcccgcggtgaaagctgcctcccaggccagcaagagcagcccagaagaagtgccccactctcccagggatcaggtactgggggcagcgggcaggacaaggtatggggtggggctgactgctccaggccaacagaccaagcaataaggttggaaccacaagtcccctgggtaaactgaactttattccttcctcacggctctcactctccagaactgccccgccagctcttctccaggggctggctgctgattaaatggcacttccccacccctcagatctgaccccgcaaacaataaggacttgaggggaggcggcaggctatcagctcaataatgcaaaaccctgttgctcctcgtccacaacagctgacttcaagtggatgggaggctgcgcttattaacaaaatgagaaatctgatctacggaaagaaaacactacgtgaggattaatccgcgactgcagcttgtggagaaggctgggctgctggcca

SEQ ID NO: 151887 - DNA, 396 bp, Homo sapiens
tgtgtcctatttttgcaacttttaaaaagtaaaaattcaccttcagtgacacactacttttaggttaaaccagtttatctgggattcataaacgctactttattttcatgttataacacttaacaccgtaccttgtatatgataggtgctctatcaatgtttgtttgcttttattaatgatttgtaatgtgtctcaataactctttgttctactatggtgcttcttactttttgttttgtccttttgtctttcttctcattttctgtgagctcttccatagcagacactgtcattttattcacaaaaccttattaaattaaacccacacatatttagagttactaataatttgggtatgatatgcctgtgtcttactgaatgcagatgatgatgct

SEQ ID NO: 151888 - DNA, 688 bp, Homo sapiens
aatgctctgaacgagggctgggagatgcccttagaggaaatggtatgtagactgaaaaatgagaatatgaaatatcatgggaacaagattcaaagccagtgtgatagccctgagacaggaatgagcttcacatattaaagtgaagggatgccagggagccacagatcaagtctcccctggagcattagaagtgtgtgggggcacgtgatagcaagggggtgttgctggtattttgtgaacaggggcaagggatgctaaatatctagcagtatttgaaaaagctccagaaggaattttcccaaccaaaataccagcacctccgtcaagcagccctgacagagaatagtgagtatagagaaattgatagacaggaggtcagagagctagacaggagacacattagatagggcttcagggccacagtaaaagtttagatcgttatcagaagtgtgacagaaatcattaaatgcctagtaagcacagaaatgtttttgtaagttctggggacagaaacataatgccttcatacagcattctattccaccttggcctaagttcagagccaggcatggcgctgaacttaggacacacacgcacacatggggcgtaaggaaccgtgcctggacacacacagcacacatggggcgtaaggaaacacgcctggccaacactcaagccacacacaaat

SEQ ID NO: 151889 - DNA, 369 bp, Homo sapiens
tgataacttgagtttgcaatgatgggagccaacataaagcaagcaggttctcatcacagaaccaggggaagttttaaaaattgggggaatcaagatagggatgagggaagggctggcacggggatggcagaccagaagcctgtgagggagactgcagaatcctagaatctctgtgcacccaggcaactccctctggcccaccctggcagaaggcatgagcttaacaagaaaccctggacttgaggccccgcggcacacttgatagagggggcgaaggccagtgcagcaggtccatgaataacatcgtcgtttcattatgacgttgacgagaaaaaatattgccccgtgtccggggccactctctgggtg

SEQ ID NO: 151890 - DNA, 946 bp, Homo sapiens
ttcagctgccatggctcccagttcgacatcatgtcaccggagcctgcacagatgaaccaagcttgcaacacgggaggaacctaagcgctggactgaggagcgggactgaaataagaagcgcacaccacatggcaagatccaggatccaatcagatagagccctggtgtcatctaattgcaagatccaatcagaacacacctcattaccttatggtaataagcttatgcttataaaacccgacccagccgccagcttggggagacaggtttgacctttcctcctgtctcgtcgcagtgcagtccactctctccagcaaaaaccctgcgctttggtgtttggctttccctggtgcacaggcaggcgggtccactttggtttggtgacactctaggccatgctcacacactcaccaggcctaccaggacacattcaccaggccctccaaaccatgctcacaggaaccaccaggctgcacacaagggccctccacacaccacacttggccacacccccggggccgcaccttgaggttctccagaatccgcagggacctcggtgccagccaggccacaccacccagcactccaagctacactcactagacccacccggaaaaacaggccacacctctgagtgctccagatagcgcttgccagacccctccagaccacactggccaggctgcacctcggagccctctaggccacgctctcaagggtaccaccatgccaggctgcaccaggccctcacgtgctgctcagtcaggccaccagtcgcattctgcaggcccccaggtcgcacctccaagcccaagcagcccatggtgatttggcctccttgaagcccaaagcttggtgatctgacttcacaggcagccctcctgcctaccgcagcggccaagaattattttattggcatggcaattagaacctacaaggcaaacag

SEQ ID NO: 151891 - DNA, 342 bp, Homo sapiens
gctagaggatcccgggaatcctcctgcgcttcccatggattggttaatttgtgacttcattctcttatttctgtggtggccaggagagtagggatggggggagagtctaagaacgtgcagcattgaatatcagatctttttctatgacactaaagaggtatgctagctttcacactctgtcctacataggtaagtaattaccctctgccactcactgacttcctttggagcctccatgacatttagcaatcatcatattctgactctattaaatagtgtatacaagaaatatgaataggtcaggtatttaaattgtagccagtcttatacagctaaggcata

SEQ ID NO: 151892 - DNA, 420 bp, Homo sapiens
gtcacaatcactccagtgaaaagagttcaaacatgagagaagagtcacaccacataggtgctgcatattttgcaatacagaatatatgcagagcccagaaaggagaggacagtcacatcacctaggtgctgtgcccagcaataaattgcaatctcttttagggcaaagcccaagcagtagaggtaatccttgctgctggacccaaaaatatggcacaatacaccctgaaaaaagagcccaggaagaagagttacgtcatctggggagggttccaaaaatatgtaaacatgccttctgtgggtaagcctcaggatgaagaaaagagaaaaataacctaggggctggggccagctgcagttacaacctcagtgagcagggcccaggcatgagaggagagtcacataacacagatgctgtgcc

SEQ ID NO: 151893 - DNA, 398 bp, Homo sapiens
gagaatttgccactaccatgccagcgctacaagaattgctaaaagaagcttcaaatcttgaaacaaaacctggaaacacatcaaaacagaacctctttaaaatataaatctcacaggacctataaaacaaaaatacaattcaaaaaaacaaaaacaaaacccaaaaaaccaaggtatacaggcaacaaaaagcacaatgaacggaatggtacctcacatcccaatactaacattgaatgtaaatggccgaaatgcgccacttaaaagatacagaattgcagaatggataagaattaaccgaccaactatctgctgcctttaagagactcacctaacacataagagacttatctgacacataaggactcacataaacttaaggtaaaggggtggaaaaa

SEQ ID NO: 151894 - DNA, 814 bp, Homo sapiens
caacatcggggggttccctggggggtgggtggttaggtaacagcagcccctccacatagtgggggttccctggggcgggtggttaggtaacagcagcctctcaacatagtgggggttccctggggggcagacagttaggtaacagcagcccctcaacatcagggggttccctgggggacagttaggtaacagcagcccctcaacatagtgggggttccctgggggtcaggtggttaggtaacagcagcccctcaacacagtgggggttccctggggcgggtggttaggtaacagcagcctctcaacatagtgggggttccctggggggcagacagttaggtaacagcagcccctcaacatgaggttccagtgcagatgaagcagagcaggcatcggggaggaagaaacagggaccctcgcgtgcacacgcactgctgttttaagggctcctggagaccgggtgacgtggaatcacctgcagtcacacagtcagggaccctcgccgcacacacgcactgctgttttaacagctcttatagacagggtgacatggagtcacctgcagtcacacagtcaccttcagcaccttccacactccctgagcgctctagaggctccagcctctatggccgacactgtcattaatttcccacttaatcccaactgtaatcctggaaaactggcattaactttgttttacagagggggaaactgaggcatgagggggtaagtgatcagcaagaagttggtggggaccaccgtgccagctccggctcggccctccacaccctcccagcacatacccaccctgtca

SEQ ID NO: 151895 - DNA, 279 bp, Homo sapiens
tatagaggatcccagttacagcgtcaggcacaggtaggagagatccagcggtttgcccaagattatgcataaatgaatggctgaatggatgaatggctgaacgaggtgacgctgaagctgggaatgggaaccgagacgtgagcggaggtgagccatgggggttgcaaaggagaggaagagaggggcgggttcttgggatgccttcttgttccttcccgcatgaatttactgactcacagaccctgatgaagcactgactaggtacaaccccgcgtcatc

SEQ ID NO: 151896 - DNA, 452 bp, Homo sapiens
tagctgggattacaggcatgcagccattgggcccagctaattttgtagttttagtagagacggggtttctctatgttggtcaggctggtcgcgaactcccaacctcaggtgatccgcccacctctgcttcccaaagtgctgggattacaggtgtgagccactgcacccggttgcattatcacctttcattctcactagtttataaggaagaccagactccctcagcttccctccctaacacttggcagactcatctgtatcagttccacccgtatctcctttcttttctcagaggaggaactgtcctcttcctgttcgaaggtctgtccctccatgttcttactctcatctcttctcttttgagatcttgggatctcactttattgattgatctgttcatttacagtctctctttgtttctttcatcttcaacctctcacttaacacttggt

SEQ ID NO: 151897 - DNA, 424 bp, Homo sapiens
acaggatgaactttattctgcatgtaacctgtgccatttgagaccaaagcctcattttctccacattagttagctagcaaagggtggtaaccccaagaatgaacacaaatctggactgtaataaagacgccttccagttaaaggttaaacaaatgccttctggggaagagccagcagcctgagctcacatgtgcaattcaccactcttctgtctaaaacctctccattaatttccaccctaacccctatgttcctagaaatataaaaacctttccataaccagtccggggattttctcggggagaagttgaattaaatttctttagcaatcttgctgtaagtgacaagcacacatgatttaaatacctctaaattgagaatttccatatggacttggccttataaatatcagacgctgataaaa

SEQ ID NO: 151898 - DNA, 566 bp, Homo sapiens
taccaactactggctataaggtaggagagaaaaggaaagagaatcagggacagaaaacagttgcctggagcctctatctgcaggaaagctgttccttaggaagggaaaagataggcaaagggagaaaaggagagggaagtgggaccacagcaggtgaagactctggtctcttactagtgcagtagcaaagaaggaagagagaatcgcacctttctctatgacctttgtatgctcagtgttccaactgctggtaactctggcagaattggtgtcctggaatataaccaagcagattagaactcccttcaccagttgagtagtgaagataggagtctgtaaagaggcagatgaggccttggtatgcagattagatgttgtgggcttaactattttcttatatcatttatcagtgtctttaatgtagacaaaagtacaaactgaaagaaaattggcttataatcatagctgagataaactttttgaggtcaacgaacatgttcctctgtggagtctacttcttgtccaagggtttgctgtggttatctgttctttcttctgcaacattt

SEQ ID NO: 151899 - DNA, 230 bp, Homo sapiens
cgcgaaaattcggccagggttctcgctcttgttgcgtgtgttcaaacaaccggcacggtctgatccggaaatatggcctcaatatgtgccgccagtgtttccgtcagtacgcgaaggatatcggtttcattaagttggactaaatgatcttccttcaaaggattatccaaggcatatactcaatgaaaaaccatgatagttctttgtacataaaataaacatttgaaaaa

SEQ ID NO: 151900 - DNA, 355 bp, Homo sapiens
ccagagtcttacagtaaacctgattatacaggaactacattttttttgtctttcatggtattcctttggatgcaggtttgggcttcaaaacacatgtcaagatagtgaatatggtggcaatttttggggtcaacgcttggggtagagtgaggtaggtttgttatatagggagggtatctgggcctccaacagaagaagaaaagcagaaatggactgctttgttcttggatggaaatgtggtagaaagttggggtgaattaagtttggacctgggagttagattagattctggaggataatggtagagaaggagaatgttcataacttgggcatttttgtcaggaattgtgggaac

SEQ ID NO: 151901 - DNA, 506 bp, Homo sapiens
aagcaacaagcaaatatgtaatcacacatctcttcaattcacagctctgagcatcataaccaggattgggaaccagcccttgtgttgcagggacatggcttccacactgcccttgtcattctttttggtactgtcccttacagcatgctgtagtttgatccagggctgagcattcctacaggtgctccccagcgttcctcatttcaggcctagtcaggacctctagagcccatctgctgtgagcaaaagagggtgctaaatagtgaaatacagcttgaagcaagccaaaacctgtttcacataaaatctcacatggatgtcctgtatatatagaaacctggtgaaagcacagggcatgctgtcatggagcctcccatttctccccactccagttcaaggcagctttcaggagatggagaggaaaaagcttaatcataagaagaactgggtagacctgagttctctttcggattctaccagtactatatggccttgcttaatcattc

SEQ ID NO: 151902 - DNA, 159 bp, Homo sapiens
aatcccctcatgtttcctgcccccctcccccaaatcatgaccagaaggatccgctgaccaaggctgtcccttaaatatatgacttccttgagaataatttgacacggcttaaactaatttagcttttctcaatccctgtcttaactctcaacatgacta

SEQ ID NO: 151903 - DNA, 350 bp, Homo sapiens
ttgtattcttggtagatgaattgtgattcattattccataatcattagcccccccacccaaaaaaaaatcactatttttctgatagttttgatggttttagcaaatttttatattagttttggaaactttacttttttataaaaatcatcgtttttacattacatatttgtttcatgttgcagtgtgcttccgattacttttagggctcggtgaaaaaactgcttctttaaaagcctgttgcagtggagatgtgggggaggaggatccaggcagtggtaaggaagggggctctgtgtcctggggagaaatagagaaagtcttggaaagtaagttcatgtcaccttacagg

SEQ ID NO: 151904 - DNA, 561 bp, Homo sapiens
atgctgcgtgtcgatctagaggatccggtgggttcttgcacatgacacctgaggatatgtaataacaggcggcggacaatcgtgcctgacatgttagtgtatgggtagcatacaccgcgaaccacaccgaattgagaaggaatggtcacacccgtctcgatgtccggatccagccatctgggctccactaagtgctgatgttcctggcttgaccaccacgcccagccaacattttcatatatatatttacttcatcctcccaacaaccctgtgaggcaaatatccccattgtacagatgaggaagcaaacccgaaaaggtgaagtggcttgctttccagtacacagagctgataataagaaaagctgggaattgctgcctgttttctgattctaagtttagagccctttttatgtcctcataagatattgttagggcttcagtttgggatgacagtcaccccttatttcaggctgctggccaatagaggatacacacaaggaagatagtcctacacagtgagtagaatctctgctctgtcatagcagcccagtaactctgc

SEQ ID NO: 151905 - DNA, 551 bp, Homo sapiens
tataaccagttatgcaggcggagacacagtgtgcttcctacgtgtgagcatctgccgttggtcagtgggggccttccaaaggctgaagtgattatgatacttgaaaacatgttgggttcaaggatttataatctatttttaaaagacagtaaattcaaggtaaaatagagtacactggtgtgtaccttagatattagttctttaagtctttctccaaatggtagtttctctaaaatttgagacatgaacactaggtaatttagtattaggcaaatatttaaacagtttaaatgagtttattgcatcctggctctattacttactagctgtgtaagtaaccttaggcaaattatttgaattttttgcgacttaattttcttgtctataaaagatatttaacaatggtttctacctcttagggtttttgtgaatattaaatgagttaacatatgcgaagtacttagaatcgtttctagcatatagtaacaccgtacatgtgttagctgttatgatggtggtaatgatgttctcctcctcctcctctttctcct

SEQ ID NO: 151906 - DNA, 281 bp, Homo sapiens
tttacccaacaatcacaagacagacattcttcctaagtgtacacagaacatttaccgaggccaaccatattctgggccatataacataaagggattcaagttatacacaaaaatcttcgaaaaatgcctcaacacttggaaactaaacagatatctaaataagctggacaaacaggtagaaggagaaatcaaaagggcaattacaaagtactttgaattgaatgaaaaagaaaatgctacaaatcaaaatttgggggatgccatgaaagcaatacttgtca

SEQ ID NO: 151907 - DNA, 366 bp, Homo sapiens
cctcattctccttgacccttctacagcatctgacaatacaacataaaaccctttgacttcgcttctgcaacactgcactggcatgattttccactgacctctcagaacatctcttctcagtacctttcacttaccattcatgtatctaaatgattctcaagtttgcattcacttcatgcagatctgcccctctgtacaaatcctggggataccgttcacacaaaagacaatgtgatcagtacccactggagctgagcaatggagtgtccctgtccttggatgtccctgtcctcaggccttaccacatgcttcttcctcctagacagtagccttcattcccacaccttgcactacaatacacacaca

SEQ ID NO: 151908 - DNA, 272 bp, Homo sapiens
ttgacacagggtcttgctctgtcgcgcgggctgagtgcagcggtgccatcttgtctcattgcaacctctggctcctaggatcaaaagatcctcttatctcagccccccaagtagcggggactacaggcacatgccaccacaccccactaatttgtgtgtattttctagagatggggtttagccatgttgcccaaactggtctggaactcctgagctcaagcaatccaccctccttggactcccgaagtgcgggattaaacgcatgagccaca

SEQ ID NO: 151909 - DNA, 146 bp, Homo sapiens
accatgccctctggaactccacatcatcttctgtgaaatttttgccttctcactctggaacctaaccttgtcctgaagccatcattttcccaaggtccttgcaagagacatctgttttctctcttacagccctactatcactaggc

SEQ ID NO: 151910 - DNA, 442 bp, Homo sapiens
cttttttgttgttgtaagtgaattaaaaagtttattagccatagaaaaaaactgactcctctaaatcaattattgataaatcccctgtaaaacagcaagcttacagaaaatttctctcatgaacggatagtcactatacttttggtccaagaaatgatgggttttttcctccttcttcagatgacagatggatgtaactgaatctacaaacgagtgtacttgccccaaatgtgcaacataaatacagaagagatgaacagaaggctcataaccaatactggaacaggaccaactttgagcccaggtgaatcttctgtgtagaatcgccacatccgccatgtgcctgccgaggtcgtgcggcctgcgctccttgtcccacagctggcatttttcctctgccggacagtggatcttgctgcccgggcggccacggctttgctgg

SEQ ID NO: 151911 - DNA, 530 bp, Homo sapiens
ctctccatactggctctctctccacactggcattccctattgggccttttcttgtcaatttcaagtccagccatagggaatttaaataacttctgttcgatttcccaaatgcattttactctgctgtggaaaatctcacatggtaagaccagatttcccttttagtttgcaggcgagagtctaggttgtgttctcacaagtagaacctaccctatgtttgtgttctgaattccctgcactttccatcagggctcccaagccccctgctctgtctagacctcccacctcagaaaaccctcccagccacaggtgggacatgtcagtagtccccagggtcagggcttgtcttgaggctgagcaggaaattctcttgggtaactgctttttattctttctctctcaggaagtgcttcccgtaagcattaccaaaacggttctgtcctctttccctcacaaactccaggaaccctagaatggtggctcctatctctgatcctcaccaaaagtccctttgaagaccaggtgtggtg

SEQ ID NO: 151912 - DNA, 626 bp, Homo sapiens
acatgctaaatcttggttaagtctgaacaaagccagtgctagaaagaagcccatgaagcaaagtataccatccactttcttaaacaaagccaagctaagccatctgttcccgtatcatcagttgttcttagcgtatcacttagtgaatcatttcagaaacaggagctaactgaaagataattaaaggttccagtggttcttagtgtcgaagcactagaggcattcagtaacatgagagaccatttttggtgtttcatgcctggggagtcggggatactactggcatttcatggagagaggccaggggtgatgtggtggactgaaaaacgtcctccaaaagactactcgaaccttcatttcagacttccggcctccagaaccatcacagaataaatctgtgttaaaccactcaatttgcggtaatttgtcagcagtcaaaggcaactaaaagtattaaacttctggaatggatagaacagtcctactgtaattgccaataacactaccactgagctacacagaggaatatgaagaagtgaaggttaactgaaagggaagaggaaaagtaaggagggctaaatgatgtaagtgagggaacagtgataaacaagtttagtgaagttaca

SEQ ID NO: 151913 - DNA, 198 bp, Homo sapiens
tctgtcatggcatgggagaggggtatgggggaaggaggaggtgataagaacgttgggcaagggggaaggcaggagagttttgaaagagaaagtgaaggaatgagtaaaaaaactctgcctaactagtagctttattaagtgcagctcccactcccaggactgaatcaccttgtgtataagcacggtgcgttggcccaa

SEQ ID NO: 151914 - DNA, 128 bp, Homo sapiens
ttctcccactcagcatggttttcctggtctggtcacgttgatacatttaggtttacttcattttcacagcttatgtattagtctaaagtaagcataactaccatgactatttatttgttcattttcct

SEQ ID NO: 151915 - DNA, 194 bp, Homo sapiens
tgcccctttcatgctctttgattaccacaatgtgtaaattatttggcttgatggtgtcccctaagtccctaaggctctgtttatttttttgtgatcaatgtaaaagttacgtattatatgtaaacattttaacaagttatggaaacaaaagttatgaggttcatttaactcatttaatatttggtttataacat

SEQ ID NO: 151916 - DNA, 904 bp, Homo sapiens
cggaaaccagctatttttggcccatgaggcctacaccaggtaatgttaacccagtccgggtgtttgcacaacatttatgatttaagttcaatgacttttttaattaccaccgcaacagatcatctctgagggaaaccagctgccatgttgtgaagacactcaagcaagccatgtgtgtgaactaccatgttgaaaatggaccctccaaatccaatcaagccttcaagagattattgatgtcatggccaacatcctgactacaacctcatgaaaaaacctcagcaaatgcttcctaaccaagcttcttctgaactccagacctatagaaaatgtgtgagataattgttcttcagcccagtcaagaccctaagaagatgggggtggaattctgcctcctctacacaaattcttgccacgacttagtgacacctttaatgaaccgagcactgggttaaagttttctctaattcttaaataactctgctagcactattcacaatagcaaagacatggaatcaacctaaatgcctatcaatgatagactggataaagaaaatgttatacatatacaccatgaaatattatacagccataaaaaagaacaagatcatgttctttgcagggacgtggatggagctggagagtatcatccttagcaaactaacacaggaacagtaaaccaaatactgcatgttctcatttataagtgtgacctaaatgatgataacacatgggcacatagaggagaacaatacacattggggtcttttcgagggtggagggtaagaggaggaagaggatcaggaaaaataacgaatggatagtaggcttaatacctgtgtgatgaaatactgtgtacaatgaaccccgagacacaagtttacccatgtaacaaaactgcaat

SEQ ID NO: 151917 - DNA, 1328 bp, Homo sapiens
aattgacataatgatgaagaggatatgatttttttcggcccatctaccctgaaatggctccatcattcatctctttctccatcccacttactcaagtgattctttcaacgatagtgccctgtccctaacctcagggtttagaaacatggccccaagactaacagattgcagtaacttagtccaaaggaggacatatgagccacaccaggtcagagaagttctgagagatttggtgttcagatgctgagagttgctttcttttcccctcatttgcaagctgagatgtctgcaatgagttgccaatagcctttgtttccccagaacaaagaaatcatattgtagcctgagaaaatgaagctgttctagccacttctaagattgttcctactgaacctcacctcttggtattcatgctgtcatatagtccccttccataataaacagggctaacatatgtaaccaatagcacacattgcaaaaatgatggtgtgtgactcctcaggctagttcacaagacttctgccttacactgtttgtcttagatcatctctgagggaaaccagctgccatgttgtgaagacactcaagcaagccatgtgtgtgaactaccatgttgaaaatggaccctccaaatccaatcaagccttcaagagattattgatgtcatggccaacatcctgactacaacctcatgaaaaaacctcagcaaatgcttcctaaccaagcttcttctgaactccagacctatagaaaatgtgtgagataattgttcttcagcccagtcaagaccctaagaagatgggggtggaattctgcctcctctacacaaattcttgccacgacttagtgacacctttaatgaaccgagcactgggttaaagttttctctaattcttaaataactctgctagcactattcacaatagcaaagacatggaatcaacctaaatgcctatcaatgatagactggataaagaaaatgttatacatatacaccatgaaatattatacagccataaaaaagaacaagatcatgttctttgcagggacgtggatggagctggagagtatcatccttagcaaactaacacaggaacagtaaaccaaatactgcatgttctcatttataagtgtgacctaaatgatgataacacatgggcacatagaggagaacaatacacattggggtcttttcgagggtggagggtaagaggaggaagaggatcaggaaaaataacgaatggatagtaggcttaatacctgtgtgatgaaatactgtgtacaatgaaccccgagacacaagtttacccatgtaacaaaactgcaat

SEQ ID NO: 151918 - DNA, 839 bp, Homo sapiens
ccaagactaacagattgcagtaacttagtccaaaggaggacatatgagccacaccaggtcagagaagttctgagagatttggtgttcagatgctgagagttgctttcttttcccctcatttgcaagctgagatgtctgcaatgagttgccaatagcctttgtttccccagaacaaagaaatcatattgtagcctgagaaaatgaagctgttctagccacttctaagattgttcctactgaacctcacctcttggtattcatgctgtcatatagtccccttccataataaacagggctaacatatgtaaccaatagcacacattgcaaaaatgatggtgtgtgactcctcaggctagttcacaagacttctgccttacactgtttgtcttagatcatctctgagggaaaccagctgccatgttgtgaagacactcaagcaagccatgtgtgtgaactaccatgttgaaaatggaccctccaaatccaatcaagccttcaagagattattgatgtcatggccaacatcctgactacaacctcatgaaaaaacctcagcaaatgcttcctaaccaagcttcttctgaactccagacctatagaaaatgtgtgagataattgttcttcagcccagtcaagaccctaagaagatgggggtggaattctgcctcctctacacaaattcttgccacgacttagtgacacctttaatgaaccgagcactgggttaaagttttctctaattcttaaataactctgctaggtaagttgccattattatgatcaaaccatactgaatgtttgagtaccttgactaagaaataaaactgggtttttgacaa

SEQ ID NO: 151919 - DNA, 351 bp, Homo sapiens
acaggatcttaggctactccacaaacagaggctactccactaacactccctacataaagaggcagggtgggcagtgaacacatatgccagccagctcagtcctcatctgacatgccatcaccttttgttggtaatttctaccctgcaaatctagaagttatgatgtgccatagcctttatctttttggaagggctgtccctgaacgcacatgaaaagtttcgaccgttttcccttgaactgccctctgattctgtttgacagtgtttgtggaggctagcatctgttgacttctgtggtcctcagtgcctgagcaggaaaggctggctctggctgtttgtggaggtagcact

SEQ ID NO: 151920 - DNA, 611 bp, Homo sapiens
tctaatcctggcatttctgcattttatgtactttccccaccttttgtttgtttagctattgacttaggtaatagtactaacagtaatggcccaagattctgtttgttgttgtttgtttgttggtttgtttgtcactaagttggttacagacctagaactagtccctggcaactcggaagctgttttttcctgggtcaccttggggaagtgtcttgggtgggaagaggacagagggaaggacagggagagcccaggttactgatatgctggacttcatcctcataattgcctttgtgccactaacactccctacataaagaggcagggtgggcagtgaacacatatgccagccagctcagtcctcatctgacatgccatcaccttttgttggtaatttctaccctgcaaatctagaagttatgatgtgccatagcctttatctttttggaagggctgtccctgaacgcacatgaaaagtttcgaccgttttcccttgaactgccctctgattctgtttgacagtgtttgtggaggctagcatctgttgacttctgtggtcctcagtgcctgagcaggaaaggctggctctggctgtttgtggaggtagcact

SEQ ID NO: 151921 - DNA, 176 bp, Homo sapiens
tggtacagaagagggaagaggaggaaggggaagggaaaatgtttgacaggtttgtgtttgaaatcctgagatcaatgtgtgtgtaaatggatctatggtttagaaaagaaatcttagagacacaaagttgggtgttatcagaatactggaaatagataaagccacatatacaataa

SEQ ID NO: 151922 - DNA, 870 bp, Homo sapiens
atctaggctgggggctcagggacgtaccccatcctttttcaacctgcagagcctggtcccatatacaagacaacacacccactgaccatcagggtcctgtgctgacctctgtatgtttctggtcacagacatcactcctcttcctccacccactggtcccatcaaattctccccttactcctacagttggcaagacctggagctgggacagtcagacacttccccagcatccccaaccactgtaacgccagctcctgccagacaacaccagtggctggcatttatggagcgcttactacgggctcagtaactctgccctgcaaccccacatcactcctatgagcgaggtgtacattagccccattttacagataaggagactgacacttagacagattcaataacttggccaagatctcatggctgacagcggtcagggcctgtatccacgcagccctgaggctgtgttctcaactccttttagtcaggctgcctgttgggcatctgattcctctattttctctcccaggccagcttgtgttctagatctacatgtcttctggtatttgcaagaggctccatttcccttctaatttcctagaaagtagatagtgaataaaataatcccaggagaaggaaaatggaaattatcttgctctgaggtccctgtgatattgtgagatgtgtatttggtcttcccggcatacactcctaaaattcttggaatgttcaaagtgaaaagtgtctttttgtatgctaatgagttgattgatggtgagcagcccctagtagcttcaggctggggcttggtcaccagagggaccaaggcaggattagagggttaggactttcagccccaacctccagcaa

SEQ ID NO: 151923 - DNA, 196 bp, Homo sapiens
attgcctaaaagaagagaggaaacacgaggcgactggggtgcaactttgtttgtttgtttgtttgtttgttcctttatagcgggcttaggggctgctcaaggggtggtgagatgaagccgtgagtcaagctggtgggtttgctctccccgctaccatcacactcggaaaactttggaaaactttgtccagagggag

SEQ ID NO: 151924 - DNA, 473 bp, Homo sapiens
gacagctctaatgcaatcagcagaccttatcatattgctttaacattcatctgcaaatgagattctgtagtcacttcccagtttcagtgtctgttcttagattggcccgctgcactttgtagttgagaaactgtgggcagtgttgtagttctccaatttgcagagctgtcagaaaccagctgccttccttctacttcctcccacagatactgaaactatgtggttcagtggtttgtcctcacttagttgtattttgaagttcatagagataccttgtcatctagcgttgtaatagtgtctgtggctatcctagttgctctgtattcttatggggagattagaaaacaacactgttgtcatcattttccctgaggttaaactgttaagacctctttctgttgtagaagagaggttttaattacaaaaataattttatgatcattataaagaacctataatttgaaatttgctgt

SEQ ID NO: 151925 - DNA, 598 bp, Homo sapiens
ttcagggtcaggttgttttgattttgaatcttgttattactcattagccacgtgactttagcaagctttttagctttcagagtcttggtttcctcatctgcaaaataggactaatattatctacatcacagaaagggatgcaaaacacatattataatagataatacttagtacctttgcaataagttgtaatatttccaattatcaatgtaggtcaacagcaacccggcaccataaaatgttttatatcttaatggagatctagcataattctggtttgtgctttttaccccttagaaaaaaatgtaactgctgacagcaaggtgaagacttaatctttagagccttgctaaaaatacattttaaaattctttagaagcaaggcttacctcactgggcacttaagaaatgttgattatagagaatcatcgtgatcagaagactgttatgttagaacaacaaacataactaaggatgagaaaacgttctctgctattcagacactaagctctagcataataagcaggctgagcataacttcatgtcaagagagaacaaggcttttcttacatactttttcaggctcttcagagagtag

SEQ ID NO: 151926 - DNA, 342 bp, Homo sapiens
tatttttaatagagacggggtttcaccatgtttcccaggccggtcttgaactcctgggctcaagccaatctcctgcctcggcctcccaaagtgctgggattacaggcgtgagccactgcacctggcctctccagccacttgactccatggagagggacttccccaccctgcacttcgtcctcccaggcagagggtgacacatctgctccatgggtctgggagaagaaactatggtcagccatcctctctctgcacactgggtaagaggcgtgggctctgtcctcattgtggagaggggcctgtgttttcctattcctgcaagggactcaatagatacttttt

SEQ ID NO: 151927 - DNA, 133 bp, Homo sapiens
tccaagagagatcttcaataaaaataattactcgtgtctgtttatttatatctgtctgtctagctagctagctagctatctttttatttatgtgtctataattctatcagtcatctatgtatcatttagaact

SEQ ID NO: 151928 - DNA, 339 bp, Homo sapiens
aataacagaagccctgagaagctaagggcattcccgccagcttcaaggctaatgtgtagacccacagggcttcccttgccctagtctagaactctctcccctgtgccatgttggtcctgtgggttcctgccctttgtaaccggtcatttaaggccctgcccagtctcccccaccccatccagccctcctcacagacatcaatgtctaccttttccatgaatcaggacctgagaggccagaatctactcggcagaatacaccgtgctcagtcctcctctgcacctctcctgcccttcctatgtggaggggtctcccagtccctccataccctgaattgtg

SEQ ID NO: 151929 - DNA, 458 bp, Homo sapiens
acaaccggggcgcagcgggaggcatggaggaaacgctccagcagcccaacctcgccagggcaccgcgcaggagaggcgcggcctcaggcaggcctgggtccagcccgggctcacccctcatcggctgtgagatcctgccccttcccctctctggcgtccaccctcttatctggaataccgggacagcgaccctcccacagaggaaaacgccgcgtgctggccgggaggacagggcccatctttggcagctctgatcgcccacgccaggagctcctcaggcaccagctgcctggtgctcacaggcgggcatcaagagaggaccatcattccccattttacagatggacaaaccaaggccaccttctccttcatcacctcagtctcggcacagttccagggatgccagggagaaaggcagctgtagcccagggcgaggctgagatggagcaagaaggcag

SEQ ID NO: 151930 - DNA, 384 bp, Homo sapiens
  misc_feature (128)..(128): n is a, c, g, or t
tctagatatgctgatctcattcttcagctgaattctttaaagcttttcactaaaagccggtataacacgtcttacttctgggaaggaagctcacagaaattaaactttaaaaatatttctactatggncggatgcagtccctggcaccacaaaggttggggaccgctgttccaccacggaaattcattgtataaagtttactcctccccacatctctgtaaaaaactatattcagagataaaatttggaaaagcagagttctcactgccacgttagttagaagaacaacattcccccatttattggcctggcactgcaaaataaaagtggcaaagtgacttgttttgaacttgtaatataaacacttcaaaaagctcctctcac

SEQ ID NO: 151931 - DNA, 132 bp, Homo sapiens
caagagaataaagcaggacggtgtcccgggctgttgaaagagcagagcgctccgcaggagaagctcctttcatgctgcttctggggttctggggtttggtggcttttctgtttgaattcgaagtgatggtga

SEQ ID NO: 151932 - DNA, 407 bp, Homo sapiens
attgatatttatcatctctacaattcttataattatatcatagattattaagtattagcactcaagtatggttcacattagatagtcaagaaatgtaaataagaagctgaacacttaaaaaaaactgagaactccctcataagacagttttaaaatacatggagcaaacactgacaaaactgcaaggaaaatagacaaagccacaattatggctttcggtacccttctctgaataattgataaaacaagtagatacaaaatcaggatacagaagattcaaagtactaatcaccttgatggtgacagccacttatagaacagtctattcaacaacagcagaacacacgtttttctcaagtgcacccagaacatttattaagatagactctattcctggcattaatcaa

SEQ ID NO: 151933 - DNA, 211 bp, Homo sapiens
ctaaactctccggagcaaaccctccttaacaccagatccgactggcatgagtctcctgccaggtaagagccctaccaaagagggaaatgctatttgggcaactccccttcatattccagtggccagaccacgtcatccccttctgactgccaccaaaagaaatcacatgccgtgtagcctcacagaaggcacaaaggccttgagattcatc

SEQ ID NO: 151934 - DNA, 194 bp, Homo sapiens
atgacagaagggatctcattataggtcttacagactttaagaagaaaataagtgggtattatcaaccattttatgctaatgaattttccagttcagaggaaatagacaatttctaagatacaatttaacaaaactgatatgtaaagaatctgaaaattcctataatctactagaggaatcacatttttaataat

SEQ ID NO: 151935 - DNA, 579 bp, Homo sapiens
ggccaacccccaggctctcatcgtggctgctgccccagcatccgtggcagcccatcgctacagcattggtggggacatctgcaggctctgccggcctggagccctgccctgcagctggtgaggcacccccacaaggtgccagagaccacctggtccaaccatcacttcccacacaaacaaaccaagatgcaggtgtttagttaggcatcaactagcttgggttagtatccgttgcctccggcagctcttcctttcctggtctgaggggctccagtgagggctccaaacagcccagagtcttattgcttgtatttgaaaacaaatgcacaaagccgcgggaagggcaaagccctcccagcactggctgtgcctagtccctgcaatctgacctcactgctccaatgccattagctccagaacaactcctcttctccagcagcaaggacttcaggactcccgggcagacccacgcagggcagcacccctgcagatccaagcctcatgcactctcttccacacctgggcccctgaggctcctccacggactgctgcatttcctatttcttccaagacaaaatg

SEQ ID NO: 151936 - DNA, 243 bp, Homo sapiens
ctcacgcccacctcaggagcttgcactgtgttcccttgcctggaattcttctccaccagatgacaagatccctcactctcttccacccttagctcttttgcgcaggtgtctccgtccccatgaggcatccctgaccgcctatcaaatcttaccacttcctgctcgctcccctgacatttcctctgcatttctctgccttgttttctacccagcacttgatactgacttgaatactgcatgttt

SEQ ID NO: 151937 - DNA, 569 bp, Homo sapiens
ctcaaatattagaggctactttttgaaaaaatgaacccggccaggcgcagtggctcatgcctgtaatcccagcacttggggaggctgaggtgggtggatcacaaggtcaggagttggagaccagctgggtcttgaactcctaggctcaagcaatctgctgcttcggcctcccaaagtactgggattacaggtgtgagctactgcccccagccaaaaggccataatttttaaatcctgaaattttaattgctggggacaaatttcagagctaccttattttttggtttctttggacttatttcactatagctcagaggtttaaaattatacttgaatttttttgttatcccagtagtaatttgagatcttcaaaaaaggatatttctcctacttttattgatttggaccagagcttaggttggaacagagaaggaaagatggataatgaactgaactgaaaattccaagatcaccataaacctaaatcacatcttagaaatctgggagacactactgcttcttagggcatgcttggttttcttgttgacaacttttcccccctcatgcct

SEQ ID NO: 151938 - DNA, 805 bp, Homo sapiens
tcctcgcctcccgccgctccatctgcatgcaccccacaagtgtcaggtgaggacacagcgttcccccctctggagatgctgcaataaggcgccattttggaagcagagagcagccctcaccagacaactgagcctgctggcactttgttcttggacttccggccttcagaggttcctcagctgctggattgcactctcaaggcacgactttactccctcactctacagctcaaacaccttcagtggctcccactgcccacagaaccaagtacaaactccttggtaaggtcatcagatggtcttactccttggtaagatcagatggtctctctgaacaacaggcagtgtaccctttagattctcctcccattatcccagcctggagtccatgcgcaagcagagaggacaggcaggcagtgctgaatgcactaagcccagtcagcacatgcccttccactgaaatgatctatcactctcattttgaatgtggcctcctatatgaaatctcattctcccaggccttttctctatttctgcatctctgactctcctttcagtgttcatcataagagtctccatgggaaggctaattgagtttcaacccctttccccaagatgcctaaactcatgcccctttctcctgactggacaacatcaagcctccagagagaataatctgccaaatggaggcactggtaagcaagacccagcatcccgtgtgaaagggtagacacaagcccagagaaacaagggttttagaagaaaagtagctagttatcctaaaatttatcatcattcaatggcc

SEQ ID NO: 151939 - DNA, 204 bp, Homo sapiens
tcctcgcctcccgccgctccatctgcatgcaccccacaagtgtcaggtgaggacacagcgttcccccctctggagatgctgcaataaggcgccattttggaagcagagagcagccctcaccagacaactgagcctgctggcactttgttcttggacttccggccttcagaggtgtgagaaataaatttctattgttgataagtt

SEQ ID NO: 151940 - DNA, 310 bp, Homo sapiens
gatggctagaccagctttgggccttctcaggggagacagggagagagtgagggaaataaagcacccttcctttccaaaaaagcaggatccagctgccctctgacaagggattgtgtggggtggggtggggggacccgctgaggcccttgaggtggatgggaggtgccacagtgagacctgggtctgacaccaccaacttgcctcagtttacccatctggaaccaaaggggacaggtgatgtacccataatgtgcttgctcaaagtctgtggttggacgtgagcaccatgggcaggccagagggcatttat

SEQ ID NO: 151941 - DNA, 362 bp, Homo sapiens
acagtgaaccatggttgcgccactgcactccaacctaggcaacagagcatgcccatgtctcaaaaaaccagaaaacagaaaaggaaactgaacaatatagatgacagttatggcctatataaggaagaagcaaaactctaaaatctagaatttgctctatgtcattaagttagagaatgactatatacttcctatatatgttttaagttaaagtatttgaagagagagacaggtgtatgtgtgtgtttctctcctttaacaaacttatttaaatgttcaactataaatcctcattgtgtttattaaagagtggttctactctatttaaagatattgatgatttttgggaagtaacctcttgg

SEQ ID NO: 151942 - DNA, 630 bp, Homo sapiens
cagtcgcaggtggcatgatttgatttgtgtgaaggcaatgaaatgatacacagatacaccgaagcctcccaaaagaatcctggttccaagattcaagaagatggattaatgtttttccattaattgttggaatttatgccatttttttactatgtgccatcaattttaaagcacttctgaaaagagataacaatctacaatagctggcattttaaattcataaaaatatagtattttcttctatttttatacatttatgatgcattatttcttatttcccaggaattttactacctttgttttgaatgattaaaaaggaaacatagcaccttttttcaacacatcaccaagatagcctagttaatattcttctctttctgaagtagttgaattgggatagacagcttgccaggcctgctgccacttgtcagcatcgcatccctacattcaaccacacttgcatctaacgaccgtctctttcattaaatttcttttgcaccttttcttcctgaatgagtgcatgatagttaattttcctgtgcacttgcatgtctcaagaaggttttaattctttttgtattgcattaatatttaagttaagtttataattgcaaaatgatttatactcac

SEQ ID NO: 151943 - DNA, 689 bp, Homo sapiens
taaaatactttgtgaagtatagattatagatcatactattacctaagtattcacttataattagtatctattcttgttagtttcctgttgcttaggtaaccagttaccacaaatctagtagcttaaaacaacatgtatttattattttacagttctagaggtcagaaaaccaaaatccacccaactgggctaaagttaaggtgtcagcagggctgactccttctgtaggctcttgggggaatccaccttcttgacttttctggctttttttttttttaaattatactttaagttctagggtacatgtgcacaacgtgcgggtttgttacatatgtatacatgtgccatgttggtttgctgcacccattaactcgtcatttacattaggtatttctcctaatgttatccctccctcttccccccactccacgacagaccctggtgtgtgatgttccctgccctgtgtccaggtgttctcatggttcagttcccacctatgagtgagaacatgcggtatttggttttctgtccttgtgaactgtcaccttttccggcttttaaaggccatcctcagtccttggatcacagccatgcatcatgttgccttttctctctccttcatcttttgtcacattgccttctctttgacctttgcttctttcttataaggatccttatgattgtatcaa

SEQ ID NO: 151944 - DNA, 156 bp, Homo sapiens
ctcatcaggtgggcactatgtgttgcgcgtgtaacaaattcccaaactctcagaaggtgggacgccagaaattttcatattttttccataaagagtttaggcaccgagctactcttacataggtcattgggctccttccccaaatccgtttcccag

SEQ ID NO: 151945 - DNA, 115 bp, Homo sapiens
agtctgggaagtcaaggttgcagtgggccactgtaggtcgtgttaagaattttcattttcttaacagcaatgagcagccatagaagggttttaaggaagtggaagacatgttcag

SEQ ID NO: 151946 - DNA, 183 bp, Homo sapiens
agcagtgactcccaaatgcttcatgcctacagccaccactgagccaaatggtgggtcgctggatgcatgttcccatagggacaagggcacaaagtgatgaggaaactagtccagtccacaagcccctaaagatgacatgattatgttttgtgggttaagaagttacataacacacaggccggg

SEQ ID NO: 151947 - DNA, 615 bp, Homo sapiens
caccatcttctcagctctcactttgtacagtgacgatatcacgctaaaatgtctaatgaagaagtctgtggctgagactccattcctaagtcttccacaaagatcagaagaataactctagaagaaggccaccttgtccatactattcagctccagctcagtaataaagtggttctactcaggcaggagagtgaagacgtgagaactcttggcccctttctcctcaggctgggtgacttaaattattctgtcttcaagtttactgattcttctgtcagctcaaatctgctgttgaagtcctctagtaaatttttcttttcagttattgcactttcgagctcaataatttatggctggtaccttatcatttctgtctttttattgatatccgcgttttgttttttcttgcttccttttgttatttgtccaagttttattttagttctctgagcatatttaagacagttattttaaagtatttgcctagtaaatccagtgtctggacttcttcagagatagatgttttggtttttttaataagccttttgattttttggttgttgaaactaggcatttgaatattttaatgtagtaactgaaatcagagttttctcc

SEQ ID NO: 151948 - DNA, 267 bp, Homo sapiens
caagccccacatggagaaagcgacccctgtgaggcccccactggggttcagaaagcaataccccaaagtctggcactttgatatgcggagaggacttagaagctgcccaagaatcaaggtccctgtaaccttaccttgtcctcttccccctacctacatcaagtgcagagaagagctctctgaaatttccttatctggccaataaagcttctttccaaaggatatgaaattgttttaagacctcctgcctagggatcccatcaagta

SEQ ID NO: 151949 - DNA, 466 bp, Homo sapiens
tgaggaggagacactgaggcaggcaaggcattctgcaagcttttgcagagttttcatggacacattctgattcccactgtgtccaggtgggagttctgtacacatcacagatggaaaaaagaaactctctgtggatttggcagcaccctggattggatgtttgaagaaagctattgcatctgccccgtatcttctgtgaatcgggtacctttatgcttctgggaggtcaagaagaacccagaaccctccagtgacttccctttgggtcttggcattatgagaagatggttaacctcctttatagaactctccttcacatccaatccttcagaaagcctaattgatcccatcttcttaacccaacccctcccctggacatcgttcctaagccccatctctcttatttcgctttctcatggttctagaggccagaagtgtgaaatcaaagtgtccgtggagccacgta

SEQ ID NO: 151950 - DNA, 283 bp, Homo sapiens
actaccaaatgttctcagagaacagtgtcaatgccacagcattccactgacaagctgatgagtgaccttcaactaaatatcaagtatggggaactgatgaaagaaaaccattgcttcaaacttagtggtttcaaggttgtaatgaacattatgaaattcaatcttgagagtttcagaagccaaaggctaaaaaagcagagctcataaagactgtaattccaagtcaaagtttagaaaaagtatgattgtggaagatgaaatttcaactgatctctaatttctg

SEQ ID NO: 151951 - DNA, 136 bp, Homo sapiens
tgccaggtcatgttccaggtaccagaaacaatagcagtaaacaaaacaaagaccttgctctcacagaacttacatactagtaggagaagaaagaaaagaaatataaacaggtaaatacatagcttgtcacataaat

SEQ ID NO: 151952 - DNA, 108 bp, Homo sapiens
agttgttagtggtgctggtgttgatggtggtgctggtagaatcgatgggtgccatattggggttgacagagttggttgctggtgggattggagagtttggtggtggtg

SEQ ID NO: 151953 - DNA, 211 bp, Homo sapiens
aagtagagaagctctgcctctgtcatttagtagattgtgctttttgggtgagatttcatttgagtgagggggatctctgactttacaaatagctgtcattcacttgctccatctaagggcccgcttctcacccggcaccacctatgagcctgcctcattcccccttgctgagcctgagaagaaatctactcagctgtgctacctcaggtca

SEQ ID NO: 151954 - DNA, 144 bp, Homo sapiens
actcacagttccgtgtggctggggaggcctcataatcatggcaggaggcaaggaggagcaagtcacatcttacatggatgacagcaggcaaagaaagagcagcaagtacacaggccctgagtagggagtggcctggctggtgag

SEQ ID NO: 151955 - DNA, 157 bp, Homo sapiens
aatcttgtttcatctatatatacccccacccagattattttaaggctaattcccaaagccaataaatttttcccataaatatttatgtatttatgtctaaaagaaaagaatcctttaaaaagtatatctgcaatgccattatcacacctaaaagaaa

SEQ ID NO: 151956 - DNA, 254 bp, Homo sapiens
atgcagttaggtccggtgttaccaagtcagcccagaaggcagcgagaccatatggatgtgagccctggaaagcagtaggcacatccgggctcaggtaggggctggcctggcgtctgctttgtggggaggaggggttctgttgagaggccccattgttgacatgttttctcatccagacgctggacacccgggtttttgcagcctcttcttacctgttgatagtcaattaaagatggaatcagtgcgtggctggc

SEQ ID NO: 151957 - DNA, 294 bp, Homo sapiens
gtctcttaataaatagcctcctgaggcagaacagtgaactgggtgactttgtgaacagggtttctgagtgtgggcacatcagtctcaagccccgttttggctcttaggaaccaccctattaacaagcgagttcctgctgggtttcgctcatgcctctgttgcccgtgggattaaaatgaaaatttagcctggaacgtgctctgcctcgcagttcagcccgcagagctctagtgacttttctgcttaatggttgggttagttcaggaaactacaaagtctgtgttgttaatttaa

SEQ ID NO: 151958 - DNA, 390 bp, Homo sapiens
aggcatgaactggaaatgcaaaagctggaagtgcccaagagagaggtgtaggtgcccagggagatcttggctcctggtgctgagaggatggtgaccaagggccctcgacctccctggctctgcagtagcccgtgtcctcctgccatgatcaatcaatccagaactcaatgagaggtgggccacgtgcccctgaaatatgatgagtgagggctctggaggggaacttgcaggaacagtgaaggatactaaggatctccagtcagaggtgcaggcagttggtgtgaccccccgacccatggcggggggatgctgctggggcacagaacatcctgctggctcaaggccatggatgctcatccctgctcctctggctacaatttggggccatgt

SEQ ID NO: 151959 - DNA, 346 bp, Homo sapiens
caccgtcttcagtgctttactgtgaatgaggtgctactactgttgtcatttcgtagataaggaaactgaggcatagagaactgaggtcacttgcccaaggctgcaccatggtaagggatgtggcagggattccacccctggaagccagagtctgcctgcccacttcacctctgctacactgtgtgtcctccctctgcccgtcctgccacccctgcctcccagtctccaccctgagctgttgggatgctcatttgaggccatgactatgatgctgttgtaggaacagctgctcccttgactgctgagggtcgtgacagtggcctcacaacctctccctttctggcaa

SEQ ID NO: 151960 - DNA, 203 bp, Homo sapiens
tggaatgtgctggtgcttcaaagtgtgccatgtcagactctctccagttggtggccagtggagagacgttaggaagggcctggggcctgggtgggatagccaggaagagtttcttggtgttctctatcttcccctccctggtggggtcttcccttccacccagctgcagagatctggacaggcacagtttggaagcagtcact

SEQ ID NO: 151961 - DNA, 255 bp, Homo sapiens
gaacccaggaggcggaggttatggtgagccgagatcacaccatcgcactccaccctggatgacaggagcgaaactccgtctcaaaaaaaagaaaaaaaaaaaaatacacacacacacacatatatacaggtagcacatcaaacacatgattttataggttttaattgcttataagtttcccttatacataaatttcttgaagctaaaaaaaaaacaggaagaagccgagcataacctatgcctacagtttcagct

SEQ ID NO: 151962 - DNA, 378 bp, Homo sapiens
tgttatctggaagttggcccacaaagtaaagaaaattgtgctctgcctctaattcttacttcacacagcattcaatacaggatcttgcacacactgtagtatcaattcaacctatgcctgtggattgaattaagttcatgaagggaactaagcgaacgttattgcctgtagaatttagacatgctctctttgggaagaggattttctagatctacttctataaggccctctgctagacactgtgggctgtggggactgcctactctgccttgctaatagaacactgcttttttttaagtctcgttctgtcacccaggctggagtgcagtggcgctatctcggctcactgcaacctctgccttctggagaactttgctt

SEQ ID NO: 151963 - DNA, 345 bp, Homo sapiens
aactccctcccttctctctctttccctttccctattttggaccctcattgaagagtgtctaagcacagagacaattgcaggtttctggccacgactatactctgggactgaatggtgggactgaagggtccccatgtggaagcaactgattgctgctgcctggttcgggtgagtgacctgaatccttttctcttttcagtctttcagtggccatttactagtatctctttgacaattgagggtaactggccagggccactctccggagttgtctgaaggccaaaaagtgaacaaggatagccgctctgcccagaacgagggaaggctctctcctctcttttctgg

SEQ ID NO: 151964 - DNA, 321 bp, Homo sapiens
ctactactcattatttttactactgtagatccatggacacattagatccattggggatgagcgattctccttttatatatttacttccagtgaatatggtactgattttctgtttcctgctaaaatatacatttatggtgaatcccttgaaagccactttgagatgatcataattcttattcaaataagaattgaggtgtgtttgtgagagaattgggatagaaatgggggttaatgcattcattttggaatagcacatgtaagtgttcatctctttggaggaaaagtgaagctgaaacaaattttcatgggaataatgga

SEQ ID NO: 151965 - DNA, 121 bp, Homo sapiens
ggaaacaggtaattttgaaatttttggaggatctgtggttaatatctgaaccttatttacaatttctacttatttataaatttgattaaaaattagcatatcttaattaaatgttgtttat

SEQ ID NO: 151966 - DNA, 319 bp, Homo sapiens
tagctgggactacatgcgcccgccaccacgcctggctaattttttgtattggtagagacggggtttcaccgttctgtgggtattttaaagtaaactctaggacatttttaagtagttggatttttaaaaattgtcccacatactaagttacattttttacacagttgcagcacagtacttacctttgatcctcgtttgagcctctggctttctttagcctgcttaagctctgtcctctctctctttactcttctattcaaagagtagtatgtattttgtaaagattttgtaatcttgcctactaataaagtttacattc

SEQ ID NO: 151967 - DNA, 270 bp, Homo sapiens
gagtattgaaatactcctaccttcacaaaacaatcagatttatggttacttttaaattgatgagacttgtgggcatgtggtgagataaatttatgaccagcatgaatttcacttttaagctagcaacttaagatcaactagtgaaaagaacttggcttggccctaagcaagagaagcagagaatctcagtttcccttttgtacattcccacttgcccatggtgccacgatcacctcacccaaagctgggtctctatcttgtatctcattc

SEQ ID NO: 151968 - DNA, 313 bp, Homo sapiens
ggacgccaggggacagggtcagaaagaggcagccacaagctgagcacagctgcagaggttttagcttgcttactacatttgaattaattgccaaacttttaaactcaggggaattccacaaaaatctaggtaccagcttttcttgaagacaacggaagctcaggccaccctgaggccatcacctctggcagtcacctgccaagcacgtggctccagcttagcccgagcgcctccacctgccccgtcaaggcccagatgcagtggcccttacccatcacacttgcgctgttctgaccacagactcacagtcatg

SEQ ID NO: 151969 - DNA, 285 bp, Homo sapiens
ttttgtatttttagtagagatggggtttcgccatgttagccaggccgatcttgagctcctgacctcaggtgatccgcccgcctcggcctctcaaagtgctgggatacaggtgtgaggcactgtgcccggccaaggcctgcttttcttcaagctttttcacttttccaggctctggcatctgctttgaggttcaccctaagtgtcatttaaggggagaaggaaaggagagagagaaagagagagaaaaaaaagcataaggcctgcaggcaatttttgctactctga

SEQ ID NO: 151970 - DNA, 138 bp, Homo sapiens
gagagagacgaatatccgattcagtaaatacgaaccttcagcggacgcctgaggagagcaaggtgcgttggcccggcaaaggctctgagaaggtctgcattgagagcttgtgaggcattgcttaacctgatgtctctg

SEQ ID NO: 151971 - DNA, 303 bp, Homo sapiens
aggtctccatgacaactgccaacgtgtcctgggaaccaggctatgatggaggctacgagcagacattctcagtttggatgaagcgggcacagtttgggccccatgactggctgtccttgccagtgccgccaggacccagctggctgctggtggacaccctggagcctgagacagcgtaccagttcagcgtcctggcccagaacaagctgggaaccagcgccttcagtgaggtggtcactgtgaacactttagcattccctattacaactccagaaatgctggtgctggtctcccccacgaggt

SEQ ID NO: 151972 - DNA, 337 bp, Homo sapiens
cccagggctgatgccgtgaaggatgagggcatcccggcacttgtgagaggttaaaatgcttcatgtggagagcggaagtacccaggacgaaaggatgcactgtcatcctgctagaaggacggcagcatgggtgccggcctgttgaggcatccgctctgcaggcccctctgctttccacagactgacccaggctgcccagctgttcgggctgtctcccagggatctgaaagaggctttgtgtgaggggtgggctcacagcttcctttccagctcagtcagacaggccaaggctgtgagtcgcacatctttcaccagggttgagagcatcagccaaaat

SEQ ID NO: 151973 - DNA, 361 bp, Homo sapiens
cagggtgtggtggggacaaggaaggtgtgattatgagcttgcagaagtcaaggaggagggacatgggagcctcactttgaagaatcactaacagtaataataatagctaacattcattgagggtttaccgcctgcctaattctgtcctaagtgctttatgttcattcattccattagtcattcagccagtatttattaagcacctacattgtactagtttttttgtttgtttcttttgttttgtttttgttgttgttttttgttgttgttgttgttttctgagacagagtctcgctctgtctcccaggctgaagtgcagtggcatgatcccggctcacggcaacctccgcctctgcctcct

SEQ ID NO: 151974 - DNA, 362 bp, Homo sapiens
tgcaggaacctggatctaaactctagccaggcctggctcattttatacccacatatttctacctccttaggtagtagcatctttgagagggccacagaaaaagcacaagccctcacagaaagaaccagacagctgattgtctaccactagggcaatttgtaaggattgtctgccaaagaagtcctgggaagtccaggaacctccacacatacctgcagagacagaggtcactgttaccatatctggatgtcaaaaaggtcttttggaaaccaaggttttatcctttttttgttcttcccctcatctcctcacccccaacaccaagggttaaattcaacatcagtagctgtggcacaagtcct

SEQ ID NO: 151975 - DNA, 112 bp, Homo sapiens
tccctcaaattcctctcctcactgaatcttacttatatccaattcatctgcattcacgctcattaaagtgctctctcttctgtttaaggttaattcatctacttgagccagt

SEQ ID NO: 151976 - DNA, 287 bp, Homo sapiens
agtaaaagtccatatggtgggctgagatgaatcagctcaaggcaaactgccctgggatttttgtgttcttttaaaacattaactggaatcacgtttcatttcacccgttttgaggcttgtaagctactcatttgactattctcaatgaaacttcccttcctgttttcctgttttattgctattgttaattgcttaaaattctgctgacactaaggaaatagctgttcatatatacccaagagaatcctgctatttcaggcccaggagtcctacagtgaggacttgtc

SEQ ID NO: 151977 - DNA, 325 bp, Homo sapiens
aaatttagaaaaagaataattttaacagcttaaatttttcctgaagagtttaaatttaaccgcctgggttggtcaaattttgtttgtttgtttctttgtaattgtagaattcaatagctatgatttaaaatggacatttttttctcctgtgtttaaaacagtgtttctcaaattatgagccatgaactttggagttaaacagggcaggcttgagagagtaagagaaactaaagctaaattgaccaatatcctccttatttggtttcttcaatttctagtcacttctcattaggaaatcacagggctattgtttaaataaaaccaa

SEQ ID NO: 151978 - DNA, 500 bp, Homo sapiens
cccgagtagctgggactacagttgcccaccaccacacctggctaattttttgtatttttagtagagacggggtttcatcatgttagccaggatggtctcgatctcctgacctcgtgatccgcccgcctctgcctcccaaagtgctgggattacaggcgtgagccactgtgcccggccaatgccatgtaatgattagcttatagaatgtgacagaaagtttgaaatgatagaatgatatggtatttaaagagttctaaaaattgtttgaatttagtagactatctagtcctccttagatgaaaagtcagattcagtgtcattttactaaagtccatactttatcctcctagaggagttcctgggtgcaaaattgtgtgagtatatgtactcttacgtgcatttgggagtgggggtggataggttctatagatttttttttcaaaaggttccttgatccacacctcatgatttgaagatattttgctgttgtgataagtgat

SEQ ID NO: 151979 - DNA, 402 bp, Homo sapiens
tcctgcaaaagtctatagaccaaatgttaaaaaaagactcctttttaaaaacattaaaaatatttctatgatcaatagtgcaaacaatgactcctttcaaaacattagtttttaaaattcacgtctttattgtagacaccatttcccattccatgcccttaaatatactgtttatattaatcttggctgccccactctttgagtagttagcaaattctacccgtttctgtgtactatgtacagccagcacctggttgtaatacaagacttagtttctgctctacagcggtttactattgagtagaggagataatgcagtaaacaagaagtgaaatcttatgtggtaggtgttctaataaaggtatggaagggttttgtaaaataagtaattcttaagagaat

SEQ ID NO: 151980 - DNA, 383 bp, Homo sapiens
gtcagagtttcatgctgctgataagacatcccaacactgagcaatttacaaaagaaagaggtttatggacttacaattccacatgctgggaggcctcacaagcatggtggctcatgcctgtaatcccagcttctcaggaggctgaggctggaggattgcttgagaccaagagtttgaggtcatagtgagctatgattgtgccactgcactccagcctgagcgacagagcagaaccccatctctacaaaagaaaacagggctggaaaggtgcattggcatcacattgtaagggttgttgtgtcatgctaaagaatctggactttaagactggcaatgaggaaccagaagatcggcttcacagtcaatccacttaggctaaaata

SEQ ID NO: 151981 - DNA, 300 bp, Homo sapiens
ctccccagaacaatactcaaataaatacttgagtgttggctgtgtatgaatgcaccactgctgccttcctgatctcccatcatacagattttatccctttaaatctgcttcacatcaaaacaccagtcaggtggtcaattcctttactgttagttctcaaaactgacttcttaattattttaatcatgaataccaacttgaagaattggagcatttcaaacgtcttccttcactgcatctgtaaataagtccttaatctgttccataccatgagtctcctttcctcctcttccttgacat

SEQ ID NO: 151982 - DNA, 258 bp, Homo sapiens
  misc_feature (235)..(235): n is a, c, g, or t
aaaaaggttattcaatcatttgttcattcagtcaacaaatatttactaagtatatgctatatgcaccagtcagtattctagcactgaggatttagccattaacaaaaacccctgctcttatggaactaacagggagtgggggtgcaaggtgaaaggcctgaccaataaatatgccagatggtgataaatgctgtaatgaaaaatagagaaaggggttgcagtgtgtggtgggggnagggattgctatttttaaataga

SEQ ID NO: 151983 - DNA, 287 bp, Homo sapiens
tcacaatgtatcaggcaatcaaatagccaataacctattctcctgctaaattccataaactggatggggagggtagataatgttcatttttgttacttaccagggaacatgacacttggtctttgaaattgttatttatttcatatattgtagctgccaatcagtcagtgatttgcaaatagcaaagtaaatacactgctgaaaatgagtttcttctttgtgctgatctgtgatgtgcgggaaatcagatgtaatatggttgcatttatttatgtaggcatctattc

SEQ ID NO: 151984 - DNA, 474 bp, Homo sapiens
ccattatcactgtaatctagtaaacagtcttttaatgaggagcacggccagacattagatatctgctgataagatacacattgcctcctttgatatattgagacaaaactgtttaccaccttttaaaatattgccatattatttgataagcccataggacgagatcactggggtggccactaaagcactgggtttgtacacaaaaaccaactgcaaaactggattagatatgttaactcactgaactcaatacctgcctttaggatggttcctgttatctcctaggatcactgtggcccattcatcccccttgtcagaaaaagagacctttagataacttaattcaaagaggagagaaactggacctgagtttgtgtcaaaaaacttcagtcaggctgggtgcagtggctcacgcctgtaatcccagcactttgggaaaccagtgggcagatcatgaagtcaggagttcaagac

SEQ ID NO: 151985 - DNA, 562 bp, Homo sapiens
ggaaaatatacttcaaaaaattcttactagtcttaggtaagggaaaatattgttttcattgagggggatgaaaagggggtgtgtgcaggagaacaaacaggatgctctaaaaaaaattaaattcggtagattaaagtacgatagcagaaataaataattcaataaaaagattaaaattaaatttgaagaaatctctcaaaaaataaacaaaaaggacaaaaacagaaaattagaaaaactgtgccccggaggtctaacatatcaataatagagccccaaaaagaaagaataaaaggaaaaaagaaaattcaggaaataattccaaaaatattcccagaaaagaaggctatgacttggtagtttgaagggtcctacaacagatatgtaattctagaaataaggcaacagaacaatgttttcaaaattctgaaggaaaattatttccaacctaaaattatatatccagtcaagcgatctattaggaggctagaataaaggtattttctgatacgcaaagtctccaaagaaaattatctcccaaataactttcctgaagaaaaat

SEQ ID NO: 151986 - DNA, 332 bp, Homo sapiens
atatataaagaactctcaaagctcaacagtaagaaaataagtattccaacaaaataatgggcaaaatatttgaacagatatttttatcaaagaagatatatgaacagggaaataagcacatgaaagatgctgcaaactattaatcattaggaaaataaaaagtaaaacataaaataccagtatatgcccactaaagtgactaaaattaaaagatcagctataccaagtgctgtcaaggatatggagcaatcagtaccctcagacattgttgttgcaaatataaaatggtacaaccattttggagtatcatttgacagttttttttttttctt

SEQ ID NO: 151987 - DNA, 369 bp, Homo sapiens
acctatgccagctggggccaagggaattggagcaggatgtatgtaggcattttgtgaggatgtaagcaaactaagaaaatgtcagatatgtccagctactagtctaaagtgttgaccccagtgtggggggcagagagggagcatgtaagttgtcctcatctctagagcagcttcacagaaatccagaggttcttttagctctgacactctctaactctgggaatcactaagtcaatggagttcagagggtcatagttgagcaaagcctcaggaaacagccttttcaaaggacacgcacaagtccccaacacagaactgaaggctgctgtctctctttctggcaatgggtatttgtccctggagtatgcg

SEQ ID NO: 151988 - DNA, 502 bp, Homo sapiens
gcattggaaggctgaggcaggaggattgctggagcctgtgattgagacactgtactccagtctgggccacagagtgagatcctgtctcaaagcaacaacaaagtggagatgatgggtatatagttggttgtaaagcaactctagtttgctgtagtgtgaacttaattgatttcttcatgctaaaatgtgaaattttacatttttatttttctgtttctacacattttctaccatgatttttgtcatcacttgcattaacttctttcccagattttaaatatattgcctcaaaaattatgagcaaaattgtttaaaatttatatcaatgtattctggcacgaattgtatcttttagagcactttttttttctgtaacaaatacaatgctttaaaaataaattttcatgtgaaagcatatgttgatgtctaaaagtcagctagcactaaaagatttatgatgaaagaaataatgttccctattttctcccatccccttgctttc

SEQ ID NO: 151989 - DNA, 273 bp, Homo sapiens
gcagcagaaaaggagatgacttcagttgtggcagagtttggcactggcttggtaggcagcttggagctggaagaagagcagccagaactgaagatgtgtggctttatattcaggagtcctctaaataaagataatagctgcagctgcaggaatggatgagctcatcagattaaagtgtgcaccgagagaagagggtcaaaggtagaacactgggaaacacctacttttatttagggtggcaggagggcaaagagccagagaaggagctgtctg

SEQ ID NO: 151990 - DNA, 321 bp, Homo sapiens
ggggaggggaattacttagggccacacaatttgtatgtgaccagccagatctgctaagtccatgctctttgaaaagtggttcaataaattatttctaaatttgacaatgccgagtccacgtatttgtatactttttcattatttcacatactcctgagggaaggtaaggctgatagaaaatcaccaattttggttgattttattcagtaataccagaggggataatttagacttaagaacattgtctgttatgagtagtagtgttctgagttttaatttccttgctttgggactttgccatagagactagaagatgtcata

SEQ ID NO: 151991 - DNA, 342 bp, Homo sapiens
tatgccctccagtcagcccatcagtgctctcctcctgcacataagatattcatttactgaagcttgtgatgagagtagcaggcccagtggtctccaaaatgacttcagggttattctttccttgtcttggtgaacagcacctggcttctgcccatccataccaatctccttataacatgtgaacattcatttagccatacccttggtgctctctcccaaacacactttttcattgtttaaaacatggccagggtgacaattttccaaatctttaaaagttctgctcctcttttgattataaattccatctttaatttgtttctttttgcattttactataag

SEQ ID NO: 151992 - DNA, 391 bp, Homo sapiens
aggatccccatcagggtcctggagaaggggaatcagaactgaagaaagttaagacaggagctatcatgaaatggtcgagaggccttgggggttgagagccagtatgaaactttgttcaacgaagtctcatctaatagggttctttcctactggaattacaatgctttattgattcaatatatcttttcaaaaggataaaaatccataaaatagacgtctgacaaactgaggggatatagctttaaataaataaaaacaaaacacagaatatacaacccaaagaggttggggactggcagcggggagagagcacctaaggcagttaagctttgcaaaggtggtgctcacaacactactgggtgtggcaggggtcatgctccccattttgcag

SEQ ID NO: 151993 - DNA, 277 bp, Homo sapiens
ggtgatgtgtcttcaggagtcccaatctatcttttcctggtcctgggtttcagaaccgcctggggctgaaccaaaatgcccacagctcccatctctcctggcctactgaatatcagcccctgtgtcagtcctcccagaggatagcctgaggcagggtgtgggatctcccaaaggagcaactgaatttcccaaatgggaggagactcctggtacactcttcatctagatagccaaccccttgggatgctcagtttttctcccccagtcccagcttcca

SEQ ID NO: 151994 - DNA, 208 bp, Homo sapiens
ttacctgaccaccccagatggggtcatttctgttactttctctcccttttggatccatttatcacgagttctgttttgtttgattacttttttggggctgtgttcaataaaatgtaagccttatgaggcaagaactgtgtctagcttgtttactacgacagtgtgtcatcagtgcttatgagtagtacttagtaggtggtgaataaat

SEQ ID NO: 151995 - DNA, 225 bp, Homo sapiens
taggagatgggtgtgtggagggcagtgctattttccacagggtagccagggaaggcatttgaacagaaacatgaagtgagagagccagccttaagaagatttgtaggaagatggtccaggcagggggaaaaaaaaaaaaaaagaaaaaaaaaaagcaataactgtaaaacgtgaggcaggaaggaatttggtggtccaaggatttttttttttaagtttgtatgg

SEQ ID NO: 151996 - DNA, 610 bp, Homo sapiens
agaattacaaaactgtgacacagagacataaagtgagcacatgctattggaaaaatgccgccgataggcttgctcaatgcaggataacaacaaaactttaatttgtaataaatgcagtatctgcaaagcacattaaagcaaagtatagtcaaacaaggtaaagcctgtatctgaattgttctccattgtttgtcttcaatcaatagcctgtgtgcatgtctttttgtatttttgtcaatgagtctttagaataaatttctagcagtggttactggaccaaaaattacatgcatgtttaatgttagctgatgtcgtcaaattcccatccatagggactgtggtattatgcattactgtagcagtttatgagtgtatatcctccctcacaagcttgccaactgagtgttctcaggctcttggatttgtgccaatctgataggtgaacaatagtatcacaatgtaattcttaatgtcattcatgattttatgacttatgaatgaagttgaacatctttttatatggttaaaaatcattttcatttctttctgtgagtaagtttataaaactgtatttattattttaaatgtctcactatttcagtagctggga

SEQ ID NO: 151997 - DNA, 395 bp, Homo sapiens
ttttctttccaagggcatgtctccacaaaactgttacctcgcagcaggtaactggtgtgaagccacaaacagcataaaacccaagcttctatggacatccatgcagtaaaagcctggtggaaccctggttctctttaacatgaagcaacactcgaagaaccagcaaagaagtaactggtttagatggcaggaagctcatgtttattccacatgcagcagcagcctggttccttccagaggcagaaaatggagcatgaaggaagagtcactaccgttgtgaggctgcagtttggaggacagctgcaggctcacgaggctccctttcttctcagcgtagcctttttttttgccttctgattctgccttgggcagcactctgggacaacagctagctt

SEQ ID NO: 151998 - DNA, 531 bp, Homo sapiens
ggtccagtgggcagatccctcatgaacagataaatattgtcttgtgggagtggatgacttctgtcttgcaggactggatgaattaccacaagaatgagttgttgtgaagcttctcctcatgttttgctgtgtttgcacgctgtctcttgacatttttcttctttgctatgttgtaaggcagcacataaccctctgcaagctgagcagatgccagtgccatgctcttggattttctagccactagagttgtgagccaaataacattttttttctttataaattacccagatcaggtattctgttagagcaacactaaagggactaagacactcttattctcaccaaatctttattttggtaatgatttctcacacctattcatttgctccagaaaaggtagttattctccatagtctatcttcatcttccacttcatgcttattcaatccattaccaattcctgtcaatatatcttcctaaatatctctttcaaccaccaacttttctatcctcactattactatcctttta

SEQ ID NO: 151999 - DNA, 428 bp, Homo sapiens
  misc_feature (150)..(150): n is a, c, g, or t
  misc_feature (275)..(275): n is a, c, g, or t
  misc_feature (390)..(390): n is a, c, g, or t
  misc_feature (419)..(419): n is a, c, g, or t
tgcattctttggcatggctagttgtgtcccaggatctgcattccagaacttccattctgacacaagatagagtgttgcctagcaaatgtatacacaaagtcccgctgttctagaaatttcacctggcttgatattctgtcaatccctggnctcaaattccagctccatcttatcaaacaataacagaattccctaatcagtactaagctccgcatgcagtctcttttccagaacattctttgcctaatgttccttagtgtggctctctctttagntggggcctccttccttagtacatgcataccttactattctgtggaattgcaagccatgcatcttttagagccacactagtcaaattgattggcatttccatttattttccattgntcccttgtttctcctggacttcctctcgnttctctttt

SEQ ID NO: 152000 - DNA, 185 bp, Homo sapiens
gtgaggccttctgccctggccttggggagaaggagtgcatgtgtgaggctgggatacagtggccctggagtggggctagggctcatcgccagcaccaggcgcggggaggatttaaaaccagagtcctgtctctgagccaccccacagggacgcttgatccaagcctgttaaggccgtggaactcg

SEQ ID NO: 152001 - DNA, 472 bp, Homo sapiens
agatacttgctcctgcttcaccttcccataaaagttcctcaagccttccccaaaagaaaagcagatgctggtgctatgctttctatatggtctgcagatggtgagccaattcaccttcttttctttataaattacccagtctcagatatttctttatagcaatgcaagaactatctaatacagggttccttgagatttcatattaattttagaatagatttttctatttctgcccccccaaaattgggagtgctatacttattgtattatattttgtcttctgtctattgtccattcctatgttttgccattttcttttctttttttcttattgtagctcaactattttgcttaataaccttttgttacacatattacaaatattatttacagtgtttaaaggtttcctgaatgctagattggttgcctctgctggaagattggggtgtttttagatgttttcattgaagag

SEQ ID NO: 152002 - DNA, 449 bp, Homo sapiens
atcctggtcctgctcagctgatgaagtgatgcacttctctgattgcaaaatacaaaatggcacatcaggtatttgtttcatctacaccggagaaggcagaccaagtggtgaagcatttgttgaacttgaatctgcagatgaagcgaaattggctttaaagacagagaaaccatgggacacagatacgttgaagtattcaagtctaatagtgttgaaatggattgggtatcgaagcacacaggtctgaatagtcctgatactgccaacgatggcttcgtctggcttagaggacttccatttggctgtccaaggaagagattgttcatttcttttcagggttggaaattgtgccaaatgggataacactgtgagtggactttcagggcagaagcacaggggaagcctttgtgcagttggcttcgcaggagatagctgagacggcattgaag

SEQ ID NO: 152003 - DNA, 275 bp, Homo sapiens
cagttcacattactgagcttggcccagctgtatacttaatagctcccagatgctctctctctctctttttcaacagctttatagagatacaattccagaacatatcattcacctgtttgaagtatccacacacttggcttttagtatatccatagaattttgcatccattactgcaatcaactttagaacattttcgttatccagaaagaaaccctgaattccttaggcatctactcctgaatcctaccgttgctccagtcctaggcaaccccta

SEQ ID NO: 152004 - DNA, 201 bp, Homo sapiens
taattaaggttactaatcagttggccttaaaatggggagatatctggttgggcccattgtaattctataagtccctaaaatcagaagagaaggacagaagctgtcagggacatatggagaaagagaaagtaggagagatgaggcagaagaggagttcagagagattcaaagtgtcagagcaacctaacccaccattgctag

SEQ ID NO: 152005 - DNA, 260 bp, Homo sapiens
aaagtgctgggattacaggtgtgagccaccacacctggccttattttatttttaatttctgttcttgtattgctataatttactgatgatttcttacccaaagatcctcggcctgtccccacccaaggggactgccttccaccggggacccctcataagagttactcattaggatggtgttccctggggttcctgtgtgtatgacgccagggcctgtgcaccgcctccatggcccatctccatcagacagagctgggcag

SEQ ID NO: 152006 - DNA, 153 bp, Homo sapiens
caggctggtctcgaactctcgacctcaggtgatctgcccacctcggcctcccaaagtgctggaactacaggcatgagccactgttcctggccttttcataaacttttaaacagtgtttattagaattttcttttccaatcatgacagtgggaa

SEQ ID NO: 152007 - DNA, 196 bp, Homo sapiens
tgagtagcttccaggggtcagctctgcaaagcaggaaagagcaaggaatccactggaagcaagaaggcccaaaagtaccttgggaggtacgccgctttttcagctcactcactgcctgtaaactgtcagggaccctaggatcattaaaaaatattttgagggccgggcgtggtggctcacgcctgtaatcccagca

SEQ ID NO: 152008 - DNA, 262 bp, Homo sapiens
tacgcctggtcgcagtcccagtgaagagaacaaagaaaaagaaacaaaagaagaaaagggcaagaaggaaaagagaaccatagagagacaaaacaacaaaacaaatccaggtgtgtgttcaccatcccaaggcatggacgaaaggagttaaagcttcgtggctttgggggaccgtttctcacaaatctgaggataccagtatgactctgctggcccttgttcccgcaggaaaactgggaggcagtatctccccctcagccct

SEQ ID NO: 152009 - DNA, 278 bp, Homo sapiens
tactctctctcatactgaattatatatacaggtcagctcaataactaatatgaagccactttctatatatctaatagaatgaaaaatctgtcaccccaaagagagatactcaataatctttgctggccaaatggccaagaactgtgcatgggagacgtaagacgataaaagagattttagcagaagtaactgtatgaaaaacatacatttcttagaaatagttttgcatagtttattctaccacctaaaatattcctaaatccagagagaaaataccc

SEQ ID NO: 152010 - DNA, 490 bp, Homo sapiens
gctggattgaaggccaggtgggggaggggtgctaggctgtggggtcaggccctgggcatgctggacctgttaggtcactgaacatctgactgggcacctgcccagatttgtcccttcagttgaggtgggattggcagcactccccagaaggcgtgcagtgccgggagagtggaggagggtctgacgtttgctatcctgtggtaggttttagagctaactagatgcttgtggagagctaatgacatgggaagaaggcagcccaccttgatggaccggagggttagagcctgcgatgtgagaagcgggtgtgtggaggtggcctgtctacaagagggcaagtttaaggcccattgcagtggcactatctcagctcactgcagctggtggctgccaggccatccctctccagagcagggaggccctcagccttatgtataattgaatgccttttgggatgcttggatagtcctttatgtcttggaaattcaga

SEQ ID NO: 152011 - DNA, 271 bp, Homo sapiens
cttggttcagatcctttaatttgttcctgtattactggtacggacaaagtatagtacaacattcagagccctggggatggagacacctctgagaaagggcattggtatgagctaggcaaaacactacagaaagcgtttgagacaaagcagcatgtatccacttttggttgagaaaggatttcaagagaggataattttaggattccttatgatcattgggtattgaatgggagacttgattcccagctttgtattagaacatccagagtat

SEQ ID NO: 152012 - DNA, 408 bp, Homo sapiens
ccccgaccgcctgattcaggtgattggagggaggggactgagaaccccttggaatcagccagaggtctcgtgccttggcctgtctttagtcatcttcagaggtgtggggtgttatcaaggaaccggctaacagggcccttcctcaggcctctggcacgtgggaaaccatcactggattctctgtaaggatgatcaccactccgtgaagatcatgttcatgggagatatgagttttggttttttttgtattttctctctgaacttttctttctttcaaggaactgtttgggagagttctgcatgggaacatgtgggtgcccttgctctgggtgggagaaaacctcagcacctcggttccagctggccaagcccaggatggacttggccatgaacccagcatgtggatca

SEQ ID NO: 152013 - DNA, 240 bp, Homo sapiens
acaactccctcaaaaatgattctgttaactaaaatatgaaaatgccatgaaggccaccaattatcaatcaatattttaaaattcagtgataaaaaatgcatccttatagaacccataattattctccaaaacttattggtacacagtttgtgaatgccttaaatttgttttgacagtaagaagccttaagaatttaacattcaaggccggatgccgtggctcacgcctgtaatcccagca

SEQ ID NO: 152014 - DNA, 476 bp, Homo sapiens
cattgcaactaacctttaagaaactatcgcttgtccaggccaggcgcggtggctcacacctgtaatcccagcactttggggaggccgaggcaggtggatcacttgaggccaggaattcaagaccagcctggccaagatggcaaaaccccgtctctactaaaaatacaaaattagccgggcatgatggcgcatgcctgtaattccagctactcgggaggctgaaataggagaattgcttgaaatcgggaggcagaggttgcagtgagccaatatcatgccactgcactccagcctgggctacacagatagtatctcaaaaaaaataaataaataaatacaaaaattagctgggcatggtgggcaggcctgtagtcccagctacttgggaggctgaggcatgagaatcacttgaacccgagacgcggaggttgcagtgagctgagactgtgccactaagcctgggcaaccgagcaaaa

SEQ ID NO: 152015 - DNA, 465 bp, Homo sapiens
cctgcctcagcctcccgagtagctgggactacaggcgcctgccaccacgcctggctaatttttgtatttttagtagagacggggtttcaccacattggccaggctggtctcgatctcttgacctcgtgatccgccagcctcagcctcccaaagtgctgggattacaggcgtgacccactgcacctggcctgtttttcattatctagcatgagcatttgtctctgcaaattttcttaaaacatagtttccctgttgtctcacttatccagtagctgaaatgatttccttagacttgtccaggcggcttcatacctaggagcttaagctgaatattggatccaggctcaaggtcatggatgagataggattcaaattatgcagggaggacataattagggatggtttgaattaattgcagactcatggaagtaggattatgtttagcctggtggtttctggaaagtg

SEQ ID NO: 152016 - DNA, 363 bp, Homo sapiens
agctaaacattgtccatttctacactgagaaaagcaatcaagatgttaacattttcaaagtttctattgatccattttcagtctttaaacccatagtcaggaattatttataagtcaaattatatgttgtaaactatagcacagtggaatgaaattggatagaaatgaagtctgggccagtaatagaattgtaaatccaggcttggtccaaaaatgaatgctcatagaaggatgcctccaaagataacatctaatgcctagaggcaaagccaaatcaggaatccaaggaacagacaaaagagaaagccactgatcacagcaaacatgggaaatcaagcaaatcaaataggcacgtttgcttag

SEQ ID NO: 152017 - DNA, 130 bp, Homo sapiens
tccttttaataattggggtttgaggactgacttcaaggtagaatactgaaattttatcagtattaatcaagtctcagaaaacactcctgatttttagaggaaattataatattcctaatcattatatcat

SEQ ID NO: 152018 - DNA, 440 bp, Homo sapiens
gaaccaagacacactcttcaacaggtcgcatacttaaacacgatgtgttccataatgtcatttcttaccaacaacatattttgagcttagctgttaaggaaccaatgcctctacaatgaatcttgctggactgaggctctgaatgattttaaaaggactaaaagtagtgtacgtttgaagtctcttaacagtgaagaaagagaaatgtgctctcattccttctgatgctctgtcagttgcaaatccagtcaagtttctaacattactccaatgccttttgtactttatgtttgattaacatggtattttgggatttttttttttaatgcagtgatttttatctttgttacaaccataagttcattccccaaaaagagctgtgtggtgctgctagagtgaaacggcaacggttcccttgtccccctcgcagggcatgtgat

SEQ ID NO: 152019 - DNA, 251 bp, Homo sapiens
tacacgcccccagtgatattgtttctcatttcaacgtgggagaggaggatatgacaccaaatatcgcagggagtagaaatactcctgggatactgttcttaatatttagggagggagagtatgatattactgccaaaactacaaagggtgtacacccgtctgtgaaatagttcataatttccagagggggagatgatattactcgaaatatcgttaacaggcaatgagtccaccgtggatcgtaatagcca

SEQ ID NO: 152020 - DNA, 297 bp, Homo sapiens
atttacactgactgggccaaccactacctagcaaaatcaggccacaagcggctgatcaaggacttgcaacaagacattgcagatggagtactcctagcagaaatcatccagattattgcaaatgaaaaagttgaagatatcaatggatgtcctagaagtcagtctcagatggtaagatgagaagatgaggttcttaaccaaatagggaagagataaaatactggaatgctcttaaaggtttaataaaatcttatatatggcatactgcaaaattgtagcactatgactcagaggagt

SEQ ID NO: 152021 - DNA, 113 bp, Homo sapiens
cagccacacctgcccctgcctgagagctcagccccgagccctggaacgccttcccttctccatcccagctcgcccttgccaactgctcagtgggatggactcacactcccttc

SEQ ID NO: 152022 - DNA, 593 bp, Homo sapiens
atgttttgtttttttttcttagcatcattaatgctaaaaatgaataactcatttttaaaatattttacaaaaacgtgagttaatgagtttactcacatgcagtggatgggcgaaagtacaggaagactgaaggacatccatcccccttgactgctcctcaatgctggctcctcctccttcttcagagctccttatccctagctcttcggagccctctcccagcctcaacctgcctccagacaaactcttccctccccctcctacctcggagggaatttactccctgcagcccaccacctttgccatcgtccaagtcctccacacacccttgctgactctgcccagatccaggtctatctggggaaatggaggcagattctcccagcaccttgtgaattccagacagaaaaagactcttccacttctcgacaaatattctatcctctgagcctcaccaagtctgctctgctaccctatgtcatccttgctgcttgagcaactgactttcgggcctgtgatacctgcctggatcaggttgtcctccccaggcctgcctgtgtccctgcaaatgacctaatccatatcccaagttt

SEQ ID NO: 152023 - DNA, 127 bp, Homo sapiens
cattcttcacagctacctaattacagtccaaaaaaagcaagctagtttcacttaagaatattcctggccaggagtggtggctcatgcctgtgggaggccgaggcagatggatcacttgaggtcaaga

SEQ ID NO: 152024 - DNA, 186 bp, Homo sapiens
ttttttttttccaggaaattaaagaagccaagagttgtatgttttaagtggatgagtatgtgaattagagttccctaaagctgttattggaaaaaaaacctttgatgaggtaaacattaatgaaaaatattttctttttaaaatttcacatatatatacacatacacacatacatatatatacaca

SEQ ID NO: 152025 - DNA, 397 bp, Homo sapiens
acctgctagtcaatgccagaaactgttatcatttatggagtacttcttgcgcaaaacactttcatccttgtaacacacctctgtgggatatactacagttgtccctcagtattcatgagggaatggttccagaacccacctccccgttctgcggatgatggatgctcaagtccctgatgtaaaatggtacagtatttgcatataacctacacacatcctcccggagactttaaatcatctctagattatgtataaaacttaatacaatgtaagcgctacgtaaatagttgttatcttgtatttttaaaaaatttgtatgattttttattttgttaatttttatttttttccaaatatttttgatctgcggttggctgaatctgcagatgtggaaccc

SEQ ID NO: 152026 - DNA, 263 bp, Homo sapiens
caacctcaggtgatccacccgcctcggcctcccaaaatgctgggattacaggcgtgaccacagcgcccggccggactagtcacattttaagtgctcaatatccacacgtggcaagtggccactatactggacagtgcaggtccacaggaactaaagtaggtatccccattttacacatagaaactgaggccataaaaagtgtttaagattgctgagtgcggtggtttacacctgtaatcccagcaatttggaaggttgaggtg

SEQ ID NO: 152027 - DNA, 268 bp, Homo sapiens
aatgtaaattaaaactgtaatgaaatacaactacatgccaactggaatgggtaaacataagactggccatgtcaagtgttggtgagaaaatggagcaagtagaattctcatacactgctggtgggaatgtataatgatgcaaccactttggaaattagtttgtcattttctttttttttttttttgagacagagtcttgctctgttgaccaggctggagtgcagtggcacaatctcggctcactgcaacctccacttcccaggctcaa

SEQ ID NO: 152028 - DNA, 344 bp, Homo sapiens
tgtttacagcaagctcagggcatataacaattatcttctcaccatggtcatgcttacgctataaatgtagctttggctaataacagagagtcataccagtctgggtgttataaggaaaaaaagagaatggtttggttgataaaataatatcaaaatctaatgtccctgaggagaacagtaagaaaaacaatctctgaggttgaaaatattcactctctatgatacttcaatgttttccagctctgatgctggcaggccctactttgaaatacaacagctgcatttatacatagcaacatcagatctcagaaataatcactagatggatgcctgtaatcccagca

SEQ ID NO: 152029 - DNA, 354 bp, Homo sapiens
ccgagatcgtgccaccgcactccagcctaggggacagagcgagactctctctcaaaaaaaaccaaaaacaacaaaaaaaattatttccagcctatgaatgtaattttatatgataagttctaatcaatgtattagtaacattaaaacaacaatgcaaaatgaattcagagaaactttggctatttctcctgagatccatggaagtgatctagaaattttcctccatttagagattaggaagcatgccatagcattcccagagattctgtaagaaggctggggtcaaaggaatgtgtagacattaccacatggcctagtctcatgttagcagcagcttctctttcttcagggaca

SEQ ID NO: 152030 - DNA, 158 bp, Homo sapiens
ccagcccatttctggagagggagttttaggagccccacaaatgttcattcagaaaactccctggaagatcccaaggatttgaagactggacttctggaagtttatggggacttagcagcaaattgcttacaatgaaacaaatgaactcttatttgggg

SEQ ID NO: 152031 - DNA, 436 bp, Homo sapiens
aatcacccagactgctgtgtggacaagcatccttgtggattctaatgcaagtctgtgatcggactttgagaaatactaatttagtccttaagtcagtatcctgagatagctgatttcaaaagagctctctcagggcttctgaccaaaagtgacagattggctacacctgtacatctcttcttatttcctaatccctgcctaaatggaagaaagaaatcagagactgggagaggttacaacaggagacagaagctgctatacctctttcaaataagcagatggacaggtagtgactgactttgcagaggaatcacacagtacctgtaagtgcacaaaaatacctgtaagaaatgcagtactgtgtttgtccgaagctcccaagagtctcagcatttggaggcaccagatactaaggaagataggggtcagaaatgga

SEQ ID NO: 152032 - DNA, 179 bp, Homo sapiens
tggtaaatccaggccttctcccttagccatgtcttgcaggcgcctgacacactggccacagctgacacaaatgtgtcacggacccccaagaaaacaccacatgcagtccttcctcaggccgtgctgcccacaaggggctcaaaatgatttgttgactgaattcccattttacagcaggt

SEQ ID NO: 152033 - DNA, 539 bp, Homo sapiens
aaattggaaagaaaaaaagagcaagaaattgaaaaggacactataggttaaaagagatttaaaatgaaattttaaaaacaatttgaaaaaaatctattcactgtagcatcaagaaagaaagaaagaaagaaaagaaagcaagaaaaaaaaaaggaaaaggaaagaaaaggaaaagaaaagcctgtacactgaaactggaaaatatggcttagttaactaaaaaaatacctaaataaatggagaggcatacgatattcacagactaaaagatccaaagatgccaaaggtaattcaatggaaatggaaaaaggatagtattttcaacaaatggtacagaaacaactggatatccacatggacaaaaatgaacctcaaccttacctcataccatacataaaaactcaaaatggaccataaacctaaatgtaagagccaatattttttaatatccagaaaaagaaaatagaaaatctttctgagcttggactggcaaagaatttttatttttattttgaggcagggtcttgctctgtcgccaa

SEQ ID NO: 152034 - DNA, 801 bp, Homo sapiens
caccgacgtccagctcagagctcatccttctcaccattctcctgccagcatcgcaaacttcctccctcatcttccttccacagtgctttcctggcttctctgtgtctgcctctggctgctgagagccagaggcattggcagtctgtggcaggttgatgccatgccatgttcatggctgctgacctcagcaggccctcggctatgcctggccttcccgtttgcttgtaagcttgctactcccagcaacagcagctcaaaccttccctgctctcccacactccaagctccagcactgagaaagtgagacatcagctggcacatcccaaattgtgctgtcctcaactccccgagcccagctgactgcccccagcttcttgtatttggtgcctacctccctgcttggaggcctcaggctgtggcatctgcctctcctgcaggccaggccttctctgccctcctggtttgccaccttggacaaaccctcccttgccctcatatcctcctccagcgcttgccctgctctaagcttcccaagggacttgcccaggctcatggctgctcattccctgcctgctccagcctggcttctgccaccaccactcactcagggatctgtctccacacactccaggaccctttcttgctttatgagaccttttagactcatgacactgctggcccccagcccccgtgaagcgttctccgcctggcatcaccgatggctgggaccttggtgcgttcaccttcctttgtggttgccctttctcatcttttatctgatccccaagaaccgatttcccc

SEQ ID NO: 152035 - DNA, 305 bp, Homo sapiens
ggggacagtggagggacaaaatgaacacactggaggacttggaaatggccacgatgaggggcacatgggagagggtgaggctgtgtagttcccaccagagagcataggctttcatttcgcagacctggaggctttcatgtttataggcccaggaggtgggtatcactaaccagtatcagaagaggctcagggaaggccagtaactttatcagggtcacacatctagtaagttctaggggagggatccacccctgcgtctgtttgactgtggagttcatgctcttccaaaagcctcagttctggga

SEQ ID NO: 152036 - DNA, 304 bp, Homo sapiens
gctggcaaagaggggtcctgtgtgaccatggtgactctttccgacatgtggcagagctcattcatcactcacagcgctacttcctgctgaactcaggtggatttttagttcccctaataatcaatgagagaatacagtctgaaatctatttgccctctctgttccaggaaaggggtcccaggaggaagggagttgcctgatgacagggagcgctgaaaatgtcactaaagctattggagtgggaaaagccaggtgggagaccaggtaccgttgggaagccaacgggagagtaggtagggaagag

SEQ ID NO: 152037 - DNA, 537 bp, Homo sapiens
tgagtcattagagttggaaaggatgttagagatagagtggcctccatggtaaactgaagaaaagcattttcaactccctgcccactggcgggagccaagatccttctgtccagccttgccctgggcagggctctcgggtaatggcagtatccccactgccctcccagtgccacccgcaccgtgaggcaggcggaggccagctcctccgagcttagctgtgcctgaagacctctcacacgccagctctgctcctgcccgtgacatggaaggaaacacacgcagacctttgacagccacaggcacctcctgatcctctcgactctccctgcatgtcacatcactcccaccgcccaggcctcagaaaggactaagtggggaaggaagctgaatttgtctcccacacgtgactgcctttgctcatgttctggggaagactatcggccttctagagggcacctgtctagtcagtattcctcaagcgtaagggcattgggaaagttctgccacttcacaaattaccaacggtctccactccca

SEQ ID NO: 152038 - DNA, 260 bp, Homo sapiens
cctcatggaggtagcctttacctggcaggcacctcagaggctggtcctatatgtcacatcattgagataaaaagaaatccaaggctggaagcagtgacaaatggtgtggacttggtggaagttgcccagggagatggatgagaatggtgacatcacacatagcacggctttttctccaaaatcccaggacttaccacagtggccacactctgtctctcacctgttcactttcttctgctcgctcgctctctctcagcctc

SEQ ID NO: 152039 - DNA, 570 bp, Homo sapiens
agcaagtcgggactggccaaaagatgcgtccttgcactttcttctccccgctccgcctttgcttggcttgactgctcaaacctgcagtagttaagaaagttccacggtttaagagggttcccaggtcatcagccactgggagttttctctgactcagctctgcacttccacttgctccagaacagggagtgaggaggagatgggggtggccttcgaaatggccatagggtggtgggaccccaaggtggggaacagcctcaggtggacgaggggatgcttttcagggcccatttgccgggacttgttgtgaccacttggatgtatgtgtcataactgtccaccttccacccttcaggctcccagcaacttcaagatacctggagagattctcagaccctcccctctaataggcagagaggaaattaatgctggcgtggggaggggagagtgggagaggatgtgacgcacaggcccagagcttagggactctgaattctttaatctgggtctattggtgccccttcatatgcagtaaggtcacctattaactctgtgtttatggagctgtat

SEQ ID NO: 152040 - DNA, 103 bp, Homo sapiens
tgtggatctttcagtcttctcccttcagtgaaggcagggcagaaaggctggaaaaagggagtttctaaccaccaaagagcatcagttattgataaacaagtac

SEQ ID NO: 152041 - DNA, 372 bp, Homo sapiens
cagggtaacgggtgtatagatttatcaggttttcaaagttaggagcagagaccatgtctgttttttgcttactattaaatccatagaagctagcataatgccaggcaagaggaggtgcccaataactgtttcccagctggttccctaaaagatttcaggcacgagagctaacttaacccagtggagctaaactaaagaaacagctttcctccagattttaagaatggctggacacaaacaaaagctaggttcctataacatggaagttttaagcctcaacaaaaggcattattgggccagagatggagggtgccagactgcctggagtctcctgtagaaatgaagatgattcttgaagaacgccctgttgaa

SEQ ID NO: 152042 - DNA, 715 bp, Homo sapiens
cggggtttcaccttgttagccaggatggtcttgatctcctgacctcgtgatccgcctgcctcggcctcccaaagtctgggattacaggcgtaagccaccatgcccggcctaatttttgtatttttagtagagatggggtttcaccgtgttggccaggatggtctcgatctcttgacctcgtgatccacccgcctcggcctcccagggtgctgggattacaggcgtgagccactgcgcctggcttagtccacctatttctaatgtgactgggtcattcatcaacctctgtgatatggtttagctgtgtccccacccaaatttttttgactgtagctcccataattcccacgttgtgggagggacccagtgggagataactgaatcatgggggcgttttcccccatgctgttctcatggtaataagtctcacatgatctgatgattttataaggggtttcccctttcacttggttttcattctctctggcctgccaccatgagacatgcctttcaccttctgctgtgattataaggcctccccggccacatggaactgtgtgagtctattaaacctctttttctttgtaaattacccagtcttgggtatgtctttatcaacagtgtgaaaatggactaagacaccctgtcaacatcatctctctgctccagtgctgcatcttcaggagcccaggttccagataaatgaactgtagtg

SEQ ID NO: 152043 - DNA, 151 bp, Homo sapiens
tcatgtagcgatcatagagtacccaggctcagatgctggatggtaggtagaggtggcggagcctggggaagttctgatattcttactgaaatcagaagcaaagttatcaggtgagtagggcagggaggtgtcaggggtgaggtgatcggag

SEQ ID NO: 152044 - DNA, 146 bp, Homo sapiens
tctatttcttgcagtaagtttatccatgaaactcattagcccaattttacatttgatttaggtgatcttaagtctgtgttatttgaaatccaggatgtggtaactaataaatgacacaaatgactgcatattgttgaagtattttg

SEQ ID NO: 152045 - DNA, 939 bp, Homo sapiens
  misc_feature (566)..(566): n is a, c, g, or t
  misc_feature (635)..(635): n is a, c, g, or t
ggaaaattcacactggagagaaacctttcaaatgtaatgaatgtggcaaagcttttagtatgcgttcaagcctcactaatcatcatgcgatccacactggagagaaacatttcaaatgtaatgaatgtggcaaactcttccgcgacaattcatatcttgtacgtcatcagagatttcatgccggaaagaaatctaacacatgtaattaatgtggcagagtgttcagttagcattaaagccttgtaagacatacaataatttatactggagaaaaactttgcaagtataatgaatgtagcagagcctttagtttttgttcaaggcttaataaccgttagctagaccatagaggacagaaactttactaatgtactgaatgtggcaaggtcttaaggtaaaatctgagaccaggatttttcaaagaattcttgctggtgagaaacctaacaaatgtaatgaatgtggcaaggtcttctggcacaattctcacattgtacaatattgcaaaaattcatgcttgagagaaacaaacacactgagagtgggaaaccattatgacttcaacnttcatcaacatcagagaatccatactaaagagcatctataataatcatatgtgatagagatcttccacnggccaaaagtctcactaggcctccaaaacttttttgatgaaaccatacaagtatcgtgcatgctaagctttaccaggcatcaaacggacattccggttctcgggagtacctcccaagaaagttatagcctcagggaatccgattgcgggaaacctcaaaaacagcagtaaaaaaaaaggggggcaaaaccccagggcaatacgcccctgttaggccataagagaaaagagagggaaacagggagcaggcgggaacaccgggagaccacaacagaaaaattgagcctgcaaggtatacgggccta

SEQ ID NO: 152046 - DNA, 133 bp, Homo sapiens
tccaaccttggcctcccaaagtgttgggattatgggaaaatatttattttaaagtgattttgggctgggcatggtggctcagtcctgtaataccagtactttgggaagctgaggtgggaggattgcttgaact

SEQ ID NO: 152047 - DNA, 1069 bp, Homo sapiens
gtcagaacctctgaccaggcaaggctttattttccaggattatattttgtctctcaaatctgtaatgcaaaagcatcacttctgctttcccttgttttctatcactaactataatattacaaaaactttttttttcttagaatctcagttcttgcatatttcctgcttctccctattcctaccttttcatagaggaagcaattctgacttcctttgtcttcgtcataagcatcccgtaaacacaagttcacagggaactgtgaaagttcaaagtgggaaaattatatttatcactatgtgtggtgatagtaggcataaccaaattggtctttccccgcttatcataacgtattaaaccgggaatttctcagtccctaatacttgcagagtcatgttatgaggtcattatagattttaggagcctcaatgcttttcatatcattttcagaattcttcaaaattcccatttataggccctaattgatttcagcagcccatatgcagtagagcagttcttccactaacaatttttttaaagacagagctaaaaatatatatatttgatgaagtatattaagtagaaaaaaatgttagaaatatcagaaaaaaattaagaaataaaagtatgttcagtacaatttaatttgaataattttaatctctaaaaataaccatattgtaaaaaaatacaatttcttctagtaaataaagaacaaatgagattttgtactacaaacatgcaagacatgttttgcaaaaatcacaacttcaatgttaagttccgcatttcatgaggcacaattatggaaatttatcaatgagaggctattaaaagagagcctcttgcccctctcagtattcaaactagatagaatttcatgatgactgaccaatgctgctagttctgagtctccgtggacactagtttataaatactccaaccttctcccttttttatacaataaagagaaatgctagccttgtgttttgaaagtcctttaaagagttcatgttaaatacctttgggattatgtacacaattgtcttttaatcttttttaaaaatatta

SEQ ID NO: 152048 - DNA, 377 bp, Homo sapiens
ggaggtgcccgagttaagggtgtggagagttgggatttcgccgccgtgaggccggcatcggtgactacgagttatgagggttgggggcgggagttctgtgagcaggggtcttgcagctgccggggtcggggaggttccctggttacacggtccggattcctgggccactgcggtcgctgctgcccgcggtgttgttgatagctggttgcctgacgacgcttcctagtcagccacctccagggcccgggggcgagcggttccttggttcccatgcgccttctctccccaacggccaggccccccctgctccgtcaagcctccccgagcgcctttcttgcccctcggtgcttgttattgttaacgtgggagcgcttgtg

SEQ ID NO: 152049 - DNA, 313 bp, Homo sapiens
tgtaaaaagagaatcaagacaagtttgctgtaaagtttataatgacacagttcatgctccatttttgatggggagcttccatcaagaaataaagccagaattcgttttcacgaacgaatagcagccagaaagccaatagccctgaccttaccctgcagcaggcctgctttgtaaagctgacagcagtgttcaagggtgaaaggttggtgttggtctggaacagattggaaggggaggtgtgggcccatcaggctcagctgaccattacctccgatcatttatcactgtcagagaggagagggtgcggggtggg

SEQ ID NO: 152050 - DNA, 204 bp, Homo sapiens
cacctcgaaaagatcatctgaactcccatgttcactgcagcataattcataacagctaagatatagaaacaacctgcatctgttgatggatgaatggatagaaagaatgtgatgtatgtgtacatatacacacttatatacacacacccaatggaatattaggcagccttaaaaaagaaggagatcatgcctgtaatcccagca

SEQ ID NO: 152051 - DNA, 404 bp, Homo sapiens
ggcactgtgaacaccctttgggggttctatgactgaaggagaaggaagcagattttagggctatcctcaggctagggcctggccatgtggggagccctacctggagaaaaacaccctgcaggagggcctggaggcttggccatgcagcggcagggagcagtgactacccaaggacaatggagagtgagggtccaatgtgaagagaggcaggggatccctggagaagaagggaaagtgggtgctgtttgaaaacagaggaggtactctgagtgcccctccaaagagtgcctcatgcatatgcaagtggatgggatgccttcaggacctgtatcttttacttgaggtgatcttccaagagattacattaaccagaggtggtgctgggacaggacttacaagaaatg

SEQ ID NO: 152052 - DNA, 103 bp, Homo sapiens
atagcaatggaacacagtgactgcatgtttatgtattaattcctgctaacaagcccttgtaaacaaatgcatactgttaacaaagtcaaaattcccaagaaag

SEQ ID NO: 152053 - DNA, 573 bp, Homo sapiens
ccccgcacccccagccccaaacaccaaccacacttttttggaacaaaaagcccggaccttgttcccgcactgtaaaacacggagttgctaccacttcaatactgctactgtaccagggaggtggtgtgataaaggcacagatctatcgccagagaattgttcttcaagatgaccagcttgacctctgagtaatccttcattttcagaaagaaatgacccatgtttccagatgaatagtagctttcttaacctgttttttaactacgaaagtactgaagaaaaatataggtgacagtgggaggaaatgggcgtaaatattcattccatcaatttcatgaatacatcaatatgtattcattccatcaatttcgagagttgaattttcaaataaaatattatgaagaaaaatataaacagcaggataaaataaatgtggaaattgctaaaagaagatataaagataagttatatttagcaaaaataaattcattttataaatcaaattataaacctaaaataatgttcttgtaagcagagactcttattattgcacttcatcaagtgctgaagatg

SEQ ID NO: 152054 - DNA, 260 bp, Homo sapiens
tgctaggattacaggtgtgagccactacacctggcctctttttttaattagatgagttaattctaaaattcacatataagaggggagaaatcaagcaggaaaattctgaaaaagcaaagtaatgaagagagattccactttaaagagcactttaaaatagattataaagtgatcataattaaagcagagtggtagtggtgcataaatagaaaaatgaatgaaaaagaaaagaaaatccagatacagtcacagatgtctct

SEQ ID NO: 152055 - DNA, 398 bp, Homo sapiens
cctgacggttgctctactgttgcctctactactgcctcttgcctctactcctctactgtttttcactgttcttagcaggcgtccctctcctcataacaccctattaattctggcttctccttttacctttcctgttgctagttcccccatctggaatgattcttggcccattcctagttcagtttctaaccatcttcccaggtctgggtcggcctagaaccttctccatccagttatcctcaactattccagcccttgggagtttctcccttctctgaactccaatagctcaattgctgaattgtagaggcaaccggcagtagtagaggcaaacggcagtaatagaggcaaccggcagtaagtagaggcaacggcagtaatagaggcaaccggcagta

SEQ ID NO: 152056 - DNA, 568 bp, Homo sapiens
atgatgtgatagttgatatgtctggcaagcccatgtgtgttgagagcttctcagactatccacctttgggtcgctttgctggttcgtgatatgagacagacagttgcggtgggtgtcatcaaagcagtggacaagaaggctgctggagctggcaagggtcaccaagtctgcccagaaagctcagaaggctaaatgaatattatccctaatacctgccaccccactcttaatcagtggtggaagaacggtctcagaactgtttgtttcaattggccatttaagtttagtagtaaaagactggttaatgataacaatacatcatgaacaatcacatcatgcatgatatgattgttccgcagggatgtttcagtaagataaaaaatgcaaaaggtccatctggtgacatcgatgaaattagtttcacttgactggtgagaataatccctagattagaaggtgttcgggagttaatcagaagaaagaaaacagagaatgattagggataattccaaagtttgatgtgaacaagaaggaaaagcgagggcagttacccaaggagaagatagaa

SEQ ID NO: 152057 - DNA, 732 bp, Homo sapiens
tgaaagtaaaagtactatccccagtgctttatatacatttatatacataattatatttaatcctcatggattaaacacttataaaataagtgttactgttctctttttacagatgaagaaactggggtacagagaggctaaagagatttttcataatcacatggtcagagtgtggaagattcaagaaagtggtttatttctgtatgactgaaaaccttatgcaattcatgatgctcagagcagtgagcagtagaaataagatttagtgtaatattttgcaagggctgaaggtagagaaggaaacaaaggtgaaaatattaacagaagcaataacaataaaaataaccactagaatattgccatttaggacagttatgggccaagaatcaaatagggactttacataaagtatatttatcttcctaaccatcctaaggaatggtattattatgccattctaagacctcacaattaaagtcaggaaaattaggtatctctattaaagtcatacaactagtacgtttcaaatacaggagtccagctgtgctccaaaatctatacttaatcttctgccccattgtcagctatacttctgtacttgtgatttttatcttagaaaattatcctcatggaatattttttttaaatcctcatttaacatgacatttatataacacaatcattggaggtatcattatacctacagacctatttatttcattctttgcagtt

SEQ ID NO: 152058 - DNA, 622 bp, Homo sapiens
ggagaactgcttgagcccaggaggttgaggttgcagtaagccaagatcacaccactgcacttcagcctgggcaacagagtgagactctgtttcaaaactaaaaataaaaaaatgacaacacagtcgacctgagctataagaagtgctaaagaaagttctttaggctgaaggaaaatgataatggagggaaaaccaatcttcagtaacaaatgaagagtatcagaaatggtacatatttgggtaaaactaaatgactacttttttcctctttctttacaatacccacaatggattaatacaaaaattgtaacagtcttatggagtttctaatgtatttagatgtatgaaattcacatgacggctataacataagacatgctggctgcaagggtgggtggacaaatggacctacatggttgcaagttttctatattttacatgagataatacaatactaacctcaagtagactatgaaaagttaaagctgtacatgatatttcctaaagcaacctctaaacaatcattaaaagaggtatgattaaaataataaaaggccaatagacagaattcaaaaaaacattcaaacaattcaaaagaaagcaggaaacaaaacatgggata

SEQ ID NO: 152059 - DNA, 240 bp, Homo sapiens
atcaagacttggatgacaactttgagtgactttgctattatgcaaggagtgaggcaggggtcagggaaacaacaagcacagggtagaacctgtcacaggaataaaggtgcattccaaggatccaaagaagaaccttagccttgagaggaaaagctcagcaagtggtatgagaaatggagaactgctaggtgaaggccaacagggcaggaagccgggcagagccagcatgaaggtgcctct

SEQ ID NO: 152060 - DNA, 460 bp, Homo sapiens
cattctataaacaattacattcacatacacactaatcttcactacatttttgagaagggcaacaattaaaggtgtatctattatggtacagccagaattagatttcttgggaccctgccaagcaaagtcatagcgtcttggttgaaaagacaggagcaagcactgataagaaactgcagggaaccacctaacttactaataatgtcttagggtttatcatctataaaattggtatgatttaactgccaggtctatctcacaggttgctgtgaaaataggactaaataaaggcactcagacaataatgttactaagtttctcaactaaccttgaagcttccactccacttctctgctcttcataaagtgcaactccctaagaatgccttcgcttcctctccctgtctcttcaaagcaccgtaatcacacttcaccctcaccactcttggaaatcgctcttt

SEQ ID NO: 152061 - DNA, 366 bp, Homo sapiens
gaaaaacaacagaaacactagaacaaaaaccaattatgctcattatctctatgatcttggacctcattattatgttttaaatcatattactagaataaaagttctcttttttattttttggttttatcattatttttaattggcacaaaataattgtacgtattattggggaacagtgggatatttcaatacatgtgtacaatgtgtaactatcaaatcagagttattagcatatccggcacttcaaacacctattttttgccttgggaacatcaaaatcctttcttctagctatttgagaatatacaataaattgttaattatagttaccctatagtactataaaacattggaacttattctttt

SEQ ID NO: 152062 - DNA, 358 bp, Homo sapiens
ttctcttgcttggccttaaaagagcaacaacacagcaacaaccctatcaccactgtggtcacaccctgcgaacatgacctcctgcagagaacttctatgtttcccaaagtgacctaaaagggcatttgtatcccaaagggggagaggctctaaaacaagcccaggagaaaaatccactgaagtgctgagtacagggcatgagtacagaaatcattgcccatcactctgatttaatggctagaagctcaacagctctaacaggagagcaatgggcaaagttgcagtgaagctacttattcctgtgtctcatctttctcacttattttaaatttattttatcttgttctgttgtttgcaa

SEQ ID NO: 152063 - DNA, 181 bp, Homo sapiens
tataactgcattctctgctctttaacacagactgtcaaatttggagtcatgcaggggctagggttacctaagggaattcatcttgtaaatgcagtttaagaaagcaagctgttaatcagcactttctctagttagtatcctggtaaccttgtgcattacaagttattcatgcctcatcatt

SEQ ID NO: 152064 - DNA, 378 bp, Homo sapiens
agcttgaaacaacaaggagggacaggagtctgagaaatagtttataacatcaagagctgaccttgatttcttgcggatggagtgttggacactcaaagggcacgtgaagccctgtgcgtggctcacctcattgtatccttgcaacgtcctggaaaatgtgcacaacaatgtgacttaattttcagacagggtaaccgaggcttggagaggcagagtagtttgtccagggccacactagtgaaggcaaagcagggtggagctgtcaatctgggtcagcccagctcagtctttgcacgtcactgccgttcctccttaggtgcagtgttttagttacagtaactttttaagaagaaccatcttcatgcttctggagatgat

SEQ ID NO: 152065 - DNA, 152 bp, Homo sapiens
ttttatcgcagtcactgcaggctgtggcataaactgaaaaaggttgagaaagtactgctttaaccttttcactagtgacataaaaaactccagcccccagcattgttacctacttttgttatcagtaggtatcctcttttggaggcgaagtg

SEQ ID NO: 152066 - DNA, 229 bp, Homo sapiens
aaggcacctgaatgcctataaaggcatctattaagacaataaaggcaaaagaagagtattttcccctaagaaagaagagttttctatggcttgtggagagcatttcaaaaatttaagacaaagcacatactccaaaaaatattgtctaatttctccaaatccctggtctgaattaaatgctctttctacatcaccaaaggagagagaacataaaatgaagttgtgagta

SEQ ID NO: 152067 - DNA, 567 bp, Homo sapiens
tcttctccaagcacgctgggcccatctgtcctgtccctgaggactccctggcacacatgacacttcagagcttttgccaactccactccctgcctgaaatgcccatctccttcagagagcttctatgtatccttggaggtccagtcctaatgtccctgcctccgataagacctctccccatcttcctctcgccctgctcctgtccccgccaggcatgacaaatctcttcccacagtgggcccaacagggaggcagatggtagaacaggttttgggccaggtgccaggtgcacgtggctcttcatcctggttccccaccgcacacctggagagctgagtgcttttcctgaggtcacgcagaaggtgaccagcctggctctggagctgtctctttgccacatcgtggggtgtctttaaggtgaccttgaatgtgcttgaagctgttttatgtcctatttgcagacctaggggaggacaatgccagggctttttgccttcccaaggtcacagcctgaagacactcagaaagatgtagttggctcatttatcattttttagaaaaaaagaa

SEQ ID NO: 152068 - DNA, 954 bp, Homo sapiens
taggcgacaggcacataggggttcattatattattccctctactttcatttatgtttgaaattttccacaatacatactttttaaaagagtaatgcatgagccaggcatggtggctcatgcctgtaagcctagcactttaggagaccgaagcaggcgaactgcctgagctcaggaattcgagaccatcctggccaacatggcgaaaccccatctctacaaaaaatacaaaaattggccgggcatggtggcatgtgcctatagtcccagctactcaggaggcagaggttgcagtgagccgagatcatgccactgcacttccagcctgggcgacagagcaagactccgtctacataaaaaagaaaaaccaaaaaaagattaatgcatgaatatatatttctgattttcctgctttatcagtttttcccctcaattaactaagcacatcataaccaaaacttactgtataggagggcttctattggagataaaagaaaagcagttaccaccaaatgtccaaaacacagataattccacagtcataaccccacaacatactaagcacaatatcctatatggcccaattacccttgaaaatctcttaacccataaagtacaatgcacacagcaaatttaaacatgataggactgctgcattaccatatttattcatataactttctccttcacaatctccttgactatcttttcaccattaaaacgagggaggagcaatttacaacttttattaatctctgaaattctcacgctggtttaccaaaaaatagttatttaaaaatcaatggtaggctgggtgcagtggctcacgcctataatcccagcactctgggaggccgaggcgagtggatcacgaggtaggagttcaagaccaccctggccagcatggtgaaaccccgtctctactaaaaatacaaaaaaattagccgggtgtggtg

SEQ ID NO: 152069 - DNA, 493 bp, Homo sapiens
caaaaaaaatcctacaaacaggtttcctcttaaggagttgaaagggtaagctagtaggtgttctaagcaagttatgatcctgagccactctacccagaagggaactccatcacttctgtaccaaagcccttaatccaagacgcctcatcacagttattttcagaaaacatgtcttacattagcacttctcgcagtagtacaaaatgatttgacaagtaggttatttttagcaaccaacattatgaaggtgacaaaatgagagaaatagccttccttgtctgctttctatgcttcatttttcttcaaaccgtatataaatttttactaaaagctgtaatatttgactaaaacataaatgctgagaaacacccacaccaacagggaagggactctgcgatgtgtttggtttgacttgcctaaaattaattattgaaaacacagaaaattggcctggtgcagtggctcacgcctgtaatcccagcactttgggaag

SEQ ID NO: 152070 - DNA, 207 bp, Homo sapiens
gcagcatgtcctaaagcagcggtgtgtgggagcgtgtgtgtgtgtgtgggagcgtgtgtgtgtgtgagagtgagtatgggggtgtggatgtgagtgtgtgtgagtgtggggtgtggatgtgagcatgggggtgtctgcatgtgtttgtgagtgggtgtgtggatgtaaatgtgtgggagcgtgtgtgtgtgtgagtgtggggtgtgg

SEQ ID NO: 152071 - DNA, 497 bp, Homo sapiens
tgtttatcgatgccacatgatagggaacatttccgagtcatgtggcaccaaagtatgttaccagtggggaatccatgtgggactgcaacaacctcaattcttgcttcctcagaagaaagaatttggctgaggggcacaaagcagaaggagacctaggcaaggtttagagcaggaatgaaagtttttttttggagatggagtctagctctgtcacccaggctggagtgcagtggcgcgatcttggctcattgcagcccccgcctcctaggctcaagcaattctcctgtcttaggctcctgagtagctgggattacaggtacacgctaccatgtccagctaatttttgtattttagcagagacggggtttcaccatgttggccaggctggtattgaactcctgacctcagatgatctgcccaccttggcctcccaaagtggtgggattacaggtctgagccaccatgccctgtcaaaagtttatttaaaagctttagaa

SEQ ID NO: 152072 - DNA, 488 bp, Homo sapiens
aactggacagtcaacagtacctgctgtctctttgctgctttctctggggctgctggtttcttgcctctcctgtcgtctgtgcctctgactcttttccttctccttgaggttaattctatgggcctgaacccattgctccactccctttgttgtgaaatgagtccccaagcaatactctggcgggcttctcatctgtttcagtcgcagggatcttgggacagttagtctttgccaaacctcctacaggccagggcttgctgaccacaggcatgtcgtgcggtcctttatggcgggtatgctcgcactgcgtctggaggttgggcactgcctcttggcttctgctcttgggagctcatatcaatggtgggcacacccccgatccatcatacctagcctataaaggagaaagccacagaccttctaaggatgcaggtgttccccccatgaatgtatttctcagctccttcatagagaaagcattttctggg

SEQ ID NO: 152073 - DNA, 157 bp, Homo sapiens
gctgggattacaggtgtgagccaccgcacccggccagatttttaaaaatcagtatagtcattggcactaacgacagcagtttcaggcttcagggtgttatatcacctttccatgatttttaaggaaaatattataatatgctttactttcctgttgt

SEQ ID NO: 152074 - DNA, 792 bp, Homo sapiens
tgaaagaagatgaagatgcttacaagaaacagttctctcaatacataaagaacagcgtaactccagacatgatggaggagatgtataagaaagctcatgctgctatacgagagaatccagtctatgaaaagaagcccaagaaacaaaaaagaagaggtggaaccatcccaaaatatcccttgctcagaagaaagatcaggtaactcaaaagaaggcaaactccctcagagctcaggagcaggctgctgagagctaaaccaaacaattttctatgaggatttttcagataaagacaataaactgatggatagcaacaacaacaacaaaaaacagaaatcaaaaaaacaaaaaacaaaaatgtgcaggaggaatatgttagaatatttcacaatatttatttatatgatagttgaattccttagttggtggttataccttgaaatgattcttggatatagcatagaattatcagtatactgctaaagcaatgactaagagggacaaagaatggcggttgactttacctcgaagtatgaaatttgctttcattataaaacaaatattgttcttaaattacttaaaataactttattctccttgtgcaaaatctaagtctatttgcattttactgatcacagtctctattacacaaagattttcctcctgaactcactgctctttattagagctttcttgtaagcatactacaaagctgtaatattctcaatcttaaaaaaaattcttataaaaaaccacaagtaaataggctgggtacagtgacttgcacctata

SEQ ID NO: 152075 - DNA, 465 bp, Homo sapiens
tgaaagaagatgaagatgcttacaagaaacagttctctcaatacataaagaacagcgtaactccagacatgatggaggagatgtataagaaagctcatgctgcattaaattccttgctttcagaatcataaccagggaatcgtttggtactgtgagggatagacaagcctccatccacagctcccttcagggcaccaaaaactttattgccagtggtagttctggcaaggcctgcatccaaatagcaggtgaaggcacctggctgaccatcaatgctttccacattgtattcatcaccagtcacctccacttggccttcatagatcttgtccatgccaaacatattgagaagcttgcgggccagcagcaggccagtacaatatgctgcagcataatttgtcaggccaaccttcacaccatattttggcagttcgtgtgcatacgccgcgcagagtttgagggatc

SEQ ID NO: 152076 - DNA, 446 bp, Homo sapiens
gagataaaaataaatagtaaaaaaagctagtcttttcttcttgtatcccagtggctcgggatgctcatctggagcagaaggacacactccagtcaactaggccatcactggccagaagttaggccggagaagactgtcttgggttagtcttaaacagggccctgtcatgagccctagctcctcagactagtccaggctggttacttggaagaggctcaaagccagttttcttcaaggaagcaaggctatttttcctgccttgggaagtgacaacccctcctggtgactggaccttaaaatcttcctgttttgtaagataactgtcatctcccagatttttacctccaaatttgctccaagaaattcaagtcctttcttatctggccccacagcagctctgaggaaggagactgtgttcacttaccttacaattaagttcaacccca

SEQ ID NO: 152077 - DNA, 365 bp, Homo sapiens
ataagaatcagccattgaaaattcctatcacttccaatgattctgaattactgttcggaaatgtagataactttactcaatcttgtagcataggatatctctggcttcaaagataaccacaatgggccaggtgcggtggctcacgcctgtaatcccagcactttgggaggccgaggtgggtggatcacgaggtcaggagatcgcaaccatcctggctaacacggtgaaaccccatctctaataaaaaaaaatacaaaaaaattagctgggcgtggtggcgggcgcctgtagtcccagctactagggaggctgaggcaggagaatggcgtgaacccgagaggcggagtttgcagtgagcggagatc

SEQ ID NO: 152078 - DNA, 223 bp, Homo sapiens
agtgtcatgggactttttttaaaggcaattttctttgtatcccagtgggagagttagaaaaaatttacaaagcatctgctgaatgcattttcaattattcctgggctttaccagtgctattactttcttgattgtaagaattttacattttcaaatatgctttaactttacaatgcattaagaattactgttttaagattcttatgatggttttatctcactt

SEQ ID NO: 152079 - DNA, 363 bp, Homo sapiens
tttccagtttctgaaatcagtgcctgtgctgtacccagccctcatctttctttccctctccatctcccatcttttatcatgagctgcctcttggactaaaggtttgaggctcgttcagtgaaccgccactgacagtttgggccttgcattgcttcggggggcacgtctgatcttcccagagtaaacattggtcattttacctggactaatgccagcacacacccgtgtctgggtggcctttctggtcattcttggaagcaggatggagccacggtttctgctggggtggatctgtagggcagcgggtttggaaagcagtgggttgcatctctaaggtggggactcctgtcattggctcaggac

SEQ ID NO: 152080 - DNA, 246 bp, Homo sapiens
aataagcggaaatgacacgcaatctcaggtctccaggggcgctgttcttatttgtgagctgccggttgttcttcagtggctggaatgagaaaaagacttgggaaaagagcagtgttcatgcctgaaccactctcttcttttggtgatttacccagctgtttataaaaggagtttctgcaggcccagatacgtgaatgatgagcaaaagcaaggaatttctttctccacattaagattaagtgttag

SEQ ID NO: 152081 - DNA, 166 bp, Homo sapiens
tgaagaggagagagaagccaggctctggggagctgcaggcagccaggccgggctgctgcggagtgcgtggccccaggaatgggggcgtctggtggtatctgggctggctggagaggtggttggggagatagtgctcttggggggctggcccccactgagccctcat

SEQ ID NO: 152082 - DNA, 266 bp, Homo sapiens
tgcattgcagagaggagggtactggacgcccttcaggggccagggtagagggtgacccctccagctgacattggagctgaggattaaggatgagcagaagtttccaggtggataagggagggaggatattccaggcagagaagcatatgtgggctaattgtctgtgaatagatttgactattgtgatagagtcgcaaacacgaactattatatgccactggcctcgtaatgcagaaggcacgctacccctgctaggaacggcaacc

SEQ ID NO: 152083 - DNA, 131 bp, Homo sapiens
catcatttatttcctcatttatttacttacattagtatggacttacagatttttattttgttatctgggttatattccattatcatcaatagtcatgatgatactcagattatctcaaatgtaggtaatgg

SEQ ID NO: 152084 - DNA, 388 bp, Homo sapiens
acatcttttaaatatcaaagtgagaagcaagaaggcaacataataatgttatctgaaagatgttaggaagtaaggacagctgtgtaaagcttgaggctgaaaagcagcttgccagcttcatttctttgttttctcgggtagtgggtgccggaacagcaagatgtgaggttctggttcatggatcatataatggacccatccctgactctgctgaatgccaagattcctccattcagattcagacatcaaatgggttttagggaccagcttggctatgtccttgggcagcatgacatgtcgatactcaaactcctcgtcgtcgtatttgtccaaatagtaaatttgtttgtgcgacatgatcgctcggtttgctagccttcagccccgc

SEQ ID NO: 152085 - DNA, 716 bp, Homo sapiens
aggcaaatacacctcaataaaatattggaatgaaattgaaaaaatagacaaatgcagattgaatttcttcccacaaccaaatgacgtgaatacaaaggggaaaacaacagcaaaggcatacagtgacaaggaggtggtctcatttccccagaccttgagtctgggctggcattgagatctacattgatcaataatatgacagaagtgattttaagtgacatctgaggctgggccttaagaggacttgagattccactttggctatattggaattcaactctgctctgagacctctacacaaggaaactggtctaagatcctcgtgaataagaagtcacttggaggatagattctaaacctcaagaataagaaataaaagtacaaattggtgtgatgaaggtatattcctatttttggggattgggaggctttacttatttttaaaaactctattgaggtaaagagttaagctgtaacatacttcattgatttcctcacccttttcggctctgttttactatatcccctaatttgttggttgtgctaatatttgtagaaagaggtcttgtatttgctgcatcataatgacatttgtacttttttgactggtttaagtacaaatgaatgaaataaccatttttcctttagttgactttaccctgatttcacctagtgtttcaatgagtaaaaatacagctaaaagaaaagaaaagaaa

SEQ ID NO: 152086 - DNA, 439 bp, Homo sapiens
gccatgcctgaaggatcacaaagcattgtcccacatgacccagatgtgcatctagcaccccttcctggattctcagtccctgggaggtaccttctagggaaccatccagagacgggaacatgtggccactggagacctgccttaggggagttgtgggcgtgttggtcggggctcagccaagttgtgctgggagagtctgtgctctccctagaccaggttctttacagagactggactctggcgggggggaatccttgcaggccattctagggagagttggacatgcgcagggcagcctgggagtctgagtcctcagcagagagtgttctgggaaaagaagaatgctgagtgagatacaatgctagacaggggatgtgggtgatttacttggtgagaatgcccctagactgggcaaatctaaggccagggccctgaagcg

SEQ ID NO: 152087 - DNA, 588 bp, Homo sapiens
aacgggactggactctcgttagtctgtgatggattgatcttctgtcactgctttcccaaactcccagcagtttcaacgtaaagcttgttcaatattttaaaaccaatttaaagccaatttttgagtttgctttaaagaattattgcattaatcaaaaaatacattaagttttaggtccaacagtctaactgataggaaaagctgattgggactcaagagaaatgggctctcctggctggagcatgtaatgtgcaagaacagaaaccaatcaatgctaaagggaagaacagcagaaacgagtcacaaatggctcaaagcaaagaaccctgcaactgaatggaattgaaagaaagtgtgaagagggctgatgagggtatttagttattattagcaaaattcagatgtgagaacacatctaaagccttcggttccaagggaggctgcaattgggctttcattgtgagatgtgtagagtgtcatcctttcaaagatttcaggtcaatgaaactgcagaggtcatcctcctggagaccatgctgcttgagagaaatgtagggaacagaaaataagccagctctatgaaaataa

SEQ ID NO: 152088 - DNA, 297 bp, Homo sapiens
aaacagaccatacgctgggctgcaagtcttcatacatggaaaacaactgcaactggcatccgggaaacgcagagaaggacacaacgagatacactccctgaaatcagagagactggcaacgctgagtgctgaagagaacccagagcagctggaatcctcataccttgttggtagaaatggtcaacagtacaatcttcatggcatcagtatggcaggtgatgagtcacacactttttttttttttatcatttttttcggagaacggctctttcgtccctgcgccctagggtaaggggg

SEQ ID NO: 152089 - DNA, 255 bp, Homo sapiens
tactgggattacaggcatgagccaccatgccaggccccgcccttactccttttgaagtccaggtggttacagctgcccctggaaggggcagattgtggatgcaagccccctaacagcagaaaaaggctattgacagtgaatgagggacttccaattctagaaatagatcccgttgccttaggggtggatagtggacaaggtactaacaccaataaatgcctcaaagatttcatttgcttttgaacttgcagaaat

SEQ ID NO: 152090 - DNA, 401 bp, Homo sapiens
cgtcctcggtacccgtgtccatcccccttcgtttggttggttagttggttgattgtatttggaggtagtattaggaattgtcctgagagaggagaatgtgatctatgcaggatctagttgtttgtaggagaagagtactccagagcctccagtccaccatattgtcagaagtagatgtttattcagctcaattcttagtatattcaacatttcacatcctagatgtgctgttccttgtccatatcatgtcattctgctggatggagttattccccttctctttccttagtatcaccaactctaagccaaaaggaagtaatgaagaggatttctcatcataaggtaggaccacaaaccattccttcatcctaaggagtgaagcacctctctcttcaacttga

SEQ ID NO: 152091 - DNA, 153 bp, Homo sapiens
atattgtatgcttgtatcaaaatttcacatgtaccccatatatatgtacatttatgtatccataaaaatttaaaagcctgactgatttacctgcaaaacatgttcagagtccagccatttcttatctgctaccactgtggacagagccaccat

SEQ ID NO: 152092 - DNA, 710 bp, Homo sapiens
ttttcctgattttgccctcaccatttcagtgcaaaagtgctaggctatggagaggcaccctcctagccctgatgttacttggagtgcccaagggtctcacatacgtcactgacaaatcagtctgttggatatagtcatcagaagccacctgtcttctgctcctgcatgcccgtgccctgcctatgaagcatcacaggagagtgtttcacctctgctcttgtttatggtgtccaccatgagaaagccactgatgggccaagtgtcccgcctcctgatgctccagagggccagagttttcctagcttcctctctctccagcctgacacatcctgcacagtagatgttattacaaacgaggaaacagaagcatcttgacattttctcaagtgaatagaatagtgagtgctggggctagatttggaacaacagtgaccacgatggattatgctaaaatctagaaaaaagggaaacagatcattctggtgtgtctgctgtgtatactgttgacatattggcaaaaatcctgttatttcttctgtcattgtgatagcatatgaaagctatttaacttattcaagtttgttttgtactaagaatgcagaatgttctattctggagtgttctattcttcattttagaaacattatgataaagaccaacgttttataacgtctaatcaatgaccaagtgctgttgactctttttcttaa

SEQ ID NO: 152093 - DNA, 309 bp, Homo sapiens
gttgcctaggctggtctcaagctcctgggctcacgcaatcctcccacctcagcctctcaaagtgctgagattacaggcgtgagccactgcacctggcccggatagaatgtttataaacagagtattcctctgtgaagtatgttagttcttagaaatacagaaaagtctcttatggaataacagtaagtagaaaaatacacatttatctaaatgtaactacttgcctatgatatacatcatttagtgatggcttaaactataagatattgatcttcagaatgataaagagagtgggcttgatgtcatttg

SEQ ID NO: 152094 - DNA, 487 bp, Homo sapiens
atttgctatccgagatctttactacataatcagtgttatgggctcaattaggtcccccaaaattcctatgttgaagccctaacccctgtaccttagaatatgactgtagttggagacaaagcctttaaagcagtgactaaaataaaatgaggcccttagggtgggcactaatccaatccaactggttcccttataagaagaggaaatttggacacactgagagacaccatggatgttcccggaggaaagaccatgtggggacagagagaaggtggttatctgcaagccaaagacagaggcatcaggagaaaactaacctgctgacaccctgatcttggagttgtagcctacagaatgtgagaaaatgaatttctgttgtttaagccacccactttgttgtattttcttaagacaggcctagcaaactaatataatcaataaatgtatttctttattgtttacatttcttccatttttgttaaaaaat

SEQ ID NO: 152095 - DNA, 741 bp, Homo sapiens
gtgacctgcaggcactggaggggctgtccttccctatcttatggacaagatctcttggcttgggggacactgtctccaaggtgctaatagtcaagacctcaacaatgactcacttggactcggaaaccaacctaacttactcagggtgcctgcggcggtggggcttttgtagaccaaagccaagttttgccaaaggcagcaagtgctttataagctgaatgggcaacttacaggaacgaaagctgagtgaccttttatttacgggctgagtccttggcttgaaacctgccagttgaacagtctaacttggtgtcatatggagcatctgaatcacagtctcttgagtcttcctctgagaaggtggctggaagaagttcacatttctcagcattgaaaacaccttctgctctttacctctgttgaagatggccttacaaaaggctacgcgggtcagccgtgagtaggagagtagtttccaggagcacctgagcatgggggaaccgaagggctttagttgcagaagataagcgaattccccgagtgtcaggttggtggcgtgttagagaggccactttcctcagagaggttacagatgagtgtctctggaaatctttttttttttgagactgagcctcactctgtcatctaggctggagttgcagtgagctgagatcgcaccactgccctccagcctgggcgacagagccagactctgtctcgaaaaacataaaaaaaaaaaaa

SEQ ID NO: 152096 - DNA, 703 bp, Homo sapiens
cagtcatcccctaactcccccacagtcagtccccaaagatgccatatgctttcacttctccatgcccttgctcatttgtctcattgcctgaaatatccttttatttcaccaaactgctgctcatcctcaaggccctgcctgagtcacctttccttcttgcttcctcccccttgcctcctctccccactaccctaagaaaattcatccctcccccttcattaatatcatgcacatgcttgttattatatttaacacattgtatattaggtatttgttttgcttatccttttatcctatgaaattgtgaacaatttgttgaataattgaataatcacgtatcaaaatgtagagaggttatttgtctcttccctgtaggactacattttcaggcagtgtctgctaagaatccccttgacctgggattggaagttgtttctcccactgctgagctcctttatattagctcttcacctctcactcctttgtttcttctcttggcactttacgtctttctacccatttaatttgataaatgtctcatgtcatctttaaaactgaaggtgacacatgtctggtttatctttataactcaaaaatgttgagcttaatgcagaatggagaatagctacttagtaaatttttaaaatacatgctaccatttttaaggggagaagaagacaatatacatgacttaaaaataaaa

SEQ ID NO: 152097 - DNA, 212 bp, Homo sapiens
ctgcatggccatggtgctgaaccttaggcaagggcaaggacacctccctagttcccagtcatggtgaggacctgtctgaaacattcaaactagactttactggaaacagagaagtctctgcattcagggcagctggcttgcaaggtaaggcctgcagtctccacccgcacgctaacccatgaggggatgccagagagagcccttcccccttg

SEQ ID NO: 152098 - DNA, 197 bp, Homo sapiens
ctccccttacagatggagacactgagagggtgacgtggccccagggacctttggagtccttggggcttttctcctctgcatcggctctgaccccagcacacacaagctccagctccttctcacacatagtggaactgcacagtcgctggtccccgcctcctcccggtgtgttggtccccgcgccctgccttccccct

SEQ ID NO: 152099 - DNA, 293 bp, Homo sapiens
aaatttagatatattcataaaatgaggcactgagtaacattaaacggaataatctactcacacatgcaacaacatggatgaatctcaaaaatatgtcaagtgtaaggttaagtcataaaagagtacggattgtatgatttcatatatgaaattttataacaggcgaaactaatctgtcgtgacagaaagcagatgagtgattgcctgggtctgaaaagggaagagaatgcaggaaggaacattttggggtgatgagagggatttatgtcttaattgttaggattattacatgg

SEQ ID NO: 152100 - DNA, 603 bp, Homo sapiens
caagcgattctcctgcctcagcctcccaagtagctgggactacaggcgcgccaccacgcccagctactgtgtgtgtgtgtttgagtgtgtgtgtttcagtgtgtgtgtttgagtgtgtgtttatgtgtgtgtgtattttagtagagacgggtttcaccatgttggacaggatagtcttgatctcctgacctcgtgatctgcccacctcggcttcccaaagtgctgggattacaggcgtgagccaccgcgcctggccgagactagaacttctaggggtgtttctgacaccaaggaaaaagtacagcgggctgtttaggcaggagagcttaggagggggccaggggcagctttgaagacccttaacgaacgttctaagattttttgtctgccaattaactaaaagttaagtacgtgatcacagcatcgccttattgaaatttcacatagttgaaagatgctcaactgagctacagcctccttgggagagtccatcactcaaacacaactctgatgggtcatgagtagcactcaggggacttgaggagacattcccatcttcagagcccagccatgacagctctgcattttactcagagctgggca

SEQ ID NO: 152101 - DNA, 263 bp, Homo sapiens
ggaatcggtctcctctgacatcaaataggtttatttttcccttctcttcccttcccctctgcctgccaccacacatggtaatttctaccctggtttgccccccaaaagccctcactcagctcaacacagggttgcgataaatggctggctgtgctccctgttccaacagccttgaagggtgtggttggttgttccatgagcagggagccttgtcagacccgtgaatcacccctcgatcacttccctccccagagaagaaaccg

SEQ ID NO: 152102 - DNA, 206 bp, Homo sapiens
agagacagtccatagttttcagtcaaaaggctaaaggggaaagtgacccaaaaacatgaagaacacttgagatgtccttcagagtcccaattcctacccccaaactcaaggcttatgagacataagaatagtgtgatgcaacccagctgtggccaggaggaaagtacagtgagtcaggagacccctcttctttctctggcccttta

SEQ ID NO: 152103 - DNA, 383 bp, Homo sapiens
tatccagaaacgatttgtaattcaatacagttaaaaggcagggaaagagaagagacaaaaaaaaggaaagcaaaattgagtggttaaaaagggacagggttggaaaaaatggcagcatcaggtgtctggaccacagatttctgatggccttcagtcttctttctttggcttcatcttcagagtgagtaggattttgccaacccaaatcaaaagaatgagaagaaatggaggaagagaaagcaaatttgcagctctaactaatagcctttcagatgtattttggctcttaatctactcactggaaacccttaagaggcaaaacgatgcaggaggaatggaaattgagtagttcagaaaacctaggcttttttatttattttact

SEQ ID NO: 152104 - DNA, 480 bp, Homo sapiens
gtctttgttatatagcgaccccttcctacaaggtgggctgggaggcttagtctaaaaggcttcattggcataccaagatacattatggtttgcttagtaaggattaaagtcactactacagtacctgatccaaaggctttaaaaaatcaggttcataactggtcttaggtggagcaaagcaactttacttaagcatcaactcagcatttcaggtgtgttttggcttccaaaaaaagggagatcattcatacagtagactcttgatttaattagcaaaggttccaatatttggtgcaaatgaggagaccaaagagcaagaaaagatgaggaatatcagtgcagcatcctttgatggatatcactgggcctaacagaagggacgtggtggcagtgagactgtctgttcaggatgtggaaaggcttaattttgtgctttaccatagtccttttatatttgggcttatatccctattgaagaag

SEQ ID NO: 152105 - DNA, 308 bp, Homo sapiens
gccttgggcaaatctttcagcttccctgtacttcaacttctatgtccatgaaatgaaaatgcaaaaatatctgcttatcagaactattctaagttccaagctgaatgcctgacatgtaggaggagctaaatgaatgagagctattgtttttgtacatgtaattgttaaggcttttagattatccctactaccttttcttttcaaaaaacctgctggctccccactgatctcttgcattacgaacaaattcattttcccatttaaacctccatcccccacacctcccaccaagtgaccccagtctactc

SEQ ID NO: 152106 - DNA, 275 bp, Homo sapiens
ctcgagcagagatgtctccccaagtccagcttgcttcatatcccctgcagttctggtggtgggaacccagaagtcagaacacatctacctcctggcagctggaggccacagcgccccgagtttgggacatgcccctctctgcatgtccgtgccaattcctcaaggctatcggccagcccctcccactcaaggcaccccatggagcctcctgggagatcttcagacccagggcaggtgggggctggatctgcccttccttcggtgccccaggtctg

SEQ ID NO: 152107 - DNA, 423 bp, Homo sapiens
cttgatcgacccttactgtgtgggagcactgcagctaatcaagggtggctttaatgaacttaaaagaatgctatccaagtatttcataatagaaaaacttcaagtccaggccctgggggacctggaactgaagtccaggccatgtacagacatttaccctgccctgctcaggcatacaggtttgtggatttgctcaggagcccccgagagttgctgggggggtggaggacagatggagtgcctttagctcagctctgcctacacattagcagtttgagctcccagctccccaataaaaggggtggaggctgggggaggcctgggaagactcggagggttttggttgctctgaagcagctggcctgtgatcaagggttgaggagttttctctcagagactgtctgaatgtggcttcttagagga

SEQ ID NO: 152108 - DNA, 613 bp, Homo sapiens
cagtgtccatccagcagaaactaacagggcgcctgctgtacccaggcattctgctggggctggggacgcatagagaggacagggtccctccttcacagctcataggctcttcaggggcaattccagcacatagtggcggtgttctgaaggaggaggctctgggagcttcatgagccccacaatcttcctttgaatgtgagggaaggcttcctggaggaggtggcatctaagctgaaatgagtgggactttgccaggtgtgtggggaaggtggtccaagaaaggggaacagcatgttcaaaggcccagaggcaggaggcagtaaagggccctttccatcctggcagctgccagccttaccccactggaccctttcagggttcttcatgagactgggttttttttagagacagggtctcactctgtcagccaggctggagtgcagtggtgtgatcacagttcattgcagcctcaatttcctgagctcaagcgatcctcccacctcagcctctcaagtagctgggaccatcgttgtgtacacagaaaatttgaagaacgtattcggctttccacaatgcgcactgcgggttattgagttggctttacaactattgt

SEQ ID NO: 152109 - DNA, 247 bp, Homo sapiens
ccagcagccttccctagatgctcaagaccagagctgccagaacctgggttcaagctggggtcagagagtcagcccagggctttctagaataaagacagaaggatcttggaaatggggcttccaggaatctcaggcaatgtgcccccacctcacactgactgcagagctcagtcatacaatatccatctcattccctctggcgcccctggtagatgattaataaatattcctggtgttaaatcccata

SEQ ID NO: 152110 - DNA, 352 bp, Homo sapiens
ttcagtatctactaacatacttaatgagcaagagttgggaaaaggcgggatgccgtggctcatacctgtaatcccagcactttgggagatcaagacaggcagaacgcttgagctcaggagttcgaaaccagcctgggcaacgtagcgaaaccccatctctacaaaaaatacagtttgctgaaagtaattataaggaatgaagtgataaataaaatttaaaaacaaccaaaaaaaaaagaaaactaaagaaagaacacaaaaaattagtcaggtgtggtggtgtataccagtggtcccagttacttgggaggctgaagtagaactaacacttgagcctgggggtcaaggctgt

SEQ ID NO: 152111 - DNA, 643 bp, Homo sapiens
gggtggctagttattaaagtttgtttgacactcctagaatatcagaattccaagttgggagcagctggtaggcaggagcagatcctgaaaagctttgaattccttgccaaggagtttagatactatcatgaagccagtgttggtaccttggaagggaagattagtagttgaactttaggaagatatcacatgtttaaaggatgtagggaagtcagttacaaggttctgacaggagttcatgcaccatgatgaggaacaaacaggcagtggggatggaagtgaaggaagaaacagaatttctaaggacttcacaataaatttgatggagggccatgcagagggtgaaggaagagctcagttggcttccaagttgtttttgtgtgactgtggatgacaaccaagataggtaaatagaggaagagcagatttggagggaagattatataatcaattctcagggtatttaaagattggaatggattggtggtcagttggccatatttatcctagagctaaggggagagattggaccagggaatgaataataggtattaccaataaggttggttagtaacttcctgcgagtggattgcccaaagacagaaagcaaaatgatacctgaaatgtaagaggaaaaaaagag

SEQ ID NO: 152112 - DNA, 449 bp, Homo sapiens
ctcactcaggggatcctgggaggacattttctagggttggatctcagtgagaaataacttccttacgtggaattgctcccagtgggtggcattattattcagtgcttttaccctcggctcctgatctctgggttcaagccctttcaaatctaatactgtatatttgtaaaggtcaacctattgttttcatcctccaccggtttgtctgacctcgtttgtagattcaccatttctgttctgtgatgtcacctctggtggggatgggagtggaatgaggagggaaatgctaaaaagacaagagccccagaaagaagcaacgtatcctcgcccactcttagaaagacagcaccctcagaaacaaaatgtctggcttggcagagtcatcctgtttgtccttatttgtaaaaagaaaagaaagccaaacttttgtgattttcttaagatccagg

SEQ ID NO: 152113 - DNA, 427 bp, Homo sapiens
ttacaaaataaatttaacaagggctgagtgaattattctgctatagagatggaacagtatatggaaagctcccaaggtacataaagtggttgttgttttctctttctagaagagaatgctgtgggtggacaatatacagataaggttagagaggggaagcggggactaactcattcaggaccttttacgtgatagtcaggaagatggctgtagttctaagtacaaggagcaccgattttaaggagagacattttatgacgatttacattttaagatgattttagctgctgtggagatgtttggaaagggtcaaaagagaaagtaggctgacccattaggaaatgtttgcagagttcaggtgagatgatagacacctggactagcctggtattggtggagagggatttatgaaatatgttggagaaca

SEQ ID NO: 152114 - DNA, 658 bp, Homo sapiens
ttttggccaggctggtcttgaactcctgacctcgtgatccacccgcctcggcctcccaaagtgctgggattacaggcatgagccaccgtgcctggcccatatacaggatttttatagcttatccatttggtacatttaattactataaagacaaagagtttggcctcatgcagtcactgacttgctatgtggttggtttccttgtgtgtaaaatggagatgatgtgtgaagatgagatgatatggcaaatgtaagcatttgccacagtgcctgacacagggtacacgctcaatccagagagctactactttctgtaaaaaactggtttatgtcagactccttggttccatatgctttataaacacaggaaacaggaatatctacataaaatctgtaaatgcattttaggcttctcatgtgctcaatgttgattactgacatgtcccattcttgttctgactattcaaaggttgggatctgggggagagaggtcagtgcagaaaataatttgggaatattcttaccaatgtgctgctccctccatttttccacttaaattcatttaagccttgcctcgttttttgacagtgttagatgaggttaaacagaatatttgtcttcacttagttctcaagaaacagattctgagggcttctgt

SEQ ID NO: 152115 - DNA, 175 bp, Homo sapiens
tgagaagaggagtttctctccctggttgagaatccagggcatttttgtcatggatttccattaggagtcacatccagaaaactgccaagcttctgacccaggagatagaggataagagggcacaagatggcccagaggatgagtggacacattgatagttgagtggtaaaggctc

SEQ ID NO: 152116 - DNA, 367 bp, Homo sapiens
tggcacagcaacaggtgctggaggaccctgagaccacagctctgtttccagatgtcccggctcctggcttccacagtcatagaaggcgggcagcaggttgctgtaccatcctgtgatttcaggggacccacaacccagctgctttgtaagcagtgtgggagtcaaaaggcaggaacgtgaagaggtaccagggtcaaagggaaattgacctggagatgaagccatgccaagaaaatactgtgcctggccaggtacagcggcttacacctgtaatcccagcactttgggataccgaggcgggtggattacgaggtcaggagattgagaccagcctggccaacatggtgaaaccccatctctactaaaa

SEQ ID NO: 152117 - DNA, 411 bp, Homo sapiens
aatctgctattcccccatcaccaccccattccacacactttccctttttgtatttttcccctagaatatttatcacctacttgtacactacatattttacttctttttgtatccattcccctgactagaatgtgacctgaataatgtcaggaactacatcacttttgttcatctctgaaacctaagggcctaagaaactaaaatattaatagttcctaagacacacggtggttcaatgaatacatgttgaatgaagtagttattaattttgccattaaaatggaagtcactggctggacacagtggctcatacctataatcccaatgctttgggaggcctaggtggaaggatttcttgagaccaagagtttgagaccagtctgagcaacatagcaagaccctgtctctacc

SEQ ID NO: 152118 - DNA, 318 bp, Homo sapiens
ccttaaatgagcaccactgcatctttccttgaggactgaagactggcaaagtctccatcacgattctaaatatgaatgcttagtatcacctgtccagtgacagggcaaggggaaggccaggtaggtggggtctcaattacaacacccttgctctgactgttttatttattggattctctggtgggcttccagggaggaggtcgagttgggttctgtgactcctggagagcaagccacatctgcagagagccgggtctacagtcagaaatttcttttcgaactaaatataaccttaaaatactttacttaacttgcctc

SEQ ID NO: 152119 - DNA, 252 bp, Homo sapiens
cactgagaggttaaataacttgcccaagattacacagccaataagtgtcagggctgggttttgaactctgtccttgcctctggacaagggttttgtctgcatcatgtggctcagtggtcctctagaccgaagctcacctagatggccccacatatcacaagagatacgtgcacaaaatagagacccccacactgcacacggggctaattctgcaagataattttggggaggaatcttaactattactttttg

SEQ ID NO: 152120 - DNA, 298 bp, Homo sapiens
aagaatactatttagcagtacaggtacttgcttcgatatcaggaagtctgagttcttatcctggctctcacaacaattagatgtatatccttagaaaagtctctcttcacggtcaggcgtggtggctcacacttgtaatcctaacactttgggaggctgtgggtggatcacgaggtcaggagttcgagaccagcctggcctatatggtgaaaccctgtctctactaaaaatacaaaaattagctgggcgtggtggctaacgcctgtagtcccaactgctctggaggctgaggcaggag

SEQ ID NO: 152121 - DNA, 377 bp, Homo sapiens
gtgaagagctttccctgcgatttgcatctctgggatctctgcgcatagcaagtgaccaagtcagaaaacttatccacatccaggcagcctggcacaacaggatatccccacgtgtgcatgtgcgtgtgtccagagcgaaggtgtaagagcccagattcaaggtcactcagtgctttcggaactgagataaaacccggtggaggggttgcggggaatttcactctgcccctgagaagccagccccacccagccagatccagcttcctgtggggagctagagtgaccctgggagggaagggtggcctcagggaaggaagaaaggcgctcttgggactggcaagtagtcaggtactttaccatgaagagctaaaggcatg

SEQ ID NO: 152122 - DNA, 306 bp, Homo sapiens
ctagttttccactggtgaaaatcatgcagtacacaaaatattgaagtagtgaagaaatcctgacttgttaaaaaaattcccaagtcaaatattcagattgtttctgattctaataagtgcagtatttatagatcacattttctccaaaatacccagccaccttcttcctttttcttttttgctaattatccataatctacccaaatcctttccttaaaacttacccttccatattctgtaaacacctaaatgcatattctaacacttatttcctacctccagtgtaaaaaaatgactctaggggaa

SEQ ID NO: 152123 - DNA, 266 bp, Homo sapiens
agactggacctgaagcctgagcttctcctgaaattagagtacacaacttataatgtacaagctgctaaaccccctttctgtacaaggtgattggaatggaactcttatgtacagtgaaagtacaagtcacgtttttcagccaggaaaaagccaaaccagacaacctggaagaagtgggatgcaacaagtgtcagtaaggaaggaaaatagtaaactgtattcttaagtctagagaagtatgattctgggggaaagatgggtggcct

SEQ ID NO: 152124 - DNA, 513 bp, Homo sapiens
agctccgtctccggtgagatcagcaggaggtgagtgagcatcagtcaccacctgagctccgtctcccgtcagatcagtggcggcattagattctcataggagcgtgaaccctattgtgagctgcacatgtgagggatctaggttgcatgctccttatgagaatctagctaatgcctgatgatttgaggtggaacagtttcatctgaaaccacacacccccatccgtcctggaaaaattgtcttccatgaaacaagtccctggtgccaaagtagaaataacccagatgtgcagtagtggaataggtagttaaattgtggtgtgttcatgtcatggaataccatacggcagtaaagaggagtgaactgctatgtgtaacacatggatgaatctcactagcatgatactgagtgaaagaagccagattcaaaaagaccatgtactgtacagttcatctacctgaagttcaggaacaggcaggattcatctatggtaatagaagtcagaataatagt

SEQ ID NO: 152125 - DNA, 166 bp, Homo sapiens
tactttctgcttactatatttggtaggataatcctaacatatgggttccttcagtgaggataaaaacaaggaccgaaaatggggcctgaaggaatcccgtactgcctgattactcctgccatcatgacccttggccatcatatgatttatctctacactagcagag

SEQ ID NO: 152126 - DNA, 306 bp, Homo sapiens
tgcatgttcaagcagcacgcgaggacgttttccttgtaaaagatgaaaaaccaaacccagatgtatgcggaatggagcacagaggctttctcctcccataagtcaaaacaaatgacaggacactccaagggtgccactcggagactgccttcctctccccacaggctgtctcagcagtctccatggcccgtgggaaaagagcaggtattgggttggcttcagaggatattccacatgtaaacaatcgtaggcacaatcgtgttttagatggaacctttaaaatgcaaattatacttcaagttctat

SEQ ID NO: 152127 - DNA, 286 bp, Homo sapiens
aggatgcttgtgataaacatcagaaaaaaacaactcttttcatcctggacgggattagagaatactagagaaaggataaaaggctggtttctgcaggcagaatatgcttaggaaaaatggcattgtgattttcccagaggataagagaaattctgtggatttgtaagtactgtacttgcctgatttttttttttgagatggagttttgctcttgtttcccaggctggagtgcaatggcgcaatctcggctcactgaaacctctgcctcccaggttcaagcgattct

SEQ ID NO: 152128 - DNA, 347 bp, Homo sapiens
gccattattataagacatatagtactcatcctagagaagttcacagcctaatgaaacaatagcaaaatatctgtaccatattggacaaaggattgatacccttaatatatataaggttactaaaaaatatttaaaataaaaatgaacagataatagaaaaaaatgaataaagacataattccctaaaaagtatatacacgatcaaataaaaatatccaaactcttaagtttagagattatttcactaattgcagagcttcagagttacaggatggtgaaaaaaaaattaagtatatgggtgtaggtctgaattctccaaagtagcttttccatcattaactgagata

SEQ ID NO: 152129 - DNA, 793 bp, Homo sapiens
ttctaacggctgtgaggccaaagtagatgattttgtgttaattaaaatggaggcccttttcacaagacggtgccgaaagcaaagaaggaagctcctgctcctcctaaagccgaagccaaagcaaaggctttgaaggccaagaaggcagtgttgaaaggtgtccacagccacaaaaaaaagaagatccgcacgtcacctaccttccagcggcccaagacactgcgattctggaggcagcccaagtaccctcagaagaccaaccccggagaacaagcttgaccactatgctatcatcaagtttccactgaccactgagtctgccatgaagaagatagaagacaacaacacacttgtgttcactgtggatgttaaagccaacaagcaccagatcaaataggctgtgaagaagctctatgacactgatgtgaccaaggtcaacaccctgattcagcgtgatggagagaagaaggcatatgttggactggctcctgattacgatgctttggatgttgccaacaaaattgggatcatttaaactgagtccagctgggtaattctaaatatatgtatatcttttcaccataacaacaacaaaaaaaaggctgggcatggtggctcactcacacctgtaatctcagcagtttgggaggccaaggagggtggatcacgaggtcaggggttcaagatcagcctgggcaagatggcaaaaccccatctgtactaaaaatacaaaaagtagccgggtgtggtggcaggtgcctgtaatcccagctactcaggaggctggggcagg

SEQ ID NO: 152130 - DNA, 255 bp, Homo sapiens
tttatattttgatcttaaatttgctcaactctctaatctgttctgagatccctatttaggaaattacatcacatcacatgccagtaacagcagttttatttctgcctttttcaccctctgccctgctgaaaacagtgttgtgaggctgaggatgatgtgggttacacaaaacttggctgcactgcaggggggaatggaaatctacataaccaccttggaaaaatcgatatgtatcaatatgcagacgtctgcgtt

SEQ ID NO: 152131 - DNA, 324 bp, Homo sapiens
ggtttattttttatggaagcaatttagtgccccctcacagcccaccacttccctctgagttaatgactcccaaacacttgccaataacacccattaggtcatgcagtgtttacctggaagctttgtgttagccagattctgtccagccttaaaccgactcttcatcacaacaaagcttacagctttcaattagttaatttatttggtatcccaaaaattctaattttgcttttccagtagcagtgatccattgtgacctagtaggtacaactcagtcatttttctgggtttaaaagagcgaatatatttctgtgtacagcagac

SEQ ID NO: 152132 - DNA, 447 bp, Homo sapiens
taggtggttgcaacatgccactaattggtctctttgcctcctttagaccccctcccttccttattcgtgctgaagcctaagtgaccttttcaaaatgcaattctgatcatatcactacctccaatgctcagccccctgctgtttaaactattcagtgtttaaacctttcgctcttagatgaagaagcaaattccctctgtcagctgacaaggctctgcatggcctggtctctgtctagtttccagcctccttactcactccacacacttcagcccttctagactttcatttccttgcagaagccatgctacctcctgccacagggcctttgcacaaactgctcccgctctctctccagaacactttttcctccactgttgctctacacaagcttctctttctcacaaaaaatgtcttcttctaaggaagcctcctctaaccttcctg

SEQ ID NO: 152133 - DNA, 490 bp, Homo sapiens
ttcctgcctcagcctccagagtagctgggattacaggcatgcgccaccatgtctggctaattttgtatttttagtagagatgggggtttctccacgttagtcaggctggtctcgaactccggacctcaggtgatccgcccgcctcagcctcccaacatgctgggattacaggcgtgagccatcgagcccagcctatctgaattattctgttgctgacaggaagcggaactcaggtaatgatatatactagaactgaatatttgtgactgagataggcattgccaacagactcaaagaaggggagaatatcctcctctttttaaacatggatggatggatgtaggggctccattgatcgagtgccacattgtagttgttttgtacacagagtagatttttacaggtggacacagaaagcagagatagcctagcttccttggacctcttgaagccccttctaagtaggaccataggacccgtaatctgcact

SEQ ID NO: 152134 - DNA, 246 bp, Homo sapiens
ggtaggatgagatatgagcgtatcgcagcgattggaagagtgaatctaaactcaccacaattagtaagaccctacaaaatctctcccctacctttctattcaaattcatttggaaccactctttcccaagctcaccatacactagcacaaataccttctctctttctcaaatacaacaagcccatcctcattctaagggccttgacacttagtcttctctctacccgaaacactctgcttccagat

SEQ ID NO: 152135 - DNA, 817 bp, Homo sapiens
tgattacagggatttaggagggatggcagaaaaaaaatagatgataattatgaaccaaagatcttcgggtgaaccaagggataatgtgaagaaaacaagatgaatcttcaagtccaatggatagaattaggaccaaaaatggacagcaaagcttgagtcagaagccatgtagaccttccaaagacacaagaaaaggccaggagggaaatgagggtgtcctgagcctgtgatgcgaatggagcttgagtggcctggggcttgctcttattaaccatgatctgtatgctgtgtaggtagagagagatggcttacaaccctcagattagggaggacggcactaaagctctgatggaaggactgtgatcattctgattattcggaccatgctgatggcctgggtatggaagaagttccaacagagggtgacccagaaccaagatgagaaaagaagcagctctgaatgtaaccaggctggatttttaccatttcactcatgagggggcattcaaatttaaatcagaagtagagggcatattttctgtagtttattttacctacatgcttgagttcacagccaaggagacagtgtacagtcaatttccatgtgcacttcttctcagaaattgtttggatgtcttcctaaagacctcagggagaagaataggcatcaactggatccaaccaaccattacagttaagattatgggggtcagcacagagagacttgattcttctcaccttttatggaagggttcttcaaccacatatggaactttttggggtgccatgtagatagagaggtagaggtattttttcc

SEQ ID NO: 152136 - DNA, 335 bp, Homo sapiens
ctggctcagcttgactgcctctaatctaactgtagctagtgtgggggtggagcacacaaaatctttggtacaaatatagctgttacgaatccacttctgtgtctctgaggacggaagaaggcaagtcctgagaagggggcatatcatcatgagctggttagatcctttagaaggtttttcctagagatgtgactaactcctctagagataccaaccacagtccatggggtctgtaacaaaatgtaacacctctttctatactgtttatcccttcattttatgtgtacagtaagggatactgtttatcccttcatttctgtagggcagcacagctg

SEQ ID NO: 152137 - DNA, 245 bp, Homo sapiens
ttcccaaagggactttggacagctcactaatgactcgttcttcagtcatgttacacagacatacatgccaacgtcaaacaaactggaaatgaatctggggggtgtcagcagcctccctcacaccaacggactgagtgtcttctgagacgggcgggggagtgttatctcaggaatgtgttggggcaaggtccgtgcttccgataaaatgctgtgcacaggtgagccagggcctggcgagggcagtg

SEQ ID NO: 152138 - DNA, 596 bp, Homo sapiens
  misc_feature (24)..(24): n is a, c, g, or t
  misc_feature (27)..(27): n is a, c, g, or t
  misc_feature (30)..(30): n is a, c, g, or t
  misc_feature (44)..(45): n is a, c, g, or t
  misc_feature (58)..(58): n is a, c, g, or t
  misc_feature (61)..(61): n is a, c, g, or t
  misc_feature (75)..(75): n is a, c, g, or t
  misc_feature (83)..(83): n is a, c, g, or t
  misc_feature (85)..(85): n is a, c, g, or t
  misc_feature (92)..(92): n is a, c, g, or t
  misc_feature (101)..(103): n is a, c, g, or t
  misc_feature (594)..(594): n is a, c, g, or t
cgaggccgtgaacacgaagaaccnttnctnggtgtgtgtggcgnncatagcagatatngtngaagatcgcttacnagtgcatntngacaacngggatgatnnntacgattactggtgcgatgttaatagcccttatgtccagccagttggttggtgtcaggagaatggaagaactctgatagcaccccaaggttatcccaatccagaaaatttttcctggacagaatacctggaagctactcaaaccaatgcagttcctgccaaagtttttaaaatgaggttgcctcatggttttctgccaaatatgaaacttgaagttgtggataaacggaaccccaggttaattcgtgttgctacgattgtagatgttgatgaccaaagagtaaaggttcattttgatggttgggaccataagtatgactactgggtggaggcagacagccctgatatccacccgatcggatggtgtgatgtcacagggcatccactggaagtgccacagcgaacgaatgacctgaagatccttccaggtcaagctgtctgtcctactcccgggtgccgaggaatagggcatatccgtggtccacgtccatnat

SEQ ID NO: 152139 - DNA, 226 bp, Homo sapiens
tgctgggtttgtgggtgtgagccaccgcgcccggcctgtgattttatttttaaagcaataaacatctttggcatgcatgagaacttctttagagtaaatacctggaagtagaattaggacaataaaccgcactcactaaggtttcttgatccccagttcagagcctgccacaactccagtgaggaagatgtttgtgtgccattccgtctctcatggcgtttatagc

SEQ ID NO: 152140 - DNA, 287 bp, Homo sapiens
tccaagcaaccagccgttttcatcgtcctctttgtgtacagtgggaaactgaatggtcggtcgggagatttagtaatttgccctaggcagagcacggcagagggcagatggaagccctcagttgtctgctgctgcggcccagagctgagcagccacagggcaactgccctctgtctgccgctagcctagcaagtaattcaccccgacctcacacgttctgttgtaaaaagtgatgggaaaaacgatcgcatttcaaggtatttagcaattccacttctgagtacata

SEQ ID NO: 152141 - DNA, 541 bp, Homo sapiens
ctcaacgctttatacttcaggcttgaacttcagatttccctactgctgagatgcagttctctgtagcattgacattttctttggtcttagaatccgcagactgaataactcttaccagcaggggaagtgcttctgtacaaaaagggcgataattatctccaccgtactgtgccatgactcccaggccatatgcagctgctagaccctgacttcgatgctactgaccttgtgagctggccccatcttctctctgggccactgtttcctgggcagtttgcattctcagctggaaatgctcaatgaccttgaacacagagtccctttacccctctatgcctcagttgtttcaactctcaagaaagggtaacagactaagactccatcacaaaaaaaaaaaaaaaaaaatttttccgggctggggggtgcacacggttaaccctagctactggggaggcggaggcaggagaatcgctggccctcgggaagcggaggtggcagggagctgagatcgccccattgcgttccagcctgggtgacagag

SEQ ID NO: 152142 - DNA, 365 bp, Homo sapiens
aagctccctctcccaatcccagaggtggcctctgtccagcctatccatagcagctggaacaaggcatcccagccccctggctccagcgggggaaggactgcttccatttgctaagggtcttcttcatttccttcaccttctcacaactgcactttctaaaacaggatattaagggaagagaaaccgagggctttggggttttttagcctctgctccagggaaaaacagacactcatccctgtctgaaattgcttcactccgagagcttgtgggccgcgggagcctcccgccacagatgagcagaaaacagagtttgtttctctatttcccagccccctcgcctctcgccctctccttctctctcc

SEQ ID NO: 152143 - DNA, 591 bp, Homo sapiens
cccactggcatcaaccttctcaccctgaacttgtgttggctctttccctgatggtacctgccttccctttcccagtggactcagctggccagttctagcccagcctgctccaatgtagaatggccaccttctgaactttcttcccactcagaactctctggctttctcagcctgggagctgcctagacacctggtccgtcctcccccagccatccttgttatgagaagatgaatgctgtggaccaaagggcttgggatgaaactaacagtaataacaacagtaagcacctctttttgttcagtcagctgtaatgctgctcagaggatcactcgacgtttcctcccaggagtccctcccgtgttgttgtggctcctttgcagatgaggtaaccgagccagtgggaggggctgcctagaggtcccatctcagacctcagaggaatccgagggtgagggctcagaatccaggcctgagctccagtagggtccctccagctatttttttcttcatgtttttggctgatgttatggaaaacagcctaatgaggtaaacatcccagacattagaagctcaggtcccctgcagcatca

SEQ ID NO: 152144 - DNA, 195 bp, Homo sapiens
taaaactgcaaaagtaaaaagcacttcatagaagaatagtcttttagcattttacccaaaatcagacatgactattcagagctatacattattttatacaacaaacagatttggtttttctcaatcttgttttctttatgaaatcctgagttaaagcccaggcacggtggctcacgcctgtaatcccagcacttt

SEQ ID NO: 152145 - DNA, 185 bp, Homo sapiens
ggctcggcacccggtaaatgtagattactgtgaaggtttttatttgagggaagtttggagtgggtgagaatattctactccatatgctcatctttacctttagtctttggtaaatttaagtagcacttccaaagcaaggctggcaacaggcatttggaatcttggaatgcctgacaatacagtac

SEQ ID NO: 152146 - DNA, 409 bp, Homo sapiens
caaaggtgtatggtcaaaatagggatctttcagattaagctaaaaatacttaatggaaaaacaaagaaatattcttttgccagatttcctctgatatctatgctttccaatgtcatctgcacttattttccatcagacgaaaagtcctgctgtttctctctccctcccatggactcctttctcttcagagttgtaggacaagacttctgccatgactggtctttttatttttgttcatgttctgtacatgtgtcatacaaccaggtatgaagtcagttttcctctagagaacattattacaaggaaaaggctggataaaaagatttgccctacttactgtctctacgaagtggatttcatcataactcaataactgctatttctatataggggctattgactaatgtct

SEQ ID NO: 152147 - DNA, 295 bp, Homo sapiens
aataattgagattcagtttgctgtacttcaggaataatcaaatttagactgggagattaagaacttcaaaagatatatagagaacaataacaatttagtaaactgacaaaagaaacacaaataaagacttccaggcagaacagcctgaagtacgtggataggataaaactctccaagtttacatttaatgcaatcaactgggagagcattactttgtagtttatgaataacattcctaatgatgaccataagtcactcaaagttaaattgtttagtcacaaaaatctacggtgag

SEQ ID NO: 152148 - DNA, 104 bp, Homo sapiens
taagccacctccacctctgtcctggccgcctcagggcgccctgaaaggaccaggacatgcgggtgcggtggatgctcttttggctcctctttgggctcctactg

SEQ ID NO: 152149 - DNA, 226 bp, Homo sapiens
ctcactcactcctgtcaagggcccacccacaccacaccttgcttttctgagtttgctcttgttcccattggtcataccctgcctgtgaaaattcttccttatcctcctgggcccagctgagacaccattcatgttaaggatcctctcctagtactcagtcagcatccattgctggattcccatcaccacagtagctgtgaactgttgttaccaatgggtatggtgc

SEQ ID NO: 152150 - DNA, 890 bp, Homo sapiens
taattttaccaaggagtgctcagaagggcaactgtgtgatattagtcatttctcttttgggtgtcacttttccttgagggttttccccactttgacttcagaggtcagcatcaccatcgatctggcccttaaggatgcttctttctcctttagattccattatccttagaagtaggtctgacctgcatctgaatcacctggagagcaggttaaccaggcaccttcccagctctgttttagagattcaggttcagtgaatgtggggtgggtgggaagcgtgtatttaaccggcagcccaggtgaccctaatgtgttcaagtttcagaatttccgtagttaatgttaaccccaaatgaacaaaaagaaataattatacaaatttaaacagcatgaaaatacaaatagcacaaagtataattttgtgatgataaaataactcaattctagccctccaagcagaaaagatttcagtcttcctgctgggcttccatccttgaccggccccagcccactactcctcttcctccacccccaggctgctccagtggcccctcttgtcttaccccccagcacagatgacccaaaacttattaaaactcaaaaccggccgggcgtggtggctcacgcctgttaatcccagcactttgggaggctgaggcaggtggatgacgagttgaggagatcgagaccatccttgagcaacatggtgaaaccctgtctctactaaaacacacaaaaaaattagccgagcgtggtggtgtgcgcctatagtcccagctactcaggaggctgaggcaggggaattgcttgaaccagggaggcagaggttgcagtgaggtgagatcgcaccactgcactccagcctgggcaaacaagagacttgtctcaaa

SEQ ID NO: 152151 - DNA, 151 bp, Homo sapiens
aggagatttgttcatccagtgattatctgttcatcccatgaatatctgttgaatgcctgctatgggccaagcattttgctttgttctggcagagcagtggataagacaaagttcccactctcttggggcagacagacagatacccaatcac

SEQ ID NO: 152152 - DNA, 510 bp, Homo sapiens
atgtaaaatggagatgaaattgttactgctgcatcatacggttttttggaaaggattaaatgaaacaaaggaagaagctgtgctctgcacagtacctggcacatagtagggcctcattaagtgctccttcacctccgctccactccccatccagttttagctgtgagttcaaacactagttttgttctcatccattacggaaagatttattgaccgtaaacagagtactttgtgcttggtgctgggtacacatggactaagactgaatactgatttttccagtgctttggatctctggcaatctaagacatttacattaaatacaatagaaagtaataaactacataagaaaggtgtatagattgaggttagagggagaggaatagctagtgtgagggacaaaacgcagttttgaatagtattgagtacttacatgtcagttgctgcactgagcacctgccgtgtgagctcatttgaagaatgtgggtatgtggaatgaagagaaagggc

SEQ ID NO: 152153 - DNA, 185 bp, Homo sapiens
atcaagtttacttaatgtaaaacattggtgttcccagttatttgtaaatctacaaaagatttacagtagaagaggcaaagcctgtgaagtgtcaacataaaggctgctgctgctgtcaacatctgttcccccaactgcatacagaactctaatggggcagcccatgcctcctgaaatctgttacc

SEQ ID NO: 152154 - DNA, 114 bp, Homo sapiens
gaaggaaggcaagctgaccccaaagtgcagactcctttgatctctaacatcagacaccgcatcctcttttcatttctttttctccgtctccattgcgcagccgtggtctagggg

SEQ ID NO: 152155 - DNA, 288 bp, Homo sapiens
tctaatactccaccttgatggtctacactgaccacactgacccttcatcttgatgcctgcactgactctccatcttaatggtctacactgatcacccacgctgaccttggccactgaccactcacgttgtccatcctccagtcaacccctcattagctctcatcatcccaccttggtggcctactctgaccatcccttgacctcatccctggtaattcccatttgaaatctgcataatttcccatttgaccatcccctaaccacccacacagacctcgagttcacatt

SEQ ID NO: 152156 - DNA, 308 bp, Homo sapiens
tcattatttttaattccgtcagaagcctgagatgtgattgattagaattgtaggaggtaagtataggacaagaaggcagcggagaggggagttctaggcagacatgagctagggtgtatccagggaacggaggggccccatacctgaagtggaacagtgggaacaggagagaagacccaagaaacaggtgcaaccggctatccagcacacccatgctgatgccccaccttatgccagctcggtgtagtctatgtggacggcagagaagtgaatcagacggagttttgactcttggggagctcttaacg

SEQ ID NO: 152157 - DNA, 296 bp, Homo sapiens
caatcacgctcagtgaatttttttgtattttttgtagagacagggtttcaccatgttggtcaggctggtcttgaactcctgacctcgtgatccacccgcctcggcctcccaaagtgctaggattacaggcattgtgagccaccgtgcccggccgctactgatctttttactgtctccatactttttctattttcccgaaagtcaaacaattaggattaaagagtaatagccttttcagactggcttcttttacttagtaaatgcttttatgtttcctccattttttttaatggctt

SEQ ID NO: 152158 - DNA, 314 bp, Homo sapiens
caggacttgaggatacaagatctggaagagaaagggagctcactgagatgaatacaaaatgccacataccatatatttttggtgttgaaagagaggcaaagaggctaagagaactgctggcaaactcacagctggataaacaaaaacgagtttgatgatgccaggggagcaagagtgcagagaaaagggaagaacagaaaacagcctattggcataggccaatgctaagctatagagggcaaagggcagaaagccaagcagaaaatggctaaaaaatagagttatctgaagactcctaatgctgacaagataaa

SEQ ID NO: 152159 - DNA, 316 bp, Homo sapiens
atgatgaatttctcagaatgtattcctgtcattaagtgatgcatgactgtatttataactctcattgctttggttaggccttctaatgttaagtagtgcgatactagtgggcttgtgtgaaaagaaggcttcttatgtgttgtaaatgagtatactgtgtggtgtaggttctggcacagatcatttatcaagctgaggccatttcttactattgctaatttacaaagatttttcagttaggtatagttgaattttactgactgcttttttatatctacggaataatattttcccctttactgctaatgtaatgaca

SEQ ID NO: 152160 - DNA, 133 bp, Homo sapiens
actcccactggaatagaagctttctgagaggttctgatcgcccttaagaagctctgtgtggctggaggatcgaaaactttgggcacaagctggaaggtcatttactgcaaaccactatctcccagctaatctg

SEQ ID NO: 152161 - DNA, 236 bp, Homo sapiens
agattttcttatagtgtaatcaaaatacaaattccagagcatgggactgtatttcttagagtagcgttgctacattaactactgtaattacttttcggtaaaaaattacttttgggtacttttgacctgcatgtttctataatgttctatgcagaaattaaactcttttgtataaacaaaaacagtgtgggcctttttagcatttttctttgagattggagacttcaatatagtga

SEQ ID NO: 152162 - DNA, 149 bp, Homo sapiens
ttattcattccgccacattttctgagcgcaaagtcagtgcctggcccccttggtttagaccaagtcatgttggcccctgctttctggtgctcacagacttgcctgggcggggtgatagaggcgcttgcagttcagcacgcggcccgttc

SEQ ID NO: 152163 - DNA, 280 bp, Homo sapiens
tgcttccttgagtaggtgagcttggtggctggtccaactggtccaggcccacccttgcacaggtggctggtggctctttgagccagcttgggcttccctggcatgcgcacgcctcaggaaataacacgctgctcccagtgagtttgtcctgccttggcacaaattctaagtctggccagggccacagaaggccgagtgccctgggtggcaatcctggctgctttctacacctgaacgtaaagtcctcctcaagaggacctgtgatctgcctcgtggcaac

SEQ ID NO: 152164 - DNA, 321 bp, Homo sapiens
ctctcggttgttagctatctccaggcctggtgataatcaggaaagacaagacccagactcaccaagatgcagctgttttctcaggaagagtattttgtccatttcagcaaagggcagatggttattacaaaccaaagtctcccaaagggctaagcagagtctctgaaagtctaagttaggtttaaggctaggtgggatcacagtgaaaacagaagaggacaaaaacaaacaaaaaaatggagtgagaagaaaaaatatcaaaaaaccaaataactttcctttggagagaaggagagagagacctactcaccatgttctctc

SEQ ID NO: 152165 - DNA, 366 bp, Homo sapiens
tcttaaaattgcattgctaagtgaaagaggccaatctgaaaaggctgcatattgtatgattctaactatacgacattctggtaaaggcgaaactatggagacagtaaaaagatcagtggaggagtttgtggggagggaagagaggaacagataggtacattacagagaatgtttagggcagtgtgactattccgtatgatacagtaatagtgggcatgtgtcactatacagttgtcaaaatccaatgtacaacacaatgagtgagccctaaagtaaactatgtatgggttttagctaatgacaatatattggttcaaatattaattgtaacaaatgtatcacactattacaagatgtaaacaacag

SEQ ID NO: 152166 - DNA, 990 bp, Homo sapiens
atatgcctgatactaacatatattaatatattttagcatggtttcaaaaattttaattaggaatttttgccttttattatatcagaaagtatattttgcagtcaggcctcaaataaatcattatgaatcttgtagttgttcctgaacttggagtgttaaattttgaatttgccattttttaaggttccagttttttgctgggcgtggtggcttacgcctgtaatcccaagactttgggagactgaggcatgcagattatctgaggtcaggaattcgagaccagcctggctaacatggtaaaatcccatccctacaaaaaatacaaaaaattagccggacatggtggtgggcacctgtaatcccagctactcgggaggctgaggcatgagaatcgctggaactcaggaggtgggggttgcagtgagatgagatagcaccattgcactccagcctgggagacagagcaagactgcgtctcaaaaaaaaaaaaaaaatctactttttgtgatacgtattttcatatataaaagttttaatttcataaatacttggtttttatagtagccttcttttgggttgagtgatttgggctcttaatttttattgccacaaatagcccacagctggtagttgcagactgtaggaattgtacactggtatgatcttacacaggtaattgggctactggaagtagaggacttgcgaaatacaaaggaagaaatgagagatgtacctgccaggagactcagtaaccaaaacaaaaacttccacttcatctaacaaattattcctttttgggataaagttaaagctgaaacgtaggtttgttggttgttctttattttcctcaaacataacttaattcagacttctcttaactttggaaaaacccaacatagataagttggatagattcttttttctattttgcatcattagattttttttgcttgaaacagctgtctttagcattaattcttagcatcttag

SEQ ID NO: 152167 - DNA, 312 bp, Homo sapiens
tccagaggtcgaggctacagtcagctatgttcatgccactgcacttcagcttgggcaacagagcaagacccagtctagaaataataataatttaaaaattgcctcttgatgaagaaagtactatgctaatcgccttttagtttcatactccttgactatttgtaaatgacattgaatctccgtaacgattatttggttaaacattttatctcttgttttatctttaccagttactccctctcttacttaaattgttctccctccaaggggtaatggtggttattaaaagaagcaatgaaaccttgatgattt

SEQ ID NO: 152168 - DNA, 154 bp, Homo sapiens
atggggcctcagcacttgcccccaactccgcctgtcttcccacatgtcgttccctgggccaggctcacactgcctcttgcatcagcttggatgtttttttggatgttccttcctcggggaagctggcctcctgctccttggccaaatcagatca

SEQ ID NO: 152169 - DNA, 351 bp, Homo sapiens
gtcacgttagaattgtgtgtcaagtaagttttggagagatgagagttgtttataagagtttcagccggggttggaaacggtggctcatgcctgtaatcctagcactttgggaggctgaggcggatggatcccttgcggtcaggagttcaagaccagcctggccaatatgatgaaaccccatctctactaaaaatacaaaaattagccggttgtggtggcacacgcctgtaatcccagctactcccgaggctgaggtgggagaatctcttgaacccaggaggcggaggttacagcaagccaagatcgcaccactgcactccagcctgggcaacagagggagactctgtgtca

SEQ ID NO: 152170 - DNA, 385 bp, Homo sapiens
ctaagacagactgtcactgctagatggccacagtttagctgcttcttaaagatcttaggaaagcagtcaatatttttaaaaaaattattaaggtctaatttacatactttttttggttacacgaaatatatctcatgggagaagttgtttgactttagtacgctggcctactctcttttactggttttatttccacatgaaagtttagccggataatgggataagaaagctgaggtaatgaagttggtcccataaagcctactaaatgaatgtcaaactccttagctggacagtgcaggctgtccacagtcaggccccaacctgccattctctgaggcccagccagacttggatgcacggctgatccctgaaaataaccctgtgc

SEQ ID NO: 152171 - DNA, 241 bp, Homo sapiens
agccactgtgcccggcccacaagttcttactatgagtccagcactgttctaagctctcaagactgccaagtcaatactggatggttcctgcctcaaaaagcttatcttatacagaaggtggtgacagtaaatagattaacagaaatgcaatctggcagcgtcataatggacacataaaactagggggttaaaattcaatgaacttgtcataattcattcccttcctaactttgtacaatag

SEQ ID NO: 152172 - DNA, 859 bp, Homo sapiens
ctcagtctacagatgcctccagtagtccgaaccaagtccgaagtcaacgacaagcaatgatggcgatggcgatcctagttaataaaaaggggggagatgtgggcagcaagccacccaggcgccgaggcaagagaccgaggacacgagctgttccagtataataaaatataaaacaagaatagttatactagatgtagatcttagatatgattgtatatgaatatcattaatcattagtttgtagcaattactctttattccaatattataataatcctcgctctacaatcataacctaggaaaaaccaggccatacagagataggagctgaggggacatagtgaggtgtgaccagaagacaagagtgcgagccttctgttatgcccagacagagccagcagaagggctccttggtctagcggtaacgccagcttctgggaagatacccgttgccaggcagaccgaagtctagcggtagcgtaagtgtcaggggaaaacacctgctacttagcagaccgggaaagggagtctccctttccccgggggagtttagagaagactctgctcctccacctcttgtggagggcctgacatcagtcaggcttgcccgcagttatccggaggcctaaccatctccctgtgatgctgtgcttcagtggtcacgctcctagtccgccttcatgttccatcctgtacacctggctctgccttctagatagcagtagtaaattagcgaaagtactaaaagtctctgatatgcagaaataatggcgtaagctgtctttctctttgtctcctctctctgcctcagctgccaggcagggaagggccccctgtccagtggacacgtgacccacgt

SEQ ID NO: 152173 - DNA, 360 bp, Homo sapiens
cagatagggttttgcagtgttggccaggctagtcttgaactcttgacctcagatgatctgcctgcctcggcctcccaaagtgctgggattaccggtatgagccaccgcactcggccccccaaattctttccctttacccgaagttggtatgcattgacttacctgtggacaacagtgatttttgtctcctgtccttacttctctctgtctccaactctcagggactcattcatcacctctccctgcaccccaccccctgacccgtgctagtttggtatctatgcctgtagctttgctttggggcatcatctgaatctcatactgcacggcctttcagatctggcttcctgcactcaatgt

SEQ ID NO: 152174 - DNA, 234 bp, Homo sapiens
cccgctctgttagaccatagtataaaagaaaatctagccccttcttcgggcccgagagaatttcgagcgttagccgtctctcagtcaccggctaataaaggactcctgaattagtctcaaagtgtggcatttctctataactcacttggttacaacaagccttttattaaaatattatttttttcattttatattttatatttagagacagggtctcactttgtttcgcacgct

SEQ ID NO: 152175 - DNA, 566 bp, Homo sapiens
aatcttgatatcctcagattaaatgctatataaaaataaaggataatccacttcaagtacaaagattcctaaagtgcagagcaaagaagcatgtgttctgaaatcttcaatggaacaaaaggagagtggtgcagttcacagcaatgctgctctcggaatgtttgtggtggcatttccctaagtgttgcaggacattttgtaagtacgtttactcctgcatgaagagactaggctgtgctcacacttaaagaaaggtaaaggggaacattatagaatggaagaattacaagggatctgaagtgtcatctatctaacctctatatttgatggatgaagaagcagaattagagaggttaagtgagtcacccatggtttacacagtgagtcagagctgaaaccaagcctgcaacccaagatcccagcttctagtcatctggtgtatttgtttttgctgcaccctcctgacctgtcccaaaggccaaaactaagtcagaaacagagctagaagtcagttacaagttgagtcaacaatgcggtgatgccattacccctgggcctgtaactga

SEQ ID NO: 152176 - DNA, 599 bp, Homo sapiens
gcagggagggagggaggaagggaggaagaaaggaagggagggaaggcagaagggaaggagggagggaaagaataaagagagagagaaaaagagtgggagagaagtagggaggggagagaagtagggaaggaaggaaggaaggaaatgaacaaacttacatgaagatgagaacatccaggggaacttacaccaccagtattttccattaacaggaacacgctaactagttattggagacagacgcactactgtaaaactatatactgtttccatggggtacaaccccttcttccttctctgaaacacattattcctctggcccactgttgccagagacactgagtcttgtctttggataagttctggtgcccaaaagaatgagatgagacagtggatcccagaacaccaggccgcaaccttccctgctgctccttgtccactccagaagctgcccagctgcaggtgggggcctcagcccctgggtctgacatcgtccatttgtcattctcactggacttccctccttgcactggctcccactcccccaggacctggtggacggccacgtgagaaggatacaaacaggccatgcccctttc

SEQ ID NO: 152177 - DNA, 471 bp, Homo sapiens
ccaatatgcccatgctcctgtggaggctgagttggaaagtgacacgaagctgcccccccgcaagagagcaggtgctcggtttctcttctgcttacaggagatgcatgtcctgatttcttgttctcctaggtgtttttattgagatgtagggaatatctgaattcataacgacttagaaaatctgtacacacagttgagagaacaggtctcgaggctaaggtgctgtttactcccgtgggctggcctgttattaaaatacttgtgcagcgactgatgtttacaaattactatgttggaggttaaaatgatcaaagtgataacctccatcctgtctatcatgtttgaggagaattggttatttggttcactaatgttctgtttaaagaaaatttctgtaaaactagtaaatgttacccctcatcttttgtaagttaaaaaaaagtttaaaataatgtttgctcatcaaaagtg

SEQ ID NO: 152178 - DNA, 373 bp, Homo sapiens
gctcccctatgcccctctcctggcactgcccgtgttgaggaggcagcactggggtccggcagcagcggcacggctgcgcccaagcgcactgccaagccccgctgtctggttcctacaacgcggggctggccgctgctgaactcgatattatttttccacatggcctctgcctgaagatgaggagcatctctccggaaggtcccgcgagagagttagacattgctccattccactccttcccccatcaccaccgtctcccctgccagaacaggtcctgtgtgcggctgtaggaacagaggggtagacttcttcctcatcactaacccggtcccttctccgcctctgcagatttcgtgatccaaagcccgattca

SEQ ID NO: 152179 - DNA, 560 bp, Homo sapiens
aacgatggtcctcagctactcgagaagctgaggcaggagaatcaactgaacccgggaggcggaggttgtagtgagccgtgatcacgccactgcactccagcctgggcgacagagtgagactctgtctcaaaaaaaaaaaaacaaaaaacaacagtggtcctactctggcccaaaggggcacaggaggcttgagcctcacatgtccccaccacccgctccttggtggcccctggggccctccagggctctgtggtaatccacacactcacattaccctcagctgagtctcacagccctgcaaacctagtgttctgttctcccacttaaagatgaacaggcaggacgcaggggctcagctgaggaccatcgtggcaacgagggtcctcagctctatgagcagagggaaggagaagcacggtttaaaagctgtcagggggttactaggaggaagaagtgagggatgaatcatagcgatagaagtattatgaggccaggctcatgcctatgactccagcactttgggaggtggaggctggaggatcgtttgagcccaggagttc

SEQ ID NO: 152180 - DNA, 209 bp, Homo sapiens
cttctgatttttgtcttcttttccctgactttcttgggggttggatttctgttttgctctaaaaccctaacactaccagcatatttaattgtaaggttttctagtatgtctccccatttgtgtatttagagaaatggtcccagaaaacattggttcaacattttaggcagtaaatacttatttttactttatgctgataattactatga

SEQ ID NO: 152181 - DNA, 896 bp, Homo sapiens
  misc_feature (1)..(1): n is a, c, g, or t
  misc_feature (728)..(728): n is a, c, g, or t
  misc_feature (760)..(760): n is a, c, g, or t
nctaagcgtgactgactctcttaactaccaccgctacacgaaactttttgggaaagttccccaaaactttggggaactgtgttcccctgaagtttggagggtgaggagtgaaagaggttgagaagaatgagctggctgggttggacattcagaggtgacaatggccagatcaaccttgatggagtcttgttctgtcaccaggctggagtgcagtggtgcgatctcagctcactacaacctccacctcctgggttcaagtgaatcccctgcctcagcctccctagtagctgggactacaggcacacaccaccacacctggctaattttttgtattttttagtagagacggggtttcaccatgttggccaggatggtctcaatctcttgacctcatgatctgcccaccccaccctcccaaagttctgggattacaggcctgagccactgcacctggctgctagttcttaagagggaggtatgagacgtatgtatagactaagtgaaaggaaaatatcttgggcccccaaaatcactaagctaaaaggaaaattcaagctggaaactgctcagagcaaacctgcttcccattctattcaaagtcatccctctgctcactgaggtaaatgcatattctgattggctcctttgtaaaagctaattagaaactcaaaagaatgcaactatttgtctctcacctacttgtgacctggaagacccctccctgcttnaagttctccccacctttttggacaaaaccagngaacttcttactggattgattaatggcttgtgtctccctaaaggggataaacccagttgggccctgaccaccttgggcacaggtatcaggaccttctgaagcttggtcatgggcatgcttcctccaccttggcaaa

SEQ ID NO: 152182 - DNA, 857 bp, Homo sapiens
  misc_feature (1)..(1): n is a, c, g, or t
  misc_feature (689)..(689): n is a, c, g, or t
  misc_feature (721)..(721): n is a, c, g, or t
nctaagcgtgactgactctcttaactaccaccgctacacgaaactttttgggaaagttccccaaaactttggggaactgtgttcccctgaagtttggagggtgaggagtgaaagaggttgagaagaatgagctggctggatggagtcttgttctgtcaccaggctggagtgcagtggtgcgatctcagctcactacaacctccacctcctgggttcaagtgaatcccctgcctcagcctccctagtagctgggactacaggcacacaccaccacacctggctaattttttgtattttttagtagagacggggtttcaccatgttggccaggatggtctcaatctcttgacctcatgatctgcccaccccaccctcccaaagttctgggattacaggcctgagccactgcacctggctgctagttcttaagagggaggtatgagacgtatgtatagactaagtgaaaggaaaatatcttgggcccccaaaatcactaagctaaaaggaaaattcaagctggaaactgctcagagcaaacctgcttcccattctattcaaagtcatccctctgctcactgaggtaaatgcatattctgattggctcctttgtaaaagctaattagaaactcaaaagaatgcaactatttgtctctcacctacttgtgacctggaagacccctccctgcttnaagttctccccacctttttggacaaaaccagngaacttcttactggattgattaatggcttgtgtctccctaaaggggataaacccagttgggccctgaccaccttgggcacaggtatcaggaccttctgaagcttggtcatgggcatgcttcctccaccttggcaaa

SEQ ID NO: 152183 - DNA, 540 bp, Homo sapiens
ctcagctcatgtcctcaaagacacctggtgcagggcgggctgcaggtgcttcattcagggagccagttaacgcagactcccaggtgtcactcggggtttctgacttggttttaggcagggctctggaagtctggattctgacaaacttcttgggctattctgctgtgcagtccatttcagaagctctgctccaaggcagagagagtgctgacccgctctggcctccttcattctctgggaggagccacgaacactgagagggctgcacccattttgcagagagaagccccggtgctaagacattaccttctgggggaaaaaggagtcgggaggcggaggcaaggtggcaatagcaccttcccattagcttcagctggttcaaaagctgctcgcagggtgtcaggtcaaactcaaaaagcccttcttcccccaggatctcagcccccgggagaggccggctcactccaagctgctttattgcatgtcctcatccacagagaaacacaccccagattgtatatttctgatgtcagggcacat

SEQ ID NO: 152184 - DNA, 623 bp, Homo sapiens
aaatgtaaagatacaataaagagaataataaaatggaaactattgattcgtcttttactaattattgaccctagtcaattatttatttttttcctttacatctgttttatcttctctctctctgtctttaaatttgaagctcacagacattgccaagcattgataattagggcaaacaagattgcaggtctatgataacgtacagtctgtcctggcaataatagcaaacattgccattcgttcatttatttatttatttagagatggagtctcactctgttacctaggctggagtgcagtcacgtgatctcggctcactgcatcctccgccttcccagttcaagtgattctcctgcctcagcctcccaagtagctgggattacagacatgcaccaccacgcccagctaattttgtatatttagtagagatgggatttcaccatgttggtcaggctggtctcgaactcctgacctcacatgatccgcctgccttggcctcccaaagtcctggattacagatgtgagccaccgcacccagccacctataatttagtagggaatagttctttagagatcagatattcgagtctcgctgtcgttgtagatcactcttaagtgggccg

SEQ ID NO: 152185 - DNA, 617 bp, Homo sapiens
aaatgtaaagatacaataaagagaataataaaatggaaactattgattcgtcttttactaattattgaccctagtcaattatttatttttttcctttacatctgttttatcttctctctctctgtctttaaatttgaagctcacagacattgccaagcattgataattagggcaaacaagattgcaggtctatgataacgtacagtctgtcctggcaataatagcaaacattgccattcgttcatttatttatttatttagagatggagtctcactctgttacctaggctggagtgcagtcacgtgatctcggctcactgcatcctccgccttcccagttcaagtgattctcctgcctcagcctcccaagtagctgggattacagacatgcaccaccacgcccagctaattttgtatatttagtagagatgggatttcaccatgttggtcaggctggtctcgaactcctgacctcacatgatccgcctgccttggcctcccaaagtcctggattacagatgtgagccaccgcacccagccacctataatttagtagggaatagttctaaattcctcagatatctgctaactgtagttcagatagctgtttaactgcc

SEQ ID NO: 152186 - DNA, 262 bp, Homo sapiens
cacaccattttcattgtcactccctggtttaagaactttcatctcaagtttctatgagataaactctagtatggtgtccaagttgtcctgccacctggctctcacctacctttccagcttcaccccttactgcgccccctacatggattccctctgtatcccttttcttgcttagttttttgtgaactgctttcttcttataccgttatttattcaatatctctcctttctcttactaattcctgtttatccaaagtagttt

SEQ ID NO: 152187 - DNA, 471 bp, Homo sapiens
aggtttcaaatgcagtgagcatttttgcattattttcctttaataatctttatgcaaatgcatgtagtaatcacatctccacattgattgaataattttagagacctggattactgtgacatagtctgtagtgggctataattattagatattcagagagttgcagctttttttttttttttttttcagtgagtcttgaactcctgacctcagttgatccaactgcctcagcctcctaaagtgctgggattataggtgtgagccaccatgtctggcctatagtacgttttgaagtgatgatagacttcattttccatgggtttgttttcttgggccatcctggtgatgagttggtgatgagtttttactgtatcactgttctttgaagtggtaattactgcccagctactgaactattcttttatatatttattagatactattgatagaaattacacaatttagataagc

SEQ ID NO: 152188 - DNA, 262 bp, Homo sapiens
ccatttctccctgctttgcctgcacagagtgctgtaatctttgactcacaaagtagtgctggtgaatcccagctctggttctctggtaggagtggagcattccccagccccacaaatcagcgtgggtcctgtcctctcctcccactttttgcagtgacctgcagagctgccaccgttaacactgccagcttttgcagaagaatatatagtggctcaaaccacttccttgtacatctttttttaaacggaaaaatataagtta

SEQ ID NO: 152189 - DNA, 232 bp, Homo sapiens
ccgagagggaacacacacatccacgcgcactgcgcagatgttcaaagcggcatactgtgtcaccacaaaggggaagcggcccaagtggctatcaacagatgagtgggtcagcacagtgtggcccatccgcggaggaacggggtcagcagagggtgacctgtccacgcactggaacatgacccggccacgaacaggaaccaggctctgacccaagccatagtgtggatgcacc

SEQ ID NO: 152190 - DNA, 362 bp, Homo sapiens
aaagtggcattggatatagagtcagaagactggatcaaattctggtggctccaattattagcaatgtgatctcggacaagacatttagccttttaaaaaagactttacaaaatgatgttaatacataatctcagaagacagagttatcttattaacctcctcttttgacatctttagaaactttctaacagattacttggcttcccatccttttggaatacttcaaccaggttagtttatctaaaacagtttcaccgcattgtatctcaatgaaaaaaacttttaattgtgtctacttgcatagcaatcttccttttcagtcttatttccttttatttattcttttgagaaagggtcttact

SEQ ID NO: 152191 - DNA, 194 bp, Homo sapiens
cttacaggagtgttataagcctccatggcaaggtatgagttgtgcccggtcccggtgggggcccaataagagggatctcctcttaatatgattccatttcctctgggggtacatccttcaatataaggtaactctcagtgggcaaatctgattcactctgcggaagttaactcagcagcctcctgggagaaaat

SEQ ID NO: 152192 - DNA, 406 bp, Homo sapiens
aatacccgctttcacacagtaaaaccattttactttatctccacggcctgccatctgtatcagtgccccaccttctgaccccattatttcctgtgcactgatatttctaccaatcgccgccaatcacctcccctccatgactctagccctatgcagtcaagtgtgccagggtctggagaacctgagtcaaagcaacagttctgggccctgaacttacagaccacatgctcctgaactgggaacataaaaaagcagttatcaccaaccaaactggggagaagagtataatgacagaaatcacaggaaacctgggtcatagatgctcaacatatggaaatcctgggaaataaaaaaggaaggggaaggaaaaagagacaccccagaggccttagagccaaattatatt

SEQ ID NO: 152193 - DNA, 399 bp, Homo sapiens
gagaatgttcagcctggagtggagacacccctgggaagcccaacattgtcctctgtgcggtcatgtggccttactctgctcggaacagggaggccttgctgttggagctgccgggccagatgggctgcgtgggctcctggcacaggcagaacttggctgaccattggctcccagtgccagccaaggctctgcaaacacccgagaccctgatggagactcaggctttgggagcacctcctaatgagctggggaggatactgtgttttcttcccagtggggggtgaccaataatcttaaagttttttccctttctccagacgttcagctgtggtccgcactctggattgctctatctgccctgcggactggatagaggctcagcgtagatgcccagctgac

SEQ ID NO: 152194 - DNA, 546 bp, Homo sapiens
gctttaagttggactgccccacatgggtttggggctgtcccacttgaatagggtctgtagcccctttgtttaggccaatttctaccatttggaatggctgtatttacccaatgcctgtacccctattgtatctaggaagtaactaacttgctttctcattttacaggctcataggcagaaggaacttgccttgtcttggatgagactttgaactgtggacttttgcagtcaacgctgaaatgagttgagcacttcagggactgttggcaaggcctgattgatttcgaaatgtgaagatatgagatttcggaggggctcaggggtggattgatatggtttggctgtgtctccacccaaatctcatcttgaattcccatgtgttgtgggagggacctggtgggaggtaattgaatcatggggcagatctttcccatgctgttctcatgacagtgaataagtctcatgagatacgatggttttataagggggagtttccccacacaagctctctctttgcctgctgccatccatgtaagacgtgacttg

SEQ ID NO: 152195 - DNA, 125 bp, Homo sapiens
cccctgggacccatttattttcttttaaacctctttcattgtgcaaatgacattattattttttatcatactctacatggtccttttcaccattacctttattagtgactggtttctttgtttcc

SEQ ID NO: 152196 - DNA, 396 bp, Homo sapiens
ttcatagcacatttagtgtataaatataataatacatgtctacgtgttaaaaatgaatgaaaatacctacattgggagtgggctgaatccacagaaagttttactgatggtggttcagggaatgtaagcaaaaggatttcaaaccaatgtaagagcatgaaatattaatgacatgtttcagataaaaatctctgtgtaggtttttcatagccccaattcaagttagactgggcaagaaatgagattatttaggcaaaaaaagggaggagcactaaattcatccacaattttaaaagtatcttctttcaggaggcttttggacagtaacatttccaaaaaaatatagtgttttatgccacagagaatcaagttgcattgtgtatactaaatggtcaa

SEQ ID NO: 152197 - DNA, 451 bp, Homo sapiens
  misc_feature (382)..(382): n is a, c, g, or t
ttcatagcacatttagtgtataaatataataatacatgtctacgtgttaaaaatgaatgaaaatacctacattgggagtgggctgaatccacagaaagttttactgatggtggttcagggaatgtaagcaaaaggatttcaaaccaatgtaagagcatgaaatattaatgacatgtttcagataaaaatctctgtgtaggtttttcatagccccaattcaagttagactgggcaagaaatgagattatttaggcaaaaaaagggaggagcactaaattcatccacaattttaaaagtatcttctttcaggaggcttttggacagtaacatttccaaaaaaatatacatatcagataaagaacaaaggaaatcagatactgtngtgatgaaatccatcaaattttcaggtaaggcttaaaaaggtgaagatagggagaaaaaaccttccatg

SEQ ID NO: 152198 - DNA, 321 bp, Homo sapiens
ggctcccaaagtgctggtattacagatatgagccaccatccctggcccatagttcttaattttaaagaagccaaaattaatatatcctttcttttatgattattgatctttatgtcctgtctaataatatttgcttctggcaaggcttctgaagatgttttcctattctttcttctagaaattttatcattttatgttttatatttggtcttaatttttatggtgcaagataggagggtcactttcatttttcctatatcaacatccaatcgacatttattaagaaggacatccttccccagtgacttgtaatggcatctt

SEQ ID NO: 152199 - DNA, 608 bp, Homo sapiens
tgtggtggctcacagctataacccctgcactttgggagtgcaacgcaggaggatcgcttgagctcaggagttcgagaccagtctgggcaacaaggcaaagcctcgtctctgcaaaaaaacacaaaaattagccaagcatggtggtgtgcatctgtagtcccagctacttaggaggctgaggtgggacaataacttgagcccaggaggcagaagctgcagcaagtcaagactccaccaccgtactctagccttggcaacagaacaaacagcaaaggcatatgaagagacccacaacataaaaaatccagtacagacaagagatatgaatatgtaacagaggaagaaataatccctcctagtaacagttcctgaaagggcgagaaggactaagattcaaattatgaaacgtaacatagaaagggctattgcagtggccagactgtaactcaagtacagttatgacttcacatgctagcagtatgcgacactgtcttataaggcaataatttaaatatgtttagaagcacgagtgcgcgcgcacacacacacgcgcgcgcacacacacaaatgcaatttgccaggtggtggctcgtgtctgtagtttcagc

SEQ ID NO: 152200 - DNA, 330 bp, Homo sapiens
gaaggtcagggaaggctgtgtggaggtgaaacttgaacggattgaaggacacatgtagaaatcactgggtgaacgagactggagaaaaggctataggaaaatttactccaaaagagggaattggatgcaccaaaataaagagaagaggagaggagaggagaggggcacaggagagcagaagtaggtgatgtccttccttgaagcatcatgttgtaattcctgggccattaacacagctacccttcagtggcttctcattaactgcaggagaagctccagcgtctctgtgtgtcactgccagcttctcatccccttccatcctcattcctg

SEQ ID NO: 152201 - DNA, 634 bp, Homo sapiens
atttttatttgataattaatttgtattcaaaagaaacttcaacagttaaatctttaattttctcctatctcctctgtgcacctgaacatttcccttatctcatttctcctctgaatcaagaattgcaaaacagtaccttctgtagctctgtcctcatcttcaagctcccagtctctttgaccactccatctctacctctgggctcccagaccttttatgaagctactggagagatctacttactccacagcaaccacagtcctttagaaccaaaccacttttggttgcctcataaaaacgactggggtgaaggatgtttgatggataccactctcccttctgactgcttaaaggaggattattctgtaccacttctatgtcccagacactaaactttagcatcaggacattattaaacattactcctcagaggagtctcccctggccatcccatctgtagcccctattctttatcgcagcacaccaattccttgacagcacttatcacagcatgtgtttatttaatgtctgcttccttccctaatctgtaagcacgatgagggcaaggactttatctgattcatttaacaatggaggctgaatgtctggtacagtgtttcttaaaacacaagta

SEQ ID NO: 152202 - DNA, 156 bp, Homo sapiens
gggaccccacagcacatccttcacccacacgtcacccccggctcctgcctggacacctgccattagcacactggtggcctccaaggcccgcacctactcggcacccaaacacacagcgaacacgcagctactaaacactcagcacccaaacactca

SEQ ID NO: 152203 - DNA, 302 bp, Homo sapiens
ttatgctgtattcatttgcgtatttccttgttgtatgtggttctgttatcaaatttatctttagataatagagaaagcatatttacattcattaataacaattaagagcagtaaccccaccattatagcttttaaataattctaaatttgttgttatttataaaaatgaaaaacccaggaacaaaccatttaattctagctttttattataaaaagagtagagccacatacattatgaaattgacataaaaatagaatgacagagacttgactttaaaagtttattccataaggataatata

SEQ ID NO: 152204 - DNA, 583 bp, Homo sapiens
accgctgagtatcgtgttacactagagttcacagggcattttgagtgtagacgtgagtgcttaaacatatttgggtttctctctcaggttttaaatgtttcaaatgtaattgttgctcatcagtgcagttatcaatgcaattttatattccttgaggggagaaagaggggtcttattgtacatgtccaaggggggtgataagagtattatctgtttaatttaattggaacaaaccattgtcttaacgcagccatggtttgaatttgttatcttgggctgaccggtgcatgtaaatacagtatgctcagcgctagcgctgagcacactcgattatcatttgtagaatcatcttcctacaaacttccaagtttcgtttttcacaaaactttttctataataatcttttgtatagtttatagaagctgtatacggtagatgtaccaaaagtttcaggctggatatattactcattagcaattcatttttttaataaaaggaaaagctatgtgtgtatattctttataacttgtggctttcttgtaaaagtgaacatttggtagtagcgtatgctcagcgctagcgc

SEQ ID NO: 152205 - DNA, 1072 bp, Homo sapiens
tactggcatctttctactaagcaagcattttacacacaagattaaataaaggtttaaagaaaggaaagtataatataagaaacaaagtttcctagaagttatagtagactgggtgtggtggctgacgcctgtaatcccagcactttgggaggctgagataggaggattacttgagcccagttcaagaccagcctgggcaacacagtgagagctcatctctattttttaatttttaaaaaaatgttataacaatatcaagtatacctcataaagctggttatgaagtcagctaacaatagcaaaacctcatgtaactcacacaattgcagaactgctcattttaccaatctgtgtggaaattttcatcattttccaaaggaaagagaaaaagtgccacttttgaataatattatcactggatacagaacatgcaaagacacgaaaataattctaatccagaatggttacattgtaaatagatcatctcaggttaattgatacttgttagtaactgtgaaaccctgaagagaaatgcttaaaacattatttattctgtaaagctgcaaaacaaactagtaagcaaaatagtaaatgaacacttaaataagttaaatataatggaaacactgcataagttatgtgatagcacagatgcaaggaaaaaatgctgagattcagttaatgcgtgagcttattcatgaagaacttatcgaaagttcttgtgtagggctgaattccacattaaatggttctatcagaaggtgagtctaataaagcctgagaaggtcaggcatggtggcttatgcctgtagtcccaatactttgggaggccaaggcgggaggatcgcttgagcccaggagttcgagatcagcctgggaactcagggagaacgcccctcttcccccacttctctaaaaaaagtttaaaaattagccaggcatggcagtgcattcctgtagtctcagctatttgggaggctgtggtgagaggatcccttaagaccaggagttcaaggttgaagtgagccatgatcatgccagtgctcgccagcctggtcaacagagccagacc

SEQ ID NO: 152206 - DNA, 490 bp, Homo sapiens
tacgttatgtatgagacgaatcacgtaggctagaggagacgatctttgtgtaaagatgctgaccgctgtggtgaaaacaggagaactaagaacttgtcggtgcccttttcctagagctctgagagcggctggcccttggcaggggtcatgattcctttccagcaatcagagagcaagctaccaggaagctcaccaagacacgctgttaaagccttgctaaaatgtgctaagatgctgtgctaagctggtcaggtcttacctacctgaattacatctaaagtggggctgggtgaacataggggtggtggggggaatttccgcccagagagctcttggctgtctcaagctaccaatgtgttatgtgctgctctaaacaaccctgtgcttctagaaccttggttagcctggctgtgatcaagatgcacagtcaccccacacagctcgctgaaagaaacaaagggaagaaagaaagagaaaacgctacttgcag

SEQ ID NO: 152207 - DNA, 214 bp, Homo sapiens
cttgcttccaaagaattactgtacggtgaggaaaaactattagcaactttacaatggagaaatctagcaaacactatgttgaccaggttatcaaggttaatgtcaccagtaacaggcatgttggtatcatataactctaatgggatgggatgagaagggcatgctgcctgtctagtattcttcctctacacctataacgctagtataatcaaag

SEQ ID NO: 152208 - DNA, 439 bp, Homo sapiens
ccttaatatgatttcaggaagtaaccaaaaagctaggcttcccaaagtaagccagatcctactttggcagtttaacttgttcccaaaccctcttccggatgacatgtgagttccacctggggctctgcatttcacctttttgctattttcgaaacccgaagacatcagaatggtgcccagggaaggcccccagagacaaaaatgcaagaccggggccaaggggaggcagagatttcttccagaaacagggaaatttatgtggggagcacacagttgggagccgtgagccagttcttgcttacaaatagcaggaagaaactagacggggaagaaaggaagacattcattactgaaggcgagggatttgactgggcctggaaactccaaaactgcagccccaaattgcttcatgaacgaagccattcacttttagccacac

SEQ ID NO: 152209 - DNA, 360 bp, Homo sapiens
cttgttccgtgactaccctgggactttcatctttcacagacaaatgacttgttttgatcctactcaaaaaatgatttataatcagctataggattttgacaagtgttctcaatgcaagattccattaactctggagattatgacattgaaaaaaatacagtactcatgaagaactgaaatgttcatgaatatcaagcagaacaagagaacagaatggattgaactaatagaaaacaagtattatttttaacctttttgcttaaaactttggtgatccttgctttgtttttctgagtcaaggatacttattttgaactatttaaagcctttaataattgagtaaactatatgcctgtgaac

SEQ ID NO: 152210 - DNA, 464 bp, Homo sapiens
cttgttccgtgactaccctgggactttcatctttcacagacaaatgacttgttttgatcctactcaaaaaatgatttataatcagctataggattttgacaagtgttctcaatgcaagattccattaactctggagattatgacattgaaaaaaatacagtactcatgaagaactgaaatgttcatgaatatcaagcagaacaagagaacagaatggattgaactaatagaaaacaagtattatttttaacctttttgcttaaaactttggtgatccttgctttgtttttctgagtcaaggatacttattttgaactatttaaagcctttaataattgagtaaactatatgcctgtgaacaaaatttgaaggacgtttgtttctctctgcctggctttgccagaatttggaaactatttgtgagaatatttaatttatggcaatacagttattttcatcagtgc

SEQ ID NO: 152211 - DNA, 547 bp, Homo sapiens
tccgagcatacacacctgcttcatgaaggctttccaccctctccccttcaattggcttctccctctcagcctataaacatgtttctgtctcatgcatctgtaaaacacaaaaatcaaaatgcttcaaatatttgcctccctctagctgtgtcttcattcatgttgagcttcctgaggagttgtctatacctgctgatttcacatcctcctcacacattcacccctcagagcagacactttccagatctcaatattctcaaccaacatcatttgccagcattatgggaattctccttaaatctcttcctctccttctctaaaaccctctagcccagagcagaatcagacatggcccctgcactaagcctctctccctgtatttggtgtgggagacagtcacagttctcactgctttcgagccacttctcaagcaagctgtctacagtcatacgctcttttctcttacctgtccatctcacaccccccctcaactctgtgttgaggatcagcccctgcccgaagcttaccaataacctccttgttgagt

SEQ ID NO: 152212 - DNA, 261 bp, Homo sapiens
ttacccggccactctagtcaaagagaagactaaacatttcagagtagctttcgtcacaaatagaggtggtgttctttcatgacaaccgaatttctcaaacaagcgtgacagcagaaacccctgagactgtgtcagaatcccaaaggagagcagatagataatgaaaaggaaaagaagccagaaaacgtaaactaaagaaccagaaggcaagagaggaggatgtcaagaaggtcggcagagtgcggtggctcacacctatga

SEQ ID NO: 152213 - DNA, 287 bp, Homo sapiens
ctttctaaatgtcattcattcattatattcatgctatattagcaaaagaaatatctattatctcttaatggttactgggccaaataaataccatattgatgaaataattaaatccttttaataagagcattttgattttgttaaatttatttttagatattaaaattttaaatgggttaaagtttcagagatctgagtaaaaaggtcaatgttaatttgtgcttatgagagtgtgtctcacttcagttatataaataatacaaatgatagatacatgcagaaaagaa

SEQ ID NO: 152214 - DNA, 227 bp, Homo sapiens
gcgggtagccgttgcttctgggtagtcccgtggcttgttggttagccgtgagcttgtgggttgacctgtggcatgcagaaagcgcaagttgcaggtatgtgtgtaactctatttctagagctatagacggacagagtgggaaggggggattctggccgcaaccaggtgcactgactccagaaggatccacgctctgcacagatgagccgggtttatgaagggatccc

SEQ ID NO: 152215 - DNA, 309 bp, Homo sapiens
actatttattgtaaatgaataaatcaatatttggtttacatgtaccagtccccacgagcatctgccatgagagaaaaaacaattttctgtgctgatgaaaatcaagggtctaagcctgtgacatcaacgattaggtcctggatagtggtgtatctggcaaggacttttccagctttgggggactcttgttaaggagctgctggtagcagccccacttcaatgccaattttatcacttgaggcagctgccattattacattatgctaaacagcatgtgagaacaatgaaagttagactaggcaggtaagg

SEQ ID NO: 152216 - DNA, 557 bp, Homo sapiens
ttttatacttcagtcaacggtgagtttggttaacatgtgaactggtcatcaccacatacacacacatgccttaaccaaccatttacggatatactaatattcaaatgatcaagttgaagataagcacctagaatgtggtgatgtgtctgggcaggcagacaaccttcctcagggtatacataccaatctcatcgtatgtcttctattcaaactttaataagcagctcttctggctctatacctagttttctacgacaatatacagatattttcttttttttcttgtttttcgagatgaagtctcgctcttgtctcccaggctgatttttttttttatttaaaatattgggaatgggttttataatgccttgaattggtggctctttaaagtttattggagaattacatactctaaaaaatttgtggaaagctatagaccctagcgggcctccgaaaaattggtatctatacataagacaatatggcatgcagttttcaggagaatcacaaaccctctgaaatccacatacctcagaataagaactagtcttacacat

SEQ ID NO: 152217 - DNA, 288 bp, Homo sapiens
aaatatctcatccatttatttcctgaaccaggcctctgaggctgggtactttctatatcaccgtccaatgaacctgactctcctcagaaatatcctgggaggcaataccttccttctcctcactggatagttaccactctggggtctttatcccctctgtgttccaagccaggctagaattcatactatattgtcccgataatcaacgtaaaacttcccatttcaggtcccttcctcctatcagaaactgaattgttgttgataatgaagctatctctccaattcccc

SEQ ID NO: 152218 - DNA, 410 bp, Homo sapiens
ctaggtcaaagaatatgtgcatttataatttgggggagaggaacagtatttcatccatttttttgaaaggttatacaatgagcatgattcagcatttaaagggtagataattaaacttctttcatacccctttactgctactgtccattttcccattagaaacaatcactgttcacagctgtttattttcacagagataatctaggcaaaataaacttacagataatattaggaagatttctctcattcaagcagatttttgtatgttgttctgcactgcagtctatcagaagcagaaagctcttatcaagatattaattaaaacagagacacttggctttagtgtaactatttgagttacaaatactctttattgtcttacaaatcagggtttttattgttgttggttc

SEQ ID NO: 152219 - DNA, 753 bp, Homo sapiens
aaaccccatagactctgcctaaaagctccttgatctgataaacaacttcagcaaagttctagacagaaaatcagtgcacaaaaatcagttgcctttctatataccaataatgtccaaactgagacccaaatcaggaacacaatcccattcacagtagccacagaaagaataagatacctaggaatacagctaaccagggaggtgaaagatctctataatgagaattataaaacacagctgaaataaatcagagatgaaacaaatatatggaaaatcatttcatgttcatagataggaaaaaaatcaatattgttaaaatttggggcagtcatactggccgaagcaatttatagattcagtgatattcctgtcaaactaccaatattatctttcacagaattagaaaaaaaaaatattgtaaaattcatatggaaccacaaagagcccaaataggcaaaacaatgctaagcagaaaggacaaagccagagtcatcacagtacctgacttcaaattaaactgcaagactgcagtaactaaaacttcatggtactgggacaaaaacagacacataaaccaatgaaagaagctagagaaacctagtaatcatgctgcacacctacaaccattgatagtcaacatttgtcaactcaagatggattaaaactgtcttttgtggaccccagaaaacaagcatttgaggctcaacatgaatgtaaatgctccagtactgcgcacgacagcccaaaacggag

SEQ ID NO: 152220 - DNA, 138 bp, Homo sapiens
tagtttgactatttcacacaatatgcccccatctctctctcccagaatgagtacatctttgccagtgtaatctttgccacttcccatgatgtcccaggtatatgccaaatcactctctgccaaattaacatccccact

SEQ ID NO: 152221 - DNA, 362 bp, Homo sapiens
cagtaaatatttcaggtttggcaggccatatagtcacaattactaaattctgccatcacagcagcaaaagcagccacagacaatacataaacaaaaaacaaacgggtgtgctgcctgtgttccagtaaaactttatttatggacattgaaatctgagtttcctggccgggcccagtggctcatgcttgtaatcccagcaccttggaaggctaaggcaggtggattaccagaggtcagaagttcaagaccagcctggccaacctggcaaaaccccatctctactaaaactacaaaaattagctaggtgtggtggcgcacatctgtaatcccagctactcgggaggctgaagcagggagaatca

SEQ ID NO: 152222 - DNA, 242 bp, Homo sapiens
acgtgcattctgtatttttctaagagtagggccaggcttttcctgagcagtcgggcagcggcagaggggtgccctgtagggagcttacccaggacctgccaagcacacctccttggccacagtcacagcgcacgttctgaggcaccaggctgaaggcgcagtgcctgtcccagcagtgataagtatttgtggtttgtttttgaatcagactggggaagactttgagccctgctgagactcag

SEQ ID NO: 152223 - DNA, 597 bp, Homo sapiens
cagccatacagatacctgggggtgatagtattctagtcagaggcctgtgcaaagcccctgaggtgaatgtgagccaagtgttcctagatcagcgaggagactaggtgtcactagcagggagggagctagggagagacaagtaagggatgacgttagagaagtcacagagccagatggtggagagcctcagaggccatggggagccactggggactttgtgcagaggagtgacatcatctgttgtagatttcagtaggctctccatggtgctatgtggacaatagagtgaaaggggaaggagctgaagcagagactgtcagtaggaggctattgtagtaagccaagtgagatggtggtccagagtggagcggaggaggggagaagtggtcagatactacatgtaatttgaagacctgcagggtagagccaatggggtttgctgaagattggttggttggtatgagagaagaatctgggagaattccaaaattttagcttgtgggaaaattgtgttgctgagatggagaagtctttctaaggtggagcagggttagaaaatagcaggctcttcgctctggacatatcaattttgagatg

SEQ ID NO: 152224 - DNA, 395 bp, Homo sapiens
ggggcctatcttcaggcaaatataaaattgtcactataaaaagccaattataactataattaagcatggtggatgatgcctgtaatcctagcactttggaaggctgaagtaggaggatcacttgagcctaggagtttgagtcacctgggcaatatagggagaccttgtccccacataaaattttttaaaaaaatggccaagcgtggtggcacatgcctgtggtcccagctgcttgggaggctgccgtgggaggattgctttagccctagaagtcaaggctgtgatgagctgaaatcacatcactgcactccagcctgggccatagtgagaccctgaaaacaaacaaacaaacaaacaaaacaaacaaaaaaagaaattctttgctctctgcaagg

SEQ ID NO: 152225 - DNA, 503 bp, Homo sapiens
gtcctgtcatacgtggtccaatgggtaaagctccttagaactccaatggtaaccaaactgcctacatccatttgcatcttctgcaatccagggatttaaaagtaatggcttctggcaagtcatctcactacactgctggtcatctctgtaaactcgctctgtaaacggcagctgataactagctctgttccttgagggaaccaacaggtccctaaggggctctgcctcactccagtgaggttcaggagcccaaatggagtaagttccagttaagctcttcatgttctgtgctgatatgccaggcaccaggagttgtctttaacattgtacctgcaccagccaggctggccagtgtaatatttttcaattagcaaatcttccaataatagcgttttaacaatgaagatctaaagaaaaaacttgttcttaatttttgtccaaggaggggaaaaaaaaaaagaagacttctaataatcatatcatcataaattctaatgtgggga

SEQ ID NO: 152226 - DNA, 582 bp, Homo sapiens
gtcgagccggacccaattccagttccagcgtacattaatcaaccaattaagaacagacttaaacaaaacactaaagcataataaacccctgactgcttaatagctttctactcttaatagttgtcttcctgcagtctgctcacaagattagaagagtaatctattcaagtcttaacaaaaattacatgaggaaaaaggaaaaagtaaacccatgcaaaccagacattttaaattgtaaaaaacagaatgctacttaagggttctatagttcaaatcaaaacgtaagagactgagccacacaacacagtatcaaaaaatctcatcagtatgaaatatggtaattcttttccctgaaatacctaaaataattaattcatacaaatgagccttatattttgaaattttagatgactgcattctttaaaaacactatttacccactaattaacagatactataccacttggcataaagtaatttgtgaggagaatctgaggtttcaattatggtagcatataccaaaccataaaatttttaaaaataagaggaaaattaacaaaactaggtcaggtcttgtccttt

SEQ ID NO: 152227 - DNA, 410 bp, Homo sapiens
gtcaggcgtggagctcacattctcttctgcctgattgccgacgcttgttgccgagatggtgaagcagtttgtgtgcaggttccctgggacctggcttagcccacctcatttcttggggcgtgtgccttgtgcctcaaagactttgcttttggctaattgtcattagtgatggtgtcaccatcctgggcctccttcagaagtttttaatagggatctcgtctaagagaccaaaaagctttcagaaccactgacttgtggtgatttttgcatgccaagtatttggaaaatatctggagccccttcagctctcaccagttaaacctatttgtacaattgttctggtttcttcctgtgcttgaaaagcctctttctttgttgcgttaatacctctgtcttgctttcctcatgtg

SEQ ID NO: 152228 - DNA, 234 bp, Homo sapiens
cttaaatgatttggaccacaatgaagaaaccctatatatgctttttaagaccaattatctattttggcaatgaatcccatatggtcttgcctccttgaactctttcaggcatttatgaatcatcttttccaagagagtaaattctgggaaggcagagttttgttattcacccattttatcctctgtggaacagagtattgtgcttcacagttaataaaagtactttggaaaaag

SEQ ID NO: 152229 - DNA, 181 bp, Homo sapiens
ggtgcgagggagcagtgtgctacccaccttccagcacccaccacagcgctttggaacacagcccaagtctgggctgagcccctgacatggtactcaagagtactgaaggaccacagctcctcagacctggccacctacaggggaggtaggtgggctccagagtgacttctatgccatcctg

SEQ ID NO: 152230 - DNA, 593 bp, Homo sapiens
gctttggagtcgctggttctaagtgtcggtctctccactgatagagacagaggcagagggcattttttcttggaagggaaactgcttaaataaatcaacctcaagtcaggggaaagagaatgttaaaaaaatacagaagtggaatgaatgaacactcccaaaaggaacgagaaaactctcattttcaacctgatgctcccgtcagcccttccgacatgctcgtcagccacagtcactctgctttgtctggggtcatgagacatccgcaggcagaggggctacagtatccctacaggccagaccaacaggaggagggactctagctgaagctccatgacccttctgccctccagtctgggaggagggggcgtgtgtatgtgtgcgcgcgtgcgcgtgtgtgtgtaacaactacaaggtgtcccaaatcctgttctcccatatctggaaaatctgtgacctacataaagccagttcctgcctagtgaggaacaacaggaaaggatagaaaccaagggcaggtggtcgcttctggaggctgctgctggcttcaatgggcatgcctctgtctggcccataatcttgatttctgaaca

SEQ ID NO: 152231 - DNA, 565 bp, Homo sapiens
gctccctctatctgttaccacattacaaagtgaagcaactctgtaagctgctaacacgaaaagacgcttagtgctggctctcctcatacctctctggccattcttagttgcccctttgagctactcctcctctgatagaccttaagtgctatgccctctctgtttctaagagcaacatattccttctgggaagattcccaaatccatccctctagcccagatctttgtcctgtgctccagaacccaaatattcaactgcctagtggacaggtcccaaaatcaaaagtccaaaaccaaatcttccaagtctttcaatatgccttcccagtcttggcaaatgacatcaccatctgcctacttgaacaaggcagaaacctgggagttatcctctactcttcactctccttcacatccaattaatcacagtcttatccttcctgccttcttgagacggagtttcgctctagttgcccagactggagtgcaatgctcctgggttcaagcgattctcctgcctcagcctcctgagtagctgggattacaggcatacaccacaacacccggc

SEQ ID NO: 152232 - DNA, 112 bp, Homo sapiens
ttggactgcagaagggtggtgatgaattgtaacagaaagggtagctttctaccctatgtgaagagctcgctaatgtgtttttcttttttattctggtcaaactgtataatta

SEQ ID NO: 152233 - DNA, 133 bp, Homo sapiens
cccagcctctctgtgtcttatgataaaaaaaatactggatgagacaagactgaggaggaagacccagggaccctttttagcagagcttaccagcgggtgtccaaggattgaatttcccttcctagacatgttt

SEQ ID NO: 152234 - DNA, 381 bp, Homo sapiens
ctgggactacaggcacccaccaccatgcccggctaatttttttttatttttagtaaagacagggtttcaccgtgttagccaggatggtctcgatctcctgacctcgtaatctgcctgccttggcctcccagcactttggccaccgcgccggccttctttttcttttttttgaatcataacttggtggtgtgctataaagaaaagctaaaatatattggcagtaatttgaggaattaattttagaaatttggatataaaaatgttgctttaaggtcattctgtacacaggtaactcttaatattgcatcatttacctgaaatgcagccaaatcagttttctttgtgacagattagagggttacaaagtattttatgaactaa

SEQ ID NO: 152235 - DNA, 419 bp, Homo sapiens
gtttggtgagggccctggggtggccaggcgcctggtcagcctatagtcaggatatagcataaagtggactgatcctactgaatcttccacactggcctctccagtggcccaaagctagagagtcaaaccccaggatgaaatcactttcccgaggaagtatctatccactggcttcccaggctgtggttcattcacgcaacaccagagcttcctccacagcaacccccacaattcacggtttcacatttgattgtgttactatttaattagcatttgtctctctctctttagctcacatgctacaggaggtcaagcgccatggctcatgtgttcacagtgcccagcacagaagcatgcacatagtaggtgtttatttaaaaaagttgattgaatgctgaatgagtgagtgggcactcttc

SEQ ID NO: 152236 - DNA, 246 bp, Homo sapiens
gagtctgagggttggggagagagggaagtgcagtcagaggccagggtgggcaggagggtacagccaggccgcctggtgcaggagacccgggagcacccccttccttaacgagcacctttgcttcctgctttctttttttttttttttgagacagagtcttgctctgttgcccaggctggagtgcaatggcacgatcccggctcactgcaacctccacctcctgggttcaagcgattctcctggctc

SEQ ID NO: 152237 - DNA, 658 bp, Homo sapiens
tactccagagtcagggtcaaaagggctcccttctggatgaagtctgggggagattccgggtgggcctcctggggactttccacaaagatccaaccgcattcccaagccagagtctcagccacctgctcccaggatggcctctccagaaggagactgactgagaataccatccattataaccagtgaaccagccttcagaaataacacacaagtaccacgggagacacaagagtgctttctgtatggcaggccaggctgcagactccaccgggttcccttgagagacagcccagctcctacattaccttcaggaagcaggttcctgaagtccagatttgatttttctaaaaaaactacggcagaatcctcagaacctcatcctctccctttctctcgcagcctgactccccctacaggcaggatgcaccacagagaagcccactgggtggtgagttggacctgcttccacgtggtcccttgatgaaggcggcttcatcacccaccagcctcagcctgagaagtaagatgaggtcagctgggaaggccaggcttaggcccacgggacacgatcccgggagcagaaggaaaggccgctgggggtgacaggccttccccatcaccgcaaactcctggttttctagctttttcctctcacagc

SEQ ID NO: 152238 - DNA, 372 bp, Homo sapiens
ggtccccttgatacatgtctcaggactaattattttacaaggccccgaatcactaacaaaactgttgactacagttttggcaatcatcatttaagtcattactaacggttggatgcaataaatagagatgacagaatggcaaacagctgagatcccacctccagagcccaagaacacagtgtcagagaaagctaacagccacagcagttccacgccggctcgcccaagtcttcagatgtggccctgcccaataaatcagtgtctgcaatggcaagggccactctcttacattttacatcatctttctttcttaatctcaatgttgatgatgtccacttagaagctcaaaaacacgatgagatttcttcaatg

SEQ ID NO: 152239 - DNA, 239 bp, Homo sapiens
cattgaaaggctattgcagtccaaaatcaggaaatgatttaatgaggacattaaacttcttttaacttctctccttcctttttgtacacattgtaagcatcctcacctctggttttccttatcacatagttttacctccatgatcttagttaactctgtcaaaaacttggtgtgttcatgtgcagtctccacacctttgtgtccaaaatatgtcttgattctagccaattttgtgtccc

SEQ ID NO: 152240 - DNA, 105 bp, Homo sapiens
tgccctctgggggaaagaacgtcacacaagggccaggcaagcctttgtatttattaaagactggaggcaagccagggttttccgggaacagcagccgcctgtgag

SEQ ID NO: 152241 - DNA, 253 bp, Homo sapiens
ggaccttgagaagtcactggaggcgggtaaacccaggagtggcagcatcgatttaccctttgagagaacatactgggatgctactgagtgaggaaaacaatagcatagaagagtgtgaaatctagtctccctccttcttaatcaagtaaattgtatattgcagtccttaaaagagattggtcacaaataattttcaacacacctgataactgtgcaaaacttctttttgtctcatttttgagaagtgctctgg

SEQ ID NO: 152242 - DNA, 363 bp, Homo sapiens
atttagtgcagagttctacagagaaggagctaactcagtcctgtttaattgaggtttaaaagagaacactgtgatgcttctttgatcatttatgaatgttatctggtataaccctttgaagtcctctctcaaagagggcacagataagcaagacagcaccactcagcactctggaaggtatttctacttcctttcatctatccatttaacaaatatttacttagtgattaatacacaccaggcagtgtaggctgttgtgattaacaccttgccacaggtctaggtagctactgtcggctctctttcactctcatcccatggaatggtaacttttctcttgctttcccccactacttcattatt

SEQ ID NO: 152243 - DNA, 197 bp, Homo sapiens
tgtattgatctcagtcaagaacacattggccacatctaaggtcagtgatagtattttgccacggtcatagattttatgttgtattcatgatacatacaggtaattagaaagactgagttcattaaatatattcaaaacacagaaactttttaaactccataaatagtagtaatactataagtagtagtacagggtaa

SEQ ID NO: 152244 - DNA, 551 bp, Homo sapiens
ccttctggaatcgaatgtaattccacagatcttctatgttaatgtgcatcggattcctttttcttcactcacttatgcttatgtaccactcactattcctaattcactaggaaaacccctgatgtagttgggctgtgcccctacctaaatctcaacttgaattgtatctcccagaattctcacgtgtagtgggagggagccaggaggaggcaattgaatcgtgggggccagtctttcctgtgctattctcgtggtagtaagtctcacaagatctgatggatttatcacggggttccgctttagccccttcttcatttttctcttgccaccaccatggaagaagtacctttcacctcccaccgtgattctgaggcctccccagccatgtggaactgtaagttcagttaaacctctctttcttcccagtcttgagtatgtctttatcatcagtgtaaaaatggactaatacaaccccctcaagatgatgtattacatcaggaagtagtcttgaatgcccatgccaaagttgggctctctcatctgattccctt

SEQ ID NO: 152245 - DNA, 366 bp, Homo sapiens
gaaacaagattttaagggatattttatggctattttaaaaggcaaggcatccacaaggaggaagctcaaaagctctttataaaaatcaaattggccactctgggccttacaaagaacatgcccatttattaactgatgaaatgtacttgagtgatggctccagtcaactgtttatttttccaagaactctgagccccagtcctaaaaaatcagcttaatatatgcctcaaaaattccctgacagttttaggaagaactggttttaccaacaccaacaagagtaacttgtctattcactgctctaggcatttcccaggaaccatctgtgatctcaggacaatttctagatgtgatctggtgggccag

SEQ ID NO: 152246 - DNA, 140 bp, Homo sapiens
cgcccatcccaggaccataaatttgtggccttgaacttgctgccctcgactggccctttccttctccctgacctgggtctcttccccggggctctttacttggaaacctgcctattgctcaagtcagcctgtattttctg

SEQ ID NO: 152247 - DNA, 170 bp, Homo sapiens
tgtaaattaccaattatacactgaccttctccaaccagccctgcgtttgagctgggtctcatgttttctgtagcatcctccctgtctacaggtggagccacctgctcctctctcaccctccatctctctccattttctgatcccaagtgagattaatgaatcttgtttac

SEQ ID NO: 152248 - DNA, 230 bp, Homo sapiens
gcacctagcacactaaatgctttggagggtcacctaggatgttcaggagtcctgtgaaggggcctacatcgtacagcagagcactgaggttcagagaggcatcagacacccagctccatcggctggaaaagcctaggcatctccactccagagggcaacaggcagtaggcctggtgaccacttcagcttagcagactgggactgcacactttcagaggcagcatcccaca

SEQ ID NO: 152249 - DNA, 653 bp, Homo sapiens
attcctttccttggtcttaaatgccctacacatcagtgattcacaaccctagtcatatattagaatcatctatggaggtttttaaaaaattattcatgcttaagctccatcctggacctattaggtcagaatctggatgtgatgctcaccaaaattttaaaagcctaccaggtgattcttcttttttgtcgttgttggagacggagtctcactctgttgcccaggctggagtgcagtggcgcaatctcagctcactgcaacctctgtctcccgggttcaagcgattctcctgcctcagcttcccaagtagctgggattaaaggcaggcgcgtgccaccacgcccggctaatttttgtatttttagtagagacggggtttcaccatgttggccaggctggtctcaaactcctgacctcaggtgatccgcccgcctcagcctcctaaagtgctgggattataggcatgagccaccgcgcccggccagttctacactaattctcaaatgagatcactacacaatgagaactttgctatacttaccctgtgggcattatagtacaaaaccacaaggtatctgttacaaacattgaatcccgataggtgatcacatgcattcttggcatcaaagatgtcctcatagaccacataagct

SEQ ID NO: 152250 - DNA, 195 bp, Homo sapiens
tggtgatctagaggatcccgaaaatgacatagaggcaggtgcctgtaatcctagctactcaggaggctaaggcaggagaatcacttgagaagaggaaactgagatggggagtgactcattcagtatcacatggtcattttattcctttcattcattcaatcaatcatttactcaataaatttttattgaatgcct

SEQ ID NO: 152251 - DNA, 168 bp, Homo sapiens
tgaaagatcttgtaatcacaaatgcaggaacactgtgattctgatttggcccctgcaatgaggttgcacttttagagcagagtgaaaaatactagtgttttaagaaggaacaaaaccccaaaaccattcacccagattaagatacaagaatattctgaaactgttcct

SEQ ID NO: 152252 - DNA, 428 bp, Homo sapiens
gggtgggcgagtcagtgtttcacagggactgtttcagtcgggaaacatgaaaaccattctggaggtggacatgggggtgggtgcacaacgatgtgaatgcttaaagcggccacaatggtaatttttttttttttgagaccaagtttcactcttgttgcccaggctggagtgcagtggcatgatcacggctcaccgcaacctctgcctcctgggttcaagcaattctcctgcctcaacctcccaagaagctgggattacaggcatgtgccaccacacctggctaattttgtatttttagtagagacagggtttctccatgttagtcaggctggtttcgaactcccgacctcagatgatctgccagccttggcctcccaaagtgggattacaggcatgagccatagtgcctggtcttttttttttttttt

SEQ ID NO: 152253 - DNA, 381 bp, Homo sapiens
tggacaatgaaaactatatttagaaaaactagggacatagatacgcttctcaacttcaaaatacctataatctcaaattcaaattcaaggcttattggtttctctctttctagaaagtttcatgctctccttcaatccggacagttatgtaagggttgttgtaacaccttccatatctggactcactcttttactcctatggctttccaaagacagtggcaatccttctcctgtggctttctccttgaactcttacaaaaaagacaacctctagaataaacaatggaagcaggcagaactaggaaccagtcactcgaaaatatgtcctattgatgtgatgatatatagcatcaattaagaaattttactgacaaaaaaatt

SEQ ID NO: 152254 - DNA, 538 bp, Homo sapiens
catgaacatcctccaacataataccttagcaatcacaaatttgttcttccatgtgtcatttaaatatatgacaaaaagcatgtttatacttttgtattaagatattccctaatgtacaacatggcccagacttgaaattctttccacttaaagcttcaggttatatattcataaattggtcccaacatgattttcttaattagtatactcagggagagggcaaagggagtggagacagttatatctgccatgggtacagctttcattttcaagtcattcactctttttttccacttgtttcctatactcagtgttcaatattttttcctttcattgtccatattttatttatttatttatttattttgagacggagtcctgctctgtcaccaggctggagtgcagtggcacgatcttggctcaatgcaacttccacctccggggttcaagccactctcctgcctcagcctcctgagtagctgggactacaggcacccaccaccatgcccagctaatttttgtatttttagtagaggcg

SEQ ID NO: 152255 - DNA, 463 bp, Homo sapiens
tactttaacatccaaaaataactaaaaagtcctagaaaattaaacttttccaaatttccaaagtacttgtgctgtatgaattctacttcatgtatcatacacaaacaagttatgacaaagacaaactagtcattctcctatttttatgaataacttgtaaagttattacgattacacaaacaggtgattacaaggaaatgtaattacttcctggggaaagactactttcctgttcagataaaggtcttgtttactgctactgccatttctgcaatctaagaagttcaacatcacctcaattacgattctgaatgacctcataaatgaaaaacaaatgtcctgctattagagaatatgtgtatcttcaccctgggatgacacaagagtacgtgaaaataaatcaccaaaagtagcattgggagtccccacaccatcaggagctactggtctggggcactcactc

SEQ ID NO: 152256 - DNA, 342 bp, Homo sapiens
agagctacacatttttaaacaaccagatctcacaagaactcactcactatcacgagaatggcatcaaggggatggtgttaatccttcatgagaaatccaaatctatgatccagtcaccttccaccagaccctacctccaacaatggggattataattcaaacagagatatggtggcaaaacagaacaaaaccatatcagagaatgaagtttggagaacctgttttcatgcctgcttctctgttggtttatacggctgcctccaggctttccttacatagctaccctctcttagagtggggaataattcccttctttgtcttaccaggcctcgatgaggatgc

SEQ ID NO: 152257 - DNA, 252 bp, Homo sapiens
ccatttcagtctggttaagaatcattgctggggagctagtgtgatcatttggagctgtttccctctcagatgtcacaagtgccaccacagctgacaggacccccttcaggagggaaacaatatatgctcaagttctcaaagactcccatgagtataagaagaaggtccaactagtgtataaagagggggtaccccagtttgtaaatgtaccccgcctccttgcggtacgaattacggctatgaagatgcacg

SEQ ID NO: 152258 - DNA, 322 bp, Homo sapiens
cagcattcatccagccggcctctactgggcggcctagagccaagccctcaggacacaaagaggaatgagacccacgcaggggtggagtccagggagcgctcgatgcatggggtgaggacaaggggagaggccagggttcctgggacgcatcaggggaggcttctaggaggaaagcgtcggagccaggctctgaggcacgagcttcggcaaaaacacaaggcctgggcgttgcggcgacttggggggctcaagagctggggtcgggcaccagccagagaggcaggatgagcctccacactgctgcctggcttctggctggcct

SEQ ID NO: 152259 - DNA, 887 bp, Homo sapiens
gtatttagttttgcgaacaagtatatccctaatgaataggatagctggccgcatcttacaatatttccaggctttatttgatttcatggtctgttttaagtttcagaagtattttcctcattttggctgaccacccacacttcttctgctccctgtaagtatctacctctaagcatgtacagcatatgtacctccctcctccatgtgtacaaacattcatcacaaacagagtcccggccatgtgtcaggaggagatgtgaggcattatgaatgaagacaggagttacaaccaaacatgcagaagacaagctccaatgatatctcactgtctgctcacttttcaccagcactatccagagaatagtttttctccttctgccttttaagtcccaaagttctttttaatctttttctgtgatagtgttcctctgatgccttctcttgattcaagtcaagcagcatatgaaactgcctctggcaagatgcctgttcagtgggtcaactggcatatcatacatatcatactgctggaaataagaatatgaagaaatcatagaggagctactgcttattgagggcttactaagaatcagacatcctcttgcctgctgccaggtaagacgtgactttgctcctcctttgccttctgccatgattgtgaggcctcctcagccacgtggaactgtgagtcaattaaacctcttccctgatagcatcattcttacatgattttgctggtatttatccttgtcttgaccttcagttatgttgtaatgatctctttcatcacctgcactgacaggaaccatttctcttgtttaactcttgaatgattcacgtggagggcttgtaccgtggttaattaaaaaagtcactgccccttacga

SEQ ID NO: 152260 - DNA, 445 bp, Homo sapiens
tattctccccactccacaacagaggttgccaagtctctactggggcaaatcgctccccagagggcataggctggtaggcggcagagccagggtttgaacctaagtctcccgagtccagttccaaaatgaacttactggtatttggaattgccagtgtatttcgtatgtggaatcaaatgggaagtaatcagtcatttgagttacatttgcatttattctaacctgatcaagttggaatgagggatgggacagaagagaataatatttatatgcacggtgctcttcattggttactctttcatatctactgacttatttgacttttgaggagctggaagcagagagaagttggaggatttgctggggtcacacagcttggagtggccagctgagagtccattccagatctcatggtcactttctactctctcacattgcagtgttg

SEQ ID NO: 152261 - DNA, 342 bp, Homo sapiens
tgtgttttcgtggagtgtgttagtctgtcaccatatgatgcagatgaaaaaatgcaaacttggatattcaaattttccattctcctgccaactttaatctcttcatgcatcctatctgtaatctatagtacgaacgttcttaaattgctccctcagtgaaaaggtagtcaccacttcagggctcctcccttggaggtttagtaaagcactgttttcttggtattctgttgcgttttcacaatgtccatgtcacgcttgcaaatttaattgctttgctataatcagaaaccaagttggtaatacattttagaccacagtgcaaaaaggaagttttggatgtac

SEQ ID NO: 152262 - DNA, 2014 bp, Homo sapiens
  misc_feature (1)..(3): n is a, c, g, or t
  misc_feature (1334)..(1334): n is a, c, g, or t
nnntgggtttctgaaagcctactaaaagtcgcagatccctgggccaactaactctgaagcctaacatggtgattgtattagtctgttctcacactgctaattccaagtctgggtaatttataaaggaaagaggtttaattgactcacagttccacatggctggggaggcctcacaatcatggcagaagttgaatgagtagcagtgtcaggtcttacctgatggcaggcaggagagcttgtgcaggaaaactcccgtttataaaaccatcaggtctcatgagacttattcattcactaccatgaaaacagtatgggggaaaccaccgtatgattcatttatctccacctggcccctcccttgacacataaggattaccacaagtcaaggtgagatttgggtggggacacagccaaaccatatcagtgatcaaaaaggaaaaaaaattacagtatctatatgtgctgtatgtttctgagagaatctagtaaagacagcatagaaagggatataatcaagaaaaggacttaaaatctagagatggtagttaatcatatgtatgcttccttcagttacccctcccagatttctgtaaatagaacaataatccacgtagatgctgaagccaaacataagagtcattcttaattcccctccttccttgttttcaagccccttccctgataccatcacaaagcatcagcaaattccctcaactgtacctcagaaattttctgacctccactccgcctatctaaaccttttccttacttctgctcctactggtggctcaaaatgatccaaaaatctatgatttctaaaagcctgaagccttttcaaacattcatctttaaattcctggatgcttgttcttttttttttttttttttgacagagtctcattctgtcgcccaggcttgagtgcaatggcatgttcttggctcactgcaactgcccgcctccctggctcaggtcattctctgctcagcctcctgagtagctgagattacaggcaagtgccaccacgcctggctcatttttgtatttttactagagttggggttacatcatgttgaccaggctggtattgaactcctgacttcaggtgatccacccactttggcctcccaaagtgctgggattgcaggcatgagccaccgtgcttggccctggatccttgttctaaagtcacctgttcccccagcgtattactttgtggtggcttcctctgattcacgtcatattaacttagatctactaagatttatgccacatctggatactagaaaacaaacaagcaaaagattttaaacactataaacaaacttggtttagntgagtaaattacacacatgcatgcatacaaatacatatctgtgtatatgcttttaaagtatgtatcagtatatacgtatatgtgcatgtatctacatatatatttatgtgtatatctatatttatgtttttaaagtcctgagaatagtagggtggttgaggatataaaacctgaaatattggtgaggacacattaagggtgtgatttcaatctctgtaagtattgtttcacctttttgcttctgtataatatacctgacctctgtagactttaaaacattggtgagcaaattccctttgaatcaccctgggtggagcagcgtacattactctgttcacaggagatgtctttagttattctccaaactcggtctgttttgctcaccaaaatgaaaaattataaagaaaataactatggtttatcttggtataactcaaatcgtttagaacattatataaatcatagaaactactggatttaatatgaaagtaaacagatttttagtagaagattctttaaaatacttaactgtgtcttcttagttttcacacacaaaaactatgcctgcttctagagtgctgataggtaatacagtgtttaaaaatgtgaaaaaaaaagagtaatttatctacaaggcctaattgtacctcacattctgtgataaatatttcttgtgctcc

SEQ ID NO: 152263 - DNA, 283 bp, Homo sapiens
tccccctcgtcctccaggtgtcatgtaacttgctcctgagaaattaaatctatttctgaaatctctggctgatttcactgttccgtattttcattttttacccaaatctcatctaggtgtgatgactttcattttagaatatattaaaaactctgctggatttggaaacatccccgcttcacaaattcttgctttttaccccctcacacaaaaaaaaaacatatggtatatttgtttccctctttttctataataaataatgtaacacagtgattcaaatgat

SEQ ID NO: 152264 - DNA, 322 bp, Homo sapiens
ggctgaggcaggaggatcacttaaatccaggaggtcaaggctgcagtgagccatgatcatgccactgtgctccagcttgggcgacagagtgagaccctatctccaaaaaaagaaaaaaaaaaaaaaagcatacacagagcaactctgagaaattagtttctactaaaagcacattcatgttacattcagagaaatggaaaatttaattacattacttttcgaccctgcataaataggacaacagcagatgttgtcctatttgagtagatatgacaccctactttaaaaagtacaggtgaaatgacacttggaaatgccacat

SEQ ID NO: 152265 - DNA, 563 bp, Homo sapiens
tacggaggctgtggagttcaggaattcccaactacctggccatgtcagaatcaggggagctgttcactgagcagatgccagggtttgcagaggggcaccagcttcagggtttgtgccctcaggttcggggcctcagactcgattactacactctgggcagcactgacgtccagctctgggaacctggacacctgcatcatggcaatttaagtttgggtttgaagctggcccctgctctgccactcactcacgatgagaccttgtgtggtgcctactctgagcccgtttcctcttctggaaaaaggggctgacacgaatacctaccacctcacatggctgctgtgaggacatctgagttaatacttgcaaagcgtggaaccgctaatgctgggcacgtggcgactgatcaggaaagccgctctgaaattattactgctgtgatgaccttttaaaaactgaggtttgtctcacaggcaagggggcatttaaagagtgtttctcttctttcatgtcccactttcccctaacctgaggcaaatctgttagtaaatggttgttagtaa

SEQ ID NO: 152266 - DNA, 287 bp, Homo sapiens
ctgtgaggtcgatctacaggatcttaacgtcagcactccttgagcaggtacaggatctcagacatatctccatgggctacaaagagcaaaaataaagcaaataaacaaaaagcccctggaaatcctatagttatcctaatacatattttaaagtattacctatcactgagcaagtgcatctatacatttcaatccttttggaaaatatactttctcaaacttcatgttgtatccctctaaagttagttagcacatattgtacattcagaagaaatgttcatttacag

SEQ ID NO: 152267 - DNA, 513 bp, Homo sapiens
ttttataactgtaggacgtctcagaaactgtaataaacaaatgtgcaatgtggctctccaaagagtgaaaacaatggggtgtctgggggctcagcttcagctccagtaggcaaatccttccaaaagtatttaaccacaaattcctttatgtgtatggaacacctgaatcacacacttcagcaagagaacccctaatgtcctccagccttaactttcccatcctagaatctaggttctccccacagtcctccaatgttcccagccaggccaatgctaaaagcttcccttaatgatacccattatccaaggaagaaacctgagagcaattttctactacctgtttgcttttttccagcaattctcaactttttgccaagacattacacccgaatttctatccccaaggaaacattttctaactaaaaactccacctggccactgcagtacttatatatttaatcccaatgactttctccattcctttgtttgaaagtaatgagactaaattttag

SEQ ID NO: 152268 - DNA, 267 bp, Homo sapiens
ataattcaggtaatgcatcacagaatggacagtgataggccgggcacaatggctcatgcctgtaatctcagcaatttgggagatcgaggctggtgggtcacctgggcccaggagttggagaccagtctgggcaacatagtgaaaccccatctctaccaaaaacacacacacacacaaactgccaggcatggtggtccacgcctatagtctgagctgtttgggaaatggcttgagaccaggagatgggaggatggcttgagtccagga

SEQ ID NO: 152269 - DNA, 165 bp, Homo sapiens
ttttcgagtgtgtgtttctctcgtactttcattgtctggagggatgttttgctatttagtcttctcttctttatagaaactatatgtgagttagttttctgagcctttagaacacaggtgtccaatcttttggcttccctgggtcacactggaagaagaaggatt

SEQ ID NO: 152270 - DNA, 726 bp, Homo sapiens
ggctttatcagcctttgaccaattaaagcaagccctacttgaggcaccagccctagatattagaagaatatctgtctgaagctgagtagggtgcaaaacctttggcaccaatcaagtgaaaagtttgctcaactttaatttttcagagttgtgtaagctgaagcagttgagatgtctatggtgtcagctattgtttgtgctattaatcttcagtcctcttcaattacgacacaagcaagattatattttttctcataagttgatgtggatggcctgtcactgtgaacttcattttcaagattatcttttcccttcttaaaatgaattatctatttgtaaactgatgatttcattgttcccataaactttttgtaaagcatcactaatttcaccattcttccactcaaacttcactatacaattgatgtttgtccttgcttcaattttagcagaatttgtgttgctgtcataggggcctttttcaaattgatgccttttccttagtgcttcaaactagatcctgttcagacatgtcatgacaaattgttgtgtatttattttagtataaataattgaaaaccatgcacagatttttatgatatgcattttccataaaattttggcttgtatctacaagaaacacactttaaatataaacatataaataggttaaaaataaaagtatggaaaggggtgcataccatgcaaacacaattaaaaataaag

SEQ ID NO: 152271 - DNA, 183 bp, Homo sapiens
ggagtccccctcaagtagctctgcccacaggaactgctgatgtacaaagacagctgttgcttcaaaggccagatatcttcaggctcttctatatgccctggcatctgttaccattgctgccactgctaccaggcttgcttccatctctggagcttctcccattttcagatctttcccatacct

SEQ ID NO: 152272 - DNA, 345 bp, Homo sapiens
cgggcggggcgaccgggctctggggtctggctgtgccggtggggcacacaggatgccagagcagtcacaccctggggaccacccagcccaagccctacctggagaaatccaggcctttccccagcgcctacagggagaggggaaactgtcctgcgctgcccgcctcacaacatctttgcaattgccctccttgccaaggtgagagagaggccccagaggtgaagttagtggagggctcggctcctttctaaccgctgcgctgtggaatcaggggcactgtccagagccctggcaggacctctttgaggactcaggaaaaggtctcctttgctccccccattaccc

SEQ ID NO: 152273 - DNA, 257 bp, Homo sapiens
ttttcagtctttctgtattgagaagcagtggttggggcattttttaaggtggctggctactcttgttttccctcatgatagtaagtttgtcataactcagtaacatggacttgcccctagaggcagctgttaataattttgaaatattaaggtcttgccaagcttctgatgattcaaacctgtactactgattattaagcaggacagactgagctttctgttgcaaatcccttggaggagaaagtaatttctaaata

SEQ ID NO: 152274 - DNA, 294 bp, Homo sapiens
ttttgaaagttgccaatgacctcttaattgccagatttctataatatttcaccctgttcattttataagtcctcttctatgttattcttggattcaatatttgtgtttaaaaggtaatattaagtactatgtatcaggcactgtgatatctcttaatctaatttgtcactaattcccttaaagtaccccatgcccaacctaaaccaagtggatcttctttccaatttgtaccccatggtggcatgcctatgtgttttcatttattctgttagcccatcctcttacatgtcgaaa

SEQ ID NO: 152275 - DNA, 779 bp, Homo sapiens
ctcaggcccctggaccttggctcaccacctaagactgaacaagcactaaaggacagaccagcccgctaacagctcactccaaaaatgagcgggactcccagagaaactatttttattggagcatcctggttttgccacctgctcaccccactgcctgtccttctctccaaggaggcttctgccagccctgcttgtccttccctagaaaaggaaagccttttcctgtttgatcctgagacacctgtagattgagtttggaatattctccctattgcaatagtatttttgaataagttttatttttccctacctctggttgatttttaattaataccagcaagcttggatgaaagcctgcacaccttaggggtgtgtgtgtgtgtgtatgtatgtactttagcattaccatgaaagtaataacagtaaaatcaaacaaacacagatggataagcaatatgttggactagtatgaaaatggcattgccagcagtgacatgattttttttcaaaatggtacactttttgaagtataatcttattttaacctaaaatcttactatcagaaaatgcagtgtacattaaaatgttctgaactgcttttattcatatattaaatggttgtactcaaatatctacaaatttgtttttcacttatgtgattgtcttatagaatgtccaaaagtcttgcagaatgtgagacaattttctattgaatatgattgctttatcattgcaagacatcaaacatccctgtttcctgccaaataaatgtacaatag

SEQ ID NO: 152276 - DNA, 141 bp, Homo sapiens
tgggggtagttttgccaatgaatattttagagactattaggtttagtataaagatggtttcagggtggtagtgtgaaagtatcggaatcctggaataaaaatacagctcccatgataaaatcttaaatttatacagctaaa

SEQ ID NO: 152277 - DNA, 302 bp, Homo sapiens
ccaccatggacagagcagggttatcatgtagtctgaatccgtaaaaacaccctaggttttggcggggcctggtgactcacgcctgtaatcccaacactttggaaggtcaaggcgggcggatcatgaggtcaagagatcgagaccatcctggccaacatggtgaaacaccatctctactacagatacaaaaattagctgggcatgggggcacatgcctgtagtcccagctactctggaaactgaggcaggagaatcgcttgaacctgggaggtggaggttacagtgagctgagatcgcgccac

SEQ ID NO: 152278 - DNA, 356 bp, Homo sapiens
gactgtgtcagtgcactggaacaaagcaggaacttatctgccggaaacagaagccacactttttattcaggagagtggccctggaacttcaacgtactttctgatcctaagagctgggtgtggtgggattagtggagggcaaagtgggagataatgtggcagggctgggcacggtcaaacatcttcctcccatcagctctgcttttctttcactagctgcttcctccatgcccaataccgctgggatgtttctcatcaacgagcaccctcctgggccagaccccaggccaggtgagcctatgaaagtcctcatctgttcagcattgtccagatgcttcctgagtgcctcttaagaa

SEQ ID NO: 152279 - DNA, 335 bp, Homo sapiens
ttgttgtgtacattgctttcttttgagaaaaagaatgtggttttcattatatatgaaaaactaataccaggcttggcacggtggctcacgcctgtaatcccagcactttgggaggccgaggcgagaggatcacctcaggtcaggagttcaagacgagcctggccaacatggcgaagccctgtctctactaaaaatgcaaaaattagccgggcgtgctggtgcacacctgtaatcccagctactcgggagactgaggcaggagaattgcttgaacctgggaggtggaatattaaatccttctaatatttaatgaaaaatcagccttggagatactg

SEQ ID NO: 152280 - DNA, 147 bp, Homo sapiens
atttcacacgtaatggtatctgtgctgtgtcttgaaagataagaaactccaaacaatcaaagggatgatagtcattccaggtaaaaggacaaaagcaaacattcctaggccctaggtgatccaccgtgcctagccggtgatgggttt

SEQ ID NO: 152281 - DNA, 387 bp, Homo sapiens
atgcctaagtcagaaatttaagttcagacttatcctgctttatcagtaaaaaaaattgacaaggacaaatatgccagattttaagaaattcttaaagcccacagagaatcttagaatgacaatcctcatcaggctcttaggaaatcatccattccatggaattgcttgctattctgagaactgctatgactaaaaaatccaacaagactccatttcaaggaacctaatattcaattttaaaagcaaactaaagtaacactctttgttgtgttttaaatttagcaggtattactctcctatgccatttttaaaataatgggttcctttaaaacaccttcattaaaattatgttcatttcataccaaacaacaaagaatgtttccacta

SEQ ID NO: 152282 - DNA, 239 bp, Homo sapiens
ccagaagactgagggttcagcaagttaacttgctcaaggacaaagggctaataagtggtggaactaggattaaaatctgcttgagactcactgttcaatacaagagccactagctccatatggctacttacatttacattaaaattaagttaaaaaatcagtttctccatcacattagtcacacttcagatactcagtagtcacatgtggcttgtagctactgtcttggatagtgcaaa

SEQ ID NO: 152283 - DNA, 533 bp, Homo sapiens
agctgggactacaggagtgcaccaccacacccagctaatgttttgtattttagtagagacagggttttaccatgttggccaggctggtctcgaacttctgatctcatgatccaaccacctcggcctcccaaagtgctgggattataggcgtgagccaccgcgcctggccctttatttctttttataccaaatacaaaatattacattctatagatataccacattttgtttatctgcttgtcagttaatgaacgttcggttgtttctacattttggctattatgaataatgttgctatgaacattggtgtgccagtttttctatagacatatatcttccctaggagtagaataatgggatcatatgatcactcttaacgtctaactttctgaggaactgtgaaactgtttttccaaagcagatgtaccattttacattcctacctaccatgtatgatggtttcagtttctctctatcttttcccatcttcttaagtattactacttttttttttcctgacagtctcgctcttt

SEQ ID NO: 152284 - DNA, 650 bp, Homo sapiens
aatagaacaattcagctgtctctttagaaaacttggcaaaaggaaatgctccctgctgaaaattttcttagcctgttgcacaaaagatgaagtttgtttaagaaattgctgctaaagaaagcgtcaacccattaaggtaacatggaagcaaatattctcagaaaccaacagagaaattgagctgattcggacactagaagagccagctaccttctgttttattttagctttgttgtttcatcttcgtcatatcgtatccaagtaaaattggaggaaaatgtcagaagaagcttacaggctcacactcccttctgcgaccttgttgaagaaggcgcctgctccccttttgtcttctgccatgattgtaaggatcctgaggcctccgagccatgcttcctgttaagcctgtggaactgtcctggctatggaggagggttccattcttacctgttgctctacaatgtacagctgatgttttacaataaaaacatggagtcatgctaactcccacatgccctaccattcactctccccaagccagtaacaaagcaggcaacgcagctaatataatatttagactaaccgtgaagaaaaagatctttctcccttctgtactctgaataaataaattagtctgaccaaatgaagaa

SEQ ID NO: 152285 - DNA, 287 bp, Homo sapiens
cgccaacattatttctacaactctaccagaacgcgaaacaaaaaaaccttcagtcctggctatggaggagggttccattcttacctgttgctctacaatgtacagctgatgttttacaataaaaacatggagtcatgctaactcccacatgccctaccattcactctccccaagccagtaacaaagcaggcaacgcagctaatataatatttagactaaccgtgaagaaaaagatctttctcccttctgtactctgaataaataaattagtctgaccaaatgaagaa

SEQ ID NO: 152286 - DNA, 499 bp, Homo sapiens
acatctctttccctacttctcatcctcaaacctcatattatgtcattaaggacaggttaatgacaaagtctgagacaataagtcagtcttactaactcccaaattcggtgttgattccacaacagtacactacctccctgggaggaggtggccaatcttctataatctaggtgaaattaactgacctatccttttatctggtctctaatgaatttaaagaggtggattcatatgaaaaatatttactatttattacacaggtagaacattcccattcttcaaattatgtttttctttatttctccaattatttgttacatataggcgcatcatatctgaataaaaggtttccttttattcgtcaaagaaaaggattttatatctaaaaggaaaacaactctatacataggttatatgatattttggtggagtttttaatcctaaaccttaaaaaaaaatgtttaactggaggtgggaggagaggaagggtaccgagctc

SEQ ID NO: 152287 - DNA, 316 bp, Homo sapiens
tcaaatgtcttaataagcaaatacatggcaagagaaccagactgtagtttgggttgttgagatgaggttatttataagatctgttaagtcactttcgttaagattgcaggttatcaggtccaggaagatggtcacagtagaaacatcacataggttgtgctttagccacatctagccaagaatgaagttcattgagcaatggcaattatgagaacataaggactgtgtttttctcccccaaaattgccagaataagatagatattccctagtccagtggttctcagacatgcttccagaccagcagtgccggcctg

SEQ ID NO: 152288 - DNA, 237 bp, Homo sapiens
gcacctaacaggctctccagaaatgctttcctaactcaccacgggaagtcccggggtcagagtcttctcgcttttctcggagtgactcctcacccaaaagctctttgcacagctctgctccatgtgaccccttttagcctgggtcaggactagaatgctggtgccgacttttaaatcattcccagccgggcgccacggctcatgtctgcaatcccaacactctgggaacccaggtgg

SEQ ID NO: 152289 - DNA, 414 bp, Homo sapiens
gcactctagcctgggtgacagagcaagactccatctcacaaaaataaataaataaataacacaaaaaaacaaaacaaaaaaaacccttatcacagcactgcataaatgcttatcctgatgcttttgccaccgccattcgggtttaagctccaaagggacagaatcccattctgctcagatttattttcccagggcctggcatcatacctagcacatgacagatacttaaaaacatgtgccgacccaatggaaggctgtggtgtgctggtctatatgtaaacttatcccatcattctgccagagtgacctccatgaacaatctaattctggtttcttgcttaaaaaacctgtgaggactctgggatactcacagactgaagtctgactccttggtagtatccacaaagattcaaa

SEQ ID NO: 152290 - DNA, 286 bp, Homo sapiens
gctacgtgcttcattctgttaggtaggtgtgtgggaggaggagaacacaaggggagaaagtgttgtacatgcaaaagaaacaggaggcttataatctcatcagggagatgaaaaaaaaccctgacaccctcaaagtcaaagcagtatgcaattaagtgagaatccagggatacagacatcaagaacagcagaggctcagagaaggatgaggctagcatggccagagggtcaggctcccagtcctcatacatcaggccagaaacaaggcacctaatgcctctcctgg

SEQ ID NO: 152291 - DNA, 172 bp, Homo sapiens
aacgcacctgatcacacacatgcacacacatgctacactctcacacatgcaaacacatacacttacctgaacacacacatgcgcacacacacaccacactcgcacacaccctccggcatgtccagagtatttctcttccctggtgggagaagctcttggtgcttggagactc

SEQ ID NO: 152292 - DNA, 310 bp, Homo sapiens
gttctgaggatcccggtctgtatcgggggtgggatgtccttgctcaaatggatgtccttgacatatctaggttttagttaactcaactaatggcatgcatgtattgatatccaccccctctgctacatagtgttaatctgaggattaatgagatgacatgtaaaaaagtgctttgaaaaacactttttcagtctgatgaaaaaagctgagatttttgagcctgatgggtcaccactgctgcccttcatggaaccatgctctcataaaataaacaaaagcctcgcagccagccagccagccactttcctcg

SEQ ID NO: 152293 - DNA, 363 bp, Homo sapiens
tgtgtgtggttagtggtaataataataattagcaactaatatttaataattgtagatgtacaatgttttgcataacatacccatggctggctaaagtcccaagaaatacagaaggatttaagatgaaaagtgcattcctgcacctcccacatctggaaatcaccgtctcacctgcttctcatatatcctcccaggattttaaaaatgctcatacaggctgtgtgtgtgtgtgtgtgtgtacacacaatgtattcatttgaatgcacctggcatcatattaacatgctaaaagctaggaattacatcctgtatattgttaatgtcatagttactgttaattggatgatgtttaaagtttgcaag

SEQ ID NO: 152294 - DNA, 376 bp, Homo sapiens
tttcccatggcctcaacaagacaaccacatcagaatactacatgcacatattgatggatgaacacacccagcggtaggacgttgttttattataaagggttattatgatgatacaaatgtcacagacatttagagagtgggccagtgttcctgggtgctaaggcgttgtttgcagctctagtgggaggcagaggaaggtacacattgtaggcctccgtttctttaatagggaagaccctcttaaagagggtgcagcagtttggagaagaagctcctgctgttgttgttgctgctgttgtttctcctggggccacgtgtctgactgctcctatttcagggcaactgggtcacagctgtgctgccggccacagggctt

SEQ ID NO: 152295 - DNA, 284 bp, Homo sapiens
atactgaacaatttagtctctgctagaaaatctaggtatattccatcctgcccctgccaaagattgtagacgtcagtctaactacattagtgaaacaaaaatgtaatataaacagttttaactctgctatttaaaataaaaataccaagaacaaagccttctattttaagtgctctgatttctgctaaaaacattagcatattttggggactcaatgaaaagcagctgatggttcaaatgatcaatgtctcaaatatttattgcctttacaaatgattttcaag

SEQ ID NO: 152296 - DNA, 379 bp, Homo sapiens
attactcactcgtctgtctcctccttctagaatggaagctcttgaaggcagagatattcaggtcatttacattcactcctgtttttccagtgcgcagaaagttgcgtggcacacagtggtccctcagcactgcctgaacttgtgcaccgctgcctgctaggctaaatggtaccctgtatttcttcttgaatcacagtctccaccctggatttctattacttgtctgtttttgctgctggaaagtaggctttgtgagtttgagatccatctgtctgtcttgttcatgggtctgttctcagggcctgccagcagttggtaggccctaagtactccgtaagtatctcttacattaaaaaacaaatgactaggctgggcgcag

SEQ ID NO: 152297 - DNA, 533 bp, Homo sapiens
acaggcacgcaccaccatgcctggctaatttttgtatttatagtagagacagggtttcaccgtattggccaggctgggcagtgggattcttatcatgagagtgggtttgctacgaaagtgaatttgacctttttgctgtctcttgcagggactttttccctttcaccttccattataggatgatgcagcaagaaggccctcaccagataccagtcctttgatcttggactacccaggcttcagaactataagaaataaatctccgttctttgaggattacccagtttgtgctattctgttatggcagcacaaaatggactaagacataggtccaatctaaggcctatctcccagaggacacctcatagctgtgaatgaatgagcactaagtaagccagcatctgccttttttgttctggaaatcccactgtttataagatttcaaactattgcacatctctggtaatcttttctccttgtttctctctctacaaggtcaaacagacctgtacattttcaactgactctactgg

SEQ ID NO: 152298 - DNA, 159 bp, Homo sapiens
tatgggtcatgaggaaaaggaagaaccaaggatgactgcaggtttctagctgggggatttcaaagggaggcatatgctagtagaacctaaaagaccattttgccagttttccttttctccttatgtacaaagacagttcctacttcatgactctttttt

SEQ ID NO: 152299 - DNA, 366 bp, Homo sapiens
aacacgtacaatattatgcttaaatattgatgtcattacttcttccaggcaacagctcataaaataaatccatagttctctgccagctaagaagtcacaggaaacagaaactccctcaaaatcttagcctgtttctgagggtaaacctgagatttcatgggcactcattctgctctgctacatttttccctgtctttcttttttataaagaggatttgcttcagaggcaatgcagacaaatgaattattcatagagaaagagataaaagagagaaggtttcagggactaaaatagttaggcctcaggttctatgagtttgatcacattgactactaagtaggcatcttgggagctgaaataaacca

SEQ ID NO: 152300 - DNA, 458 bp, Homo sapiens
gaatgctgctgaggaccctgaaaacctgcagggaccctgtcccaggccagcgacagccacccctcagggcccctggtctctgtcaggcaatgcgggtcatctgagggaggctgggccacagattccacgtgtagctgggaggggttgctgcgtctggcgaggcaagggctgctgtctaaacttccaagggaatgatgtgggcaccccaggaggaagggatgccctgaccccgctgcatagtcgagggcatggagaacccatccgactgtggccttgtggcccatccccattctctgacgggctcattgtgattttcagccacttgctatttgccactcagaggcaaagcggctgcaagaggtaggagaaagcaagagactccctcacctggaatagagcatccaccgcgatcccagaaaagacaaatcccgttgcaggcacttcaatccacacagcag

SEQ ID NO: 152301 - DNA, 682 bp, Homo sapiens
cagtgtctcttctgtcacccaggctggagtgcagtggctcagtctgggtcactgcaacctctgcctcttgggctcaagtgattctcccaactcagccttctgggtagctgggattccagatgggggagtatgaacattgaaaaccaaggaactgggaccctttcctctcttccaaaaaatgttgttgagcacctgtgtcagacacccatcatactaaaatgaataagatagagcccctgtcctcaaggatctgatgttctagtgaagaagacagattaacagattttgctgctgctgctgctgctgctaagaatcctttcttctcacctctgggtgcctgaaagtcagcaggagttacaagcggaaatttggccaaaatgcattgcactctgaaagaaaatgcttaatttctctaaaagtgaaggacttgctgagaaaaaaatgttgaaaatataatgagcaggcatttcaatgcaaaaggtgatacaatatacccattacgttgctattctcatgggacagaaccaacctttgacttttgtataaactatctggcaatattacgtaagacacctcctatttgtagttctgtttcagaacatagtatataatctggtatatatcataatgaataaagtcataatgaataaaatcaaaatagggtgccgccctatttgataat

SEQ ID NO: 152302 - DNA, 621 bp, Homo sapiens
  misc_feature (20)..(20): n is a, c, g, or t
  misc_feature (35)..(35): n is a, c, g, or t
cccccccccccccccccccnccccccccccccccnccttgctccccaaccctctcaccatgggggagtatgaacattgaaaaccaaggaactgggaccctttcctctcttccaaaaaatgttgttgagcacctgtgtcagacacccatcatactaaaatgaataagatagagcccctgtcctcaaggatctgatgttctagtgaagaagacagattaacagattttgctgctgctgctgctgctgctaagaatcctttcttctcacctctgggtgcctgaaagtcagcaggagttacaagcggaaatttggccaaaatgcattgcactctgaaagaaaatgcttaatttctctaaaagtgaaggacttgctgagaaaaaaatgttgaaaatataatgagcaggcatttcaatgcaaaaggtgatacaatatacccattacgttgctattctcatgggacagaaccaacctttgacttttgtataaactatctggcaatattacgtaagacacctcctatttgtagttctgtttcagaacatagtatataatctggtatatatcataatgaataaagtcataatgaataaaatcaaaatagggtgccgccctatttgataat

SEQ ID NO: 152303 - DNA, 987 bp, Homo sapiens
  misc_feature (20)..(20): n is a, c, g, or t
  misc_feature (35)..(35): n is a, c, g, or t
cccccccccccccccccccnccccccccccccccnccttgctccccaaccctctcaccatgggggagtatgaacattgaaaaccaaggaactgggaccctttcctctcttccaaaaaatgttgttgagcacctgtgtcagacacccatcatactaaaatgaataagatagagcccctgtcctcaaggatctgatgttctagtgaagaagacagattaacagattttgctgctgctgctgctgctgctaagaatcctttcttctcacctctgggtgcctgaaagtcagcaggagttacaagcggaaatttggccaaaatgcattgcactctgaaagaaaatgcttaatttctctaaaagtgaaggacttgctgagaaaaaaatgttgaaaatataatgagcaggcatttcaatgcaaaaggtgatacaatatacccattacgttgctattctcatgggacagaaccaacctttgacttttgtataaactatctggcaatattacgtaagacacctcctatttgtagttctgtttcagaacatagtatataatctggtatatatcataatgaataaagtcataatgaataaaatcaaaatagggtgccgccctatttgataataaaacttttcatgtcactgaatgcatatatttatcaaacttcctgtactaaaatgaaatacacatatataagcaggcatactccaaaaatttaacaggaataatttaacactcttgagacaggagtaatacaaggtggtcacaggagaatagaaaattccagacagcagtttcacatgtttagcagaagaaaactgttgaaatagctgcataaggtaggggctgataagaccctgaaaaacgaaggtgtgggccaagctggctaagactaactggacccaacatggcactggatttgacctaggtttcacctaagatctcattatactctcattaacatactaaatcacacacccaccagtgtaat

SEQ ID NO: 152304 - DNA, 619 bp, Homo sapiens
  misc_feature (20)..(20): n is a, c, g, or t
  misc_feature (35)..(35): n is a, c, g, or t
  misc_feature (612)..(612): n is a, c, g, or t
  misc_feature (619)..(619): n is a, c, g, or t
cccccccccccccccccccnccccccccccccccnccttgctccccaaccctctcaccatgggggagtatgaacattgaaaaccaaggaactgggaccctttcctctcttccaaaaaatgttgttgagcacctgtgtcagacacccatcatactaaaatgaataagatagagcccctgtcctcaaggatctgatgttctagtgaagaagacagattaacagattttgctgctgctgctgctgctgctaagaatcctttcttctcacctctgggtgcctgaaagtcagcaggagttacaagcggaaatttggccaaaatgcattgcactctgaaagaaaatgcttaatttctctaaaagtgaaggacttgctgagaaaaaaatgttgaaaatataatgagcaggcatttcaatgcaaaaggtgatacaatatacccattacgttgctattctcatgggacagaaccaacctttgacttttgtataaactatctggcaatattacgtaagacacctcctatttgtagttctgtttcagaacatagtatataatctggtatatatcataatgaataaagtcatggcctcgttggcctcagcggtggagctctgcngccggan

SEQ ID NO: 152305 - DNA, 229 bp, Homo sapiens
aaacagtgacgtgtgaaccatcctgggatggtatgaaagacaagcgcaggtctggaaaagcagttcagaagccactcaactgtctacgctggggagacggtttcgtgagctaccaccacagcctataactacttatccattaaaaatgataataaaacccaggaagaggccgggaaaacattcaataaaccagcgtgctgagggaatctgcacaacccccctccctgcc

SEQ ID NO: 152306 - DNA, 354 bp, Homo sapiens
ccggaacggtttcagttgttaacctcacagcttggtgaccctgcagacactgactacacagctgtgggatgtgcgatcaccactatttcttccaacctgacggagatgtccaagggtgtgaagctattggccgccctcatggatgatgaggtgggcagcggggaggacttgctcagagctgccaggaccctcgctggggcggtgtcagacttgctgaaagctgtgcagcctacttctggagagcctcgacagacagttttgactgctgctggcagcatcggacaagccagtggggatcttctgagacagattggagagaatgagactgatgagcgattccaggtaagatatttg

SEQ ID NO: 152307 - DNA, 280 bp, Homo sapiens
gagaggtgggacacgggtgcacacaccatgctggtaatttttttttttgtagtagatatggggtttcaccatgttggccaggctgatctcaaactcctggcctcaagtgatccacccaccttggcttcccaaaatgctgggattataggactgagccactgggcatagcctgtttcccttctcatttgacatttaagaattggtgccttggactgctccctgctgcgtgaaacactccctccacatacactgcggacctccctctccctggttctcctcc

SEQ ID NO: 152308 - DNA, 130 bp, Homo sapiens
tcattcctctgccaagtccgctgaaagaatgaggaattggattgccttctgcagggagctttgggcaggtgtatgtctggcatcccagatattattcttattggaacaatagaacatcatgagtttgcat

SEQ ID NO: 152309 - DNA, 414 bp, Homo sapiens
ggcgacagagtgagattccatctcaaaacaaaacaaaacaaaacccctgttaagagaatgaaaaaacaaactacaaaatgggaggagggatttacaaaccatgtatctgacaaaggactagtgcctagaatacataaaaaattcttaaaactcaacataaatacagtgagccaggagaacactggtttggactgagctcctgcaccaggcccagcagaccaaaccaaaatggagtccctcttggtaacctccataccaccaagccaaaagtaagttgtttatctgactttgcaagaagtcaggagaaagagaacagcaaatcccccaaatgggccagtttgggccagcgtggtaaggaagtcccctctgcgttaacctttacaagggaagtcactctgaaaccacccatctgct

SEQ ID NO: 152310 - DNA, 771 bp, Homo sapiens
cccggtgctgggtaaattagagaaaatgaggaacaaaaccacacctggaatctgaaactaaaattaactttttccagcaatgtcctattgtgtccggaattggtgggttcttggtctcactgacttcaagaatgaagccgcggaccctcgcgctcaaaatactcttatttgagcctaagaagagaactaagaggagaaaggaatgtgcagctgtgagggtcttaaaagcaaatgaatctaaggtctgtttcctagtgctacctttagggtctcttacccttggaactctacacagctgtcagaaagagataaatgaattcttagagtttgggtgcacagaatattgtcttatggaacttcaaaaatcgttagatccatcttcataaaaagaactcttgcagtcaaataacctgtttccaggaaaggaatggccatggcatatagaccaacctcgacttgcggatgaaactacactaatgggcatcaagtttatttgaattcgagatataaactgaacgtctgccagagaagacttgatttgatatttttatataatctgtattttagtaaactaaagtctatgtatgtaatctgatatatatgtaataaataaatatgcataataaatagcgatgccggcgtttccttagggagggtaaatcatgatcccgcttacttactcgctgcgctcgggctttgggtgcgggaagcgtttatcttcctaaagggggtattcggttatcccagatccgggatacgcgagaagacatt

SEQ ID NO: 152311 - DNA, 628 bp, Homo sapiens
cccggtgctgggtaaattagagaaaatgaggaacaaaaccacacctggaatctgaaactaaaattaactttttccagcaatgtcctattgtgtccggaattggtgggttcttggtctcactgacttcaagaatgaagccgcggaccctcgcgctgtcagaaagagataaatgaattcttagagtttgggtgcacagaatattgtcttatggaacttcaaaaatcgttagatccatcttcataaaaagaactcttgcagtcaaataacctgtttccaggaaaggaatggccatggcatatagaccaacctcgacttgcggatgaaactacactaatgggcatcaagtttatttgaattcgagatataaactgaacgtctgccagagaagacttgatttgatatttttatataatctgtattttagtaaactaaagtctatgtatgtaatctgatatatatgtaataaataaatatgcataataaatagcgatgccggcgtttccttagggagggtaaatcatgatcccgcttacttactcgctgcgctcgggctttgggtgcgggaagcgtttatcttcctaaagggggtattcggttatcccagatccgggatacgcgagaagacatt

SEQ ID NO: 152312 - DNA, 847 bp, Homo sapiens
  misc_feature (270)..(270): n is a, c, g, or t
  misc_feature (276)..(276): n is a, c, g, or t
  misc_feature (279)..(279): n is a, c, g, or t
tcacagttaaattgcctaaacgccagtccagtggctttttttcccccccaagggggaacttaaacccgcgggcccctcttttaataaaaccccccctggggcccgggggggggggttttttttaaaaaggggggccaccccccccccccgaattttaaaaaaaaaaattttttttccccggttcttttttcccaaaaggggtttttgccccccccctccaaaaaaaaccggccccccccccccaaaaaaatttttttttttttccctttnaaaaanccntaatacactgtgagggtcttaaaagcaaatgaatctaaggtctgtttcctagtgctacctttagggtctcttacccttggaactctacacagctgtcagaaagagataaatgaattcttagagtttgggtgcacagaatattgtcttatggaacttcaaaaatcgttagatccatcttcataaaaagaactcttgcagtcaaataacctgtttccaggaaaggaatggccatggcatatagaccaacctcgacttgcggatgaaactacactaatgggcatcaagtttatttgaattcgagatataaactgaacgtctgccagagaagacttgatttgatatttttatataatctgtattttagtaaactaaagtctatgtatgtaatctgatatatatgtaataaataaatatgcataataaatagcgatgccggcgtttccttagggagggtaaatcatgatcccgcttacttactcgctgcgctcgggctttgggtgcgggaagcgtttatcttcctaaagggggtattcggttatcccagatccgggatacgcgagaagacatt

SEQ ID NO: 152313 - DNA, 636 bp, Homo sapiens
tcatttgcttgatgacttcatttcttgacacttgggaaaaggtgactaaatcctttctttactaagaatgaaagaatgtgaccacattttcccctcattctgtgtttgctccagactaagaaagattcagataagatgttgcaggggtggtgggttcacaaatgatgtattggtaataaagcagaagtgttttgtaagggcatgggtgatggctatctgctcccaaactgtgtcacctgccttatcagagggagactcacttgggttcctcaagcttacaagcctctttgaggaattctcaaactaaagatctatcccatgtgtctagaattagctaagacatttctatgagtatttacaaccagcacagtaccagggaatgcattactgattgtcagacagacttattggtaaatactggagtctctaattgcacagatcattaaaaaatttatggctactttacatagtactattacaatggcatgagaataaattggttccatggaagtataaagcgttgagctcaacgctttatacttcagaaatgtttgcccattcaaaaatgtcgggcaggggctgttccatgttataagcttgactaaaaaaaactttttgggaaacacaatttgcggg

SEQ ID NO: 152314 - DNA, 115 bp, Homo sapiens
ttcagttaatccagggatatgcacagttacattttattcctaaacactgggcattttattttgtctgtaaggttaccccttcttctttcattacaagcacttaggaaagaagcct

SEQ ID NO: 152315 - DNA, 541 bp, Homo sapiens
cttaacttctctgtgtctcagtttcctcatctgtaaactgaagataataatagtaacatactttatagggttgttttaagaaataagtgagttaatacataaaataaacttagagcagactgtggcacaatggtaagtgctcaataaatattagttgctattatttgaattccagcgttgtcacttgaaactgtgtaatcatggtcaaagtttaagtaactctctgagacttaatttcctcatctgtaggagtgggattatacttcatatagtggttgtgaggattaaatgaggtaacatatgtaaagtgggtttcactgtgcctggtaagtattcaatagattccagtttttttccccatattaacctgttgtcaggtgctagctactgtgttagatgatttaggaagctaattatctgaattatatattggcttattacttagttgtatgtttatcccaggaaacattacagataatatgaatttgaataaattctgaattccatcttttttttttttttttttttttttgagacagtc

SEQ ID NO: 152316 - DNA, 446 bp, Homo sapiens
aacgggtgatgcggttggagctgaggcacgtcctccaaagcagccgaggaggagggggaagatccgcaggttcccacaaggtcaaggacctgctaagcccctgcctaaggattcacctcccaggaaggtcctgccacacggcagggaggcggcagggccttcagggctggagtgcccttgtgggcccccagacctcaccccttcctcatctgtcacgtgcgagtggaagaaggtgtcacttccagttctaagaaggggaatctccactatgaccagggagggagcagatgagagtttttagtttttagtcatggaagtctagctcccatgactcagtttcccttttggtttcacctcctataaactggggaccatggtccctgctgtgcccatctggtaggaagaccatcataagatgctttgaaggtgaagttgaaggtcaccaa

SEQ ID NO: 152317 - DNA, 527 bp, Homo sapiens
attagaaattaaatgttacctctgttgtgggataagtatcattctaatgatctgttaattgaaaacaaaggaaaaagttgaaaggattaagttaaaatttgtacttgagaaggcctttaggaaatagcttaattattaccacctgcattgaaggaatctaagtagatttttacaaagctcagcaatacaaatataaatacctatccaatttatgactttcaacaaatgtataaagatagctaaatttaaaaatagttcttttcaactggtgaatggataaactatggtatattcaaacaatgaaatattactcagcaataaaaaggaatgaattactgacattcacagagacatagatgaatctcacaagcattcttctaagtaaaagaaaccagacccaaaaaaacttacactatatgattccatttattttgataacgaagttcaatgcgtgactttgaagagtagttggatgaataggtttttgaagtaaatgtggcaacaaaccacccatgctaaaatggaga

SEQ ID NO: 152318 - DNA, 192 bp, Homo sapiens
tttatacacacacacacacacacacacacacacacacacagagtttcactgtgttaaccaactctgctctagaaaaagaaccgatggggttttgatgacgagctgctctcttagttatgggaggtggggactctcttactcatagcatttttttttttttttttttgagacagagttttcctctgttgccca

SEQ ID NO: 152319 - DNA, 129 bp, Homo sapiens
tcgaggataccgacgaggctactaccttatattgagttatcaagtttacttagcctccttcaatcagtcaatgtctgtttcattgtttaaacacccatgatgcttttgaagagtaactttgtctctctg

SEQ ID NO: 152320 - DNA, 299 bp, Homo sapiens
tcccagctacttgggaggctaaggcaggaggactgcttaagtccaggagacagagctgtgtgagctgtgactgcaccactgcaccccatccagcctaagcgacacagtaaggccctgtctcaaaacagacaaacaaaaaacccaaaaagttggccggtcacagtggctcatgcctgtaatcccagctacttgagaggctgaggcaggagaatcgcttgaactcaggaggtggaggttgtagtgggctgatatcgcacctttgcactccagcctgggcaataagagcaaaactccacctc

SEQ ID NO: 152321 - DNA, 1005 bp, Homo sapiens
  misc_feature (1)..(1): n is a, c, g, or t
ncctagggatcatagacggtatttctatgtaaacgaactgtcgggcgagtctcagtgggagtttccagatggtgaagaggaagaagaagaaagccaagcacaagaaaatagagatgagactcttgccaaacagaccttgaaagacaaaactggcactgattcaaattcaacagaatcctctgaaacttccacagttgtttactcagacccagggagtgactggttgtgcaatggtgagcaaaacgaagcatctgcctttaactcagtgagaggatgacaataaataatcatcaaacacatcattgcaaaataggaagtgaaataaaaagaagagcatgatgaaatagagaataacatggggttgtgtatggatggaataattaaagaaggcaaggggatcctaatgaatgagaagaagacaaaaatcctggaagggaaagagctttcttgcggaaggaagactatatgcaaagacctcaggaaaatgagaaactgaaagatgggccctgtgactagcatgaagtgggtgaaggagaaatgatgtgaaattaaattgaagaagtcagcaggaattagacctcctacagccatgctggccaagatgcagaggccacttcattccttgtgccatgagaagcttaacctaagagagaagtgcccagaggtggtcttgactttctaccaatgatccagatctgaagattattttagtatcacatttctattatttcacagaaattgagtataaattaaattgtaatctttaagaagtatataactatcatatctctcatagatttaagatagctgaataatatgataaatttggacttgcaaaaaaagcatttaatatctcctataaaacaatgccctactaagtgctgaagataaaacttaaatagagtactctaaatcactggtctgtttatgacctcacaagaaaagatctactctttaaatccgctggcaatgcttcgctgtttcatccagttcatttcatgtatg

SEQ ID NO: 152322 - DNA, 305 bp, Homo sapiens
accgtgatggtctgtgctatgtattttaggtaaaatgcttttgtcatttctggtggtgggaggggactgggcctttctcttatttccaatattttgctgttctaaacagcagcacagtgattcccctcatttgcatgtatgtgaaactatcctggtgggtccgcttccagaaactactggatcagggaccatgtgcatttatggccttgaccatactgccagagtaccttccaaggagtttgtgtcatcaatttgcactccccagtggtgttgagagagtgcctgtttcctccacccagcacagt

SEQ ID NO: 152323 - DNA, 449 bp, Homo sapiens
aggccagagccgggggagtgtctgggagaagactgcatgcccggagtccctgttcccatctgaatgggagggaggctggtggcagatcagagacctgggttctgagtcaaacactgaaatccaaggccctgggcctgtcactcaatatctgtggaatttgaccttccccatccataaaatgggcaccaccaacaccagtcgccaaaattacagcaagacacacacgtctaggccaggaagtgcggccactcagaaaatacagctcccccttcctccaagaagctaatttccccagcactgggagtgagaagagcctgtcttttccactgtctgcagcccagcccagggcaccctcatcactggcccctaaagggcagctccagaaaccgctgacaaaggatgccagaaggaactcctttctggccaggtgtcagggtcaacagaaagcc

SEQ ID NO: 152324 - DNA, 256 bp, Homo sapiens
gctttggccccccgtaagaactccagttccctcaaggtggccacataaagagaccttgcagagagtaacaggaacgcctgaggagacccagctgtcccagccccagccaggcaccggacatgaaagtgaagagcctgcaagatgaccctggccactgctggactgcaatcacccaagagatcccagatgagagctgcctagctgagcctggtcaaccctaagatttttgaacaaaataaatgattgttactgcttt

SEQ ID NO: 152325 - DNA, 298 bp, Homo sapiens
ttagcagggcatggtggcaaatgccagtaatcccagctacttaggaggctgaggcaggggaattgcttgaatccaggaggcagaggttgcagtaagctgagatcatgccactgctctccaacctgggagacacagcgagagtcagtctcaaaaaagaaagaaaaagctgcgtggccatattgtaatcagacaaaatagattttaaatcaaaaagattacaagacacaaagactcatttgataaaagtttcaacccaccaaaaagatatagttataaaatataaacacctagcagcaga

SEQ ID NO: 152326 - DNA, 613 bp, Homo sapiens
tatctggaggccctcgttctctgaaggcacggaccttttcagctttttccgggacgtgggcctgaaaatactgtccaatgccaaaatcaagaagccagtagattgcagtcacagatctccagaatacagcactgctatgggtggcggtggtcatccagaggcttttgagtcatcaactcctttacatcaagcagaggattctcaggtccgccagtacttcccagagacctggctctgggatctgtttcctattggtaactcggggaaggaggcggtccacgtcacagttcctgacgccatcaccgagtggaaggcgatgagtttctgcacttcccagtcaagaggcttcgggctttcacccactgttggactaactgctttcaagccgttctttgttgacctgactctcccttactcagtagtccgtggggaatcctttcgtcttactgccaccatcttcaattacctaaaggattgcatcagggttcagactgacctggctaaatcgcatgagtaccagctagaatcatgggcagattctcagacctccagttgtctctgtgctgatgacgcaaaaacccaccactggaacatcacagctgtcaaattgggt

SEQ ID NO: 152327 - DNA, 117 bp, Homo sapiens
gggccgcaatttgtcacaacaaatgttgaaaaaggcacggaagctcttccacatccttccaaaactgagctcctagctgtgagaatcaatgcccactacttttcaagaatcaaagca

SEQ ID NO: 152328 - DNA, 305 bp, Homo sapiens
gaggagagcggtgaggccgagcacggggtgcgtggggaggagagcggtgaggccgagcacggggtgcgtggggaggagagcggtgaggccgagcacggggtgcgtggggaggagagcggtgaggccgagcacggggagcgtggggaggagggtggtgaggctgagcatggggtgcgtggaggctgagcacagggtgcgtggggaggagagcggtgaggatgagcacggggtgcatgggggaggtggccagtgaggggcgcacacaccctgggatggctgcaggcctggacctgctgcccggcaga

SEQ ID NO: 152329 - DNA, 287 bp, Homo sapiens
actgtggtcaccctcatcctctccctgccagccccgccctcccaggcggaccagtgttctccttggcaacgcctggagccaagctggaagctcagcctataagcatctgtcgaatgactggcctctgccaaaagccctgtcacagctctcagggattctgacatcatgacatggtgtcacggggaccaggcctggatgggaaaaggcctcagttcacagaagacagcacaacctcagattgacgggtcgcaccatgaacatagccgcctgaccaggagcgccctctg

SEQ ID NO: 152330 - DNA, 381 bp, Homo sapiens
actctgcctcccaggatctggaatttatcttgaccaccagacagagcacagaactccattacctagggtgggccagggctgccacggagcagcattgtgtggctgtaccctccagaaactctggatgtaagatggaaggattgtagtacctggtggacaataggtgggaaaggatggagggtaaagaaaagcacaagacagggagaaaaaggaaggggagagtgggaggatgggaggcaggaagttcggttaaaatataccagcatttacatgtgtgaatacttggttaatttatggattcttaaacctagaaacatgtaatgagcatttccccttgtggttgctgacatttcaaaactattattaatagcatcagcctgt

SEQ ID NO: 152331 - DNA, 310 bp, Homo sapiens
tgttggtcagggtgaaggaaagagaatggagtggatgtcattgttggatgtggtggaggagtcaaatgtgcctccagagtgtttggccccattggctaggcgtgtggtggtagcattcactgagggaaggcccaaggaagaagaaccagattggcggagaagagggtgctgaagaaggttgtagatcatggagagccaatgttacaggcagactgcttggaaatgggaactgtttgagaagaagggagggtgcactctgccaaatgcagcctatggatcaaacaaaagggactgaaaacttaatgacttt

SEQ ID NO: 152332 - DNA, 456 bp, Homo sapiens
gaggacagggcaaaacaggagttcatgccaaatgggttggctaagtatacatatttaacaggttgcaaaaagagctatgaatattcatgaaggaggcttgcatgcacagtaagcaaacatgcacgttacatacatcccatgttcactttggagtggagacttaacatttaaatgtattaaaattaagctctatatgttaaaaggtgaaacggaggacacaggcatcctgtatgagtagcctctataaaccagccagaggaagtccatggtcagtggtcttctaagaaaaaaggaatgctagtcagttattgtgtaaatcagtggtggagcaaatttttccaaagggctggtttccattcaacccttacgaaagaaagtctaaaggcagttatctagggagtgggtataacaggcatgtctgacctcccatcatgtcatggccaggaactcagtttt

SEQ ID NO: 152333 - DNA, 141 bp, Homo sapiens
aagatatcatcaagatcactatagttgtatatattctctatttttatatgtaaatgttaacttagttcaagtattttttgcttgtatcgttaactgatcatcaaatacaatcctaaagatatatcagaagctttattttgg

SEQ ID NO: 152334 - DNA, 289 bp, Homo sapiens
atggtggcattggtggtggtttgttatgcaacaagataaccagaccagaaagggagagaagacaacaacagacaaagcaggtccataaattatgaaacacaaaaagtacatgaaatgccaagtgtcttagatttcagctaccaagacaaaagccctttcaagcagcagaatcctggaaagaaatgatggcaggaactgaagactaatgaaaaaaactgaataagaactaattagtcctctagacctactcctccagaaaacactaccagggaactgtccctcctctatt

SEQ ID NO: 152335 - DNA, 227 bp, Homo sapiens
tacatgtgtaaaaatactttattatttctaaggatattaacaaaataaacatactgaaaatactatcatgttgatttgtgacgctgggaacagaaatagggaatagcattaacaagaatgaaaaatagaattaaaaaggatagtgacttagaactgaaagtgatagtttgccatcatctgaggtgtatgattaatttgattaattcagctgcacttaaaagactttt

SEQ ID NO: 152336 - DNA, 479 bp, Homo sapiens
gggatatgtcccaccttggggctgggggcactgggcagggagtcaagtttgcaggaagcttcgcagagggtgacgcaaaacaggagcgtggtctgcacttggttgggcattaaactccacgttgatgagttagtcaatcccactagcaggcagactgacatgtgggggatgtcagcagcaggggcccagacctgtggacccgaggggcagaggtcagcaccctcctcggtgcagctaacccaggaacttgcctcagtggccaaaattgctctcttgccctcagttctgtaaatggcccatgtccatcagtatctatggttgtgtgcctgtcctgtcttccaacccacatccatgtagggaccctgaagctggaccagtgagtgattgggtgaaggctggctagcccgtaggaggtcaggctcacagaggcagctcatggagatccttggaggggcgcaccttactcctgctggccctgg

SEQ ID NO: 152337 - DNA, 497 bp, Homo sapiens
cactggcttcagacagttttatttaagatgtgtagaataaagaggaggtcaggctgggtagaaccagaagtatctattgccctgttcgcggtcacctgagttatttctaatgttatgttataataaacaccacaataggcttctcttcatagatgcaaatactttttagtattcttggtagaaattcctaatgagctcagctgtctcttcagggcttccctgcccagtctcttaacatttaaacatgtcatttaccttaaaaacataagtgcaaaccaactgataaaaaacaaccttgccttcagtctgcatcctgtcccagagacactttctttgtgtcctcacacgtggagctaagcttctgacttgtctctggtacatccctgaggatcctctcatcttggccatcaggaacctctacagaaggtcaaattcagtgggttcttctcagtgcctctgacttgagttactaataacatttgcactataatccactt

SEQ ID NO: 152338 - DNA, 569 bp, Homo sapiens
tcattggcttttgttaaccgcacacatcaaatacaaacatttcccacctgctacatggacctctaactgaataaatcccaagcagtcactcctaaatttaccatttacctcagcacacagcttcagtttcacctaatcagaaattagttactctctgtgacatacctatcctccttctcaaagctctactcagtccttggagacagaagtatttgccttggaagaggggagaccactgagaactccctgtgctctctttgattctctcatagcctccctcttcgtatctctcacttcaaaagaagctgaaaatgtttctacttctaacatgaaacaatctatgtactatcatcttagatgtgtaaagaacatgtttttaacatgccattgctcaactctttaaaaagtcatactattattaagaccatgtaacaacatggaaaagtgtccatggttatgttcattgaaaaagaacactgaaggttattatacatattgagtgttaggcttatggggtgatgtcccttcaaatttgtgttcatatgtttatatattaggagtgatggata

SEQ ID NO: 152339 - DNA, 307 bp, Homo sapiens
tcaagtgataccacgggttggagaaataccagtctggtcccaggcctctcattttatcagtaaggaaactgaggtccagaaaggggacacatctcagcccaagtcccacagctctgtactagcaagacctagattaaaatgaacgtttgtagggatagaattttgtccctgtttgtaggtgaactggctgaaatgtagaccaaggagttccctgagtgggctggggcactgttggtccttcgtcacttggtagccgccctaccttctttagcccagtagttaccacagctccaaagaccccatgaag

SEQ ID NO: 152340 - DNA, 192 bp, Homo sapiens
tagttgtatgtactaatacacaccaatgacattttaaaagctatcaaaacaatttatatacatgttatgccagctttaagagttgtatttcactgggccatggaatttgttcccatttaaagtatagcagtgagagatccttctggccactgatcggaaaaactggccctggaattcacggtccttactgat

SEQ ID NO: 152341 - DNA, 157 bp, Homo sapiens
acggtttgaatgtgtcccctcaaaacttcaggtgttgccaatgtgacagtatcaagaggtaacagggcctttaagaggccatgaaggctactccctcatgaatagcagtaaggcccttataaaagaggcttcccacagtgttcagttagcttgatct

SEQ ID NO: 152342 - DNA, 372 bp, Homo sapiens
tccaggttccctcagattctgttcctggcgagaacccacttcctggcttgtagacggctgccctctcactgtgcactcacatggcattccccaggcgcatgtgcacggagtgaaggagcacgagctctctggtgtctcttataaggacactaatcctggccaggcgcagtggctcatgcctgtaatcccagcactttgggagactgaggtgggtggatcacctgaggtcaggaattcaagaccagcctggccaacatggtaaaactccatctctactaaaaatactaaaaaaaaagccagatgtagtggcgcacacctgtgatcccagctactcaggaggctgaggcaggaggatcgctggaacctgggagg

SEQ ID NO: 152343 - DNA, 367 bp, Homo sapiens
tagctattgctgtgtaagaaacaaccatagaatctcagtggaatgtgacgatacgattttatttctcgcgtgtctgctagttgacttatgattggctcttctagactggccttagctaggcagctgtgcttaagctaagggttgcactggacgtcgctactctctacgatctgggttttagtcctctccacctgtatccctgctgggactcagctttcttcttacggtcatagacataagagggtgggtaccattgcccaaacacatttcatatctaatattgtctcattgcctaaaccaagtcacaaggccaatcccgaagtcaggaaatagggagttccgttccccttcttctgggagaaaattc

SEQ ID NO: 152344 - DNA, 321 bp, Homo sapiens
ggcaacagagagacaggagaaggcaatgtacaaccgggaactggcccgaaggaaagaaaggtgggagaaaaccagatatgtgttaggagatggcaaatattccagctggactggaatggagggtcccagtaggtaaaatgtctattgttgggaatgactgtaaagctgaaggaatctttgaagcacaccacagagggaagaccaagaaagggctgtgtgtgtgtgtgtgtgtgtgtattttttttttttgagacggagtctcgttccgtcgcccaggctggagtgcagcggcgcgatctcggctcactgcaacctccacct

SEQ ID NO: 152345 - DNA, 352 bp, Homo sapiens
tggacaaaaagctgatggattttctgttatttccaaaggataactatgataaagaaatgctttttatctttgtagaaatgtactgctgtttttatcttttgttttgggacataagactcttctttatgcaattaggaactaatcatggaggacagagagtactttctattcctctgtgtgatctcagaagtgctccctctttttcttaccaatgacttattattggggaacctgccctgatattcacgtaggttcttttctattttccttaagcgtcggccagcttgagaaataaagggacagagtacaaaagagagaaattttaaagctgggtgtccgggggagacatcac

SEQ ID NO: 152346 - DNA, 578 bp, Homo sapiens
taggagggttaactgagaaaagaagagagaagatccaaataacattaattagaaatgaaatgggagatattacaaccagcaccatagaaatatgaaagatcattcaagagattcaacttcttcctggtttagtcttgggatggtgtatgtgtccaggaatttatccatttcttctggattttctagtttatttgcatagatgtgtttataccattctctgatggtagtctgtatttctgtgggatcagtggtgatatcctgtttgtcattttttattgcgtctatttggttcttctctcttttcttctttattagtcttgtcagcagtctatcaattttggtgatcccttcaaaaaatcagctcctggattcattgattttttgaagggttttttttgtctctatttccttcagttctgctctgatcttagttatttcttgccttctgctagcttttgaatgtgtttgctgtggcttctctggttcttttaactgtgatgttagggtgtcaattttagatctttcctgctttctcttgtgggcatttagtgctataaatttccctctacacactgctt

SEQ ID NO: 152347 - DNA, 329 bp, Homo sapiens
tgtaccctttctgcagaaagtaaaaatagccttgctgaaaaaattaaatttacgttcaagtgctatttctttacagcatcaaagaacaagaatttcaaacagctatattcctgggtattttggtttttttgtagctattataaatggaattaagttcttaatttgatctcagcttggtcattattggtgtatagtagtgctactgatttgtatacattgattttgtaacctgagtctttaccgaattcatttatcaagtctgggagttttttggaggagtctttaggatttttgagatatgagattgtatcatcaccaaatagacatag

SEQ ID NO: 152348 - DNA, 332 bp, Homo sapiens
ctacttagtagttatgtccttgagcatgttatttaacctgagccatctgtaaaatgggactgattatatctgtttaaagcacccagccaaacgctggacacaccatgtatctactcatttctatataaatatgccattatgccacaaatgcctcacataaatgacataaaggaacgtttggcataggggtgtactgagtgtttttgcggggaggggcaaactgcactcaggggctctaggaacttaccttttggtaaggcagaaggtaaattgcagaaccagcatttgaacccaatgttacttagaagttatttcaactcatcagcagagac

SEQ ID NO: 152349 - DNA, 700 bp, Homo sapiens
ttgccagtcatatagaagctcctggtggtttggcaagtgcccagaattccaaccacctgttggaactgttgccaaaatacagtagatttttatttcccagatgttgttcaaccgagagtacaaatcattaatatgactttgtgtctttaaaaaaattcgttctcctattacaaaagtattatgtttcccactagttctgtgaagctgagcagtcacagaggtcttgttcctgcctcttgaaaaaacattaaaacgggtagcaaatgtgctggggatcggtcacctgagatagctttcagagataaacctgtgcgagatagagaagggaaaactatttttcttttctagcaatccaggtagccaagcaagtgattccaccgtgcaggggcacttagcaaatcaggaagcgcgataacagtgaatgactttctactttcaacaatttgaagggctgctaacaactgatggcttcttcttgaggatggcattatcagtagcagcaggacccagacctctgcaccgtttctgcatgttaagtttaaacagtgtatgcctatccttgaggataaacttataacagggccaaggtaaaacttagagaagaaattctagcctgtgatttgaagatctgggagcattcagacatattggaacttaagttttcattctttttctcaggagacaaagctgcaattatgaa

SEQ ID NO: 152350 - DNA, 647 bp, Homo sapiens
atcatctcacatttcccaaattcatcttcataacaatcctcactcccgtatatcgtatgctctgctggatccatagggaggactgcttccaccagaagacacagttgaactaaattccattgaactagaagttaagactgccatccaaccactttgggctccttatgcctctgagtcaacaggccaataggggagttatggtgttggctggggtaattgatccagactaccatggggaaatctgacataaaagaggtaaaaaagaatatgtctggaacacaggagatctcttagggtgtctcagtattaccatgccctgtggttaaagttaatggaaaactacaacccaaaccaggcaagactatgaatggcccagacctttaggaatgaaggtttggtttacctcccctccaccctcaaaccaaccttggccttctaggttaagaagcataaccagctgaggttcttgctgaaggcaaagggaatacaggatgggtagttgaagatggtagttgtaagtatgagctgcagccatgtcatcagttacagaaaagaagactgtaattgccatgaatatttcatccctattttttttaaataatgtgtgtatgtacacatatattaaacaaatatctttgtttcctttc

SEQ ID NO: 152351 - DNA, 419 bp, Homo sapiens
tctctagtcttccaaccctcaacttctacagctctgttcactaatattagcattcatcttgcccactggaatgcaggctccaggaggacagggctttcgggggtcttgtttgctactattaataataccagcacctaaaaatgcttggcatgtagtaaatagccagatctgatgactcaacaaataagaaaaccctggaatcagttaggatattgttgattctaagtaatagaaaactcaattcaacaatatagttggcttaaacgatagagatatgttgaattccctaatgagaaagtctagaggtaactcactccaagtgaggcctgatccagcacttcaacaacatcaccaaagactcgatgtctctcgatctctctactagtccttccaagaaaatggctaaaatcacatcgggg

SEQ ID NO: 152352 - DNA, 750 bp, Homo sapiens
gttagggggagaaaaggcagaggagtattttctgtatatgtccacgtggtggtggaaagtggctttccaagtctgcctacctgcgtgagaattcttcttcatcacttactacctgcacttctctgtacttcagctttcttctctacaaaatggatttaataatagtactcaccatatgaggttgttggatggaatgaatattatatatgtgtaaatgcatagcataggttatggtgcacagaaggtgtgcagtaaccatcaggaagtatttaatattattatttttaaagcaatagttctcaagcctggcaatttttgatcacttaagagcctctttaaaaaaatacagttgctcagaccttgctgaatctcctggatcagaacctcttgggttggggctatggcatctgttatttcttgaaaacatctacaaatggttttgatcctctgtctgttgaaaatcactggcctagaattctattagttattattattcagagaacacaaattgtgccacaggttctcttacacagcctttgtttagagttaagcatgaggaggtctggaaataaaatcaccagggatgtaatttagtttggcaaagatgggagttccgaattcctcgaagccagagaactgagtatggaggccagtgacagaggtgtccaagactgggattaaagcctgaacaatagagccaagggctggagtccaggaaaacgaggctagattaaagttgctgcaagaaac

SEQ ID NO: 152353 - DNA, 390 bp, Homo sapiens
catggaatgttttttagcttctttttgcccacatctattcctttctttcccctataaatatgtctatactacagaccattaggatgcacaatagaaaaggtagtgctggctgggcgtggtggctcacaactgtaatcccagcacttagggaagccaaggcaggcagattacctgaggtcaggggttcgagaccagtcttgccaacatatagtgaagccctgtctctactaaaaaatacaaaaattagctgggtgtggcggcgcacacctgtagtcccagctacttggaaagctgaggcaggagaattgcttgaacccaggagttggaggttgcagtgagccgagatcgcaccactccagtctgggcgacagagtaagactccatcttaaa

SEQ ID NO: 152354 - DNA, 288 bp, Homo sapiens
ttgttctcctgctcactcccactccactacctctcactcacactctcatcttgtgataatttctgccaagaccttgccaaatactagtgtcatgctcttggacttcccagcctgcagaaccatgagccaaataaacctttctttataaattacttagtctgtggcattctgttatgcaacagaaaatggactaagacatgtctataaaacctctgtctcccccagtcttgcccagtacagtaaatggcaccacaattcacccagttgctcaagctgcgggtcttgcgg

SEQ ID NO: 152355 - DNA, 253 bp, Homo sapiens
aacctaacctcccctcaaatcatccaaggataaaaacaactggaaaggaatggccaggaaactattgaaacatttactataggatcttgacctacactcttaactcattgaaaacaggacttggccaacaatggttctatttacgtccaccttttagaaatgtacctgttcaaactagaaatccctgagcattccagttgcattcagttaaaggaggtaatttgttagctatgttgttagtgaccagaactat

SEQ ID NO: 152356 - DNA, 323 bp, Homo sapiens
aagagagaaatagagtggcagctgtggtacagactgacagagcaagaagacacggggctctgatgattggtacctgtgaaatgcggggattcaagggattttattcaattctagaccatggaagagaaaaaacaattgtaagttccaagcaagaaaatagaacatatttggggacattatttaaatagtgaataataattataggtttgcagaaataaaacattctttgatttccaacttttagaattaatcttaaccaaagtatagaagccttaattaaggctacagaacaccgagttgataatagtcagtattgtataaag

SEQ ID NO: 152357 - DNA, 206 bp, Homo sapiens
ctaggatgggttgcagcctgtcaatgttaagaccatccacagccctgctaggtgccatgaagaagatggtgctcttttaactcaactcatcatgaatcaagggagagggagagagtgtgggagccggcagcctgctgttgcttagggttggggaatgcaaagtgtcctgcgacctctatagcagctactgtttcaagccttggcag

SEQ ID NO: 152358 - DNA, 290 bp, Homo sapiens
aagccattctgtaacatagatcatctgtttgatggtttaaaaaaacaaaacaaaacaaaacataaacatgcgacttctccccaaagcagattcataaactgggcctgacagaagctgagtactcccctacagctgctaaaggactcttagacattgtcaggggcctcattctctagaggggtgacagcagtttgaccgatatgttacaagtcagcttacatcacacaatgaaacactttctcttgcctgtaatgctggcccacatcctttgtgcacagtaacagctcctg

SEQ ID NO: 152359 - DNA, 343 bp, Homo sapiens
tgtagatgatgggttgatgggtgcagcaaaccaccatggcacatgtatacctatgtaacaaacctgcacgttctgcacatgtatcccagaacttaaagtataataataaaacaaaagagttgatgtgaaacatgggtaaaaatagcaagatactgtctgtaatacaaagaaaaggatataataagaactgattttgataatcaaaaaaaaaaagaagatgcacacagccctaagcatctacattcaattttaactgaaccattgactcccttccccacctaatgaattcagtacagtaaaagatggaacaccacgtggttaagctttcaaaccccaagacatg

SEQ ID NO: 152360 - DNA, 438 bp, Homo sapiens
cacagctatgggggagagctgagggtatagcaggacagggccatggaggtaggaagagggcgtgccattcgaggacctatctgtagttcagcacggaagtacgcagggtatggagtggcaggaggccagagtggagcccagaaaacagaggccagatgaagaattggtgtgcgctgcatatgaatggggtgggaatgaatgctctagtgggactgggaaaagagaacctgagcctcagggatggtgatgagacagaggctggccactccaattgtggtggcaaggagaatgctgaagagtgaatgcagcctaatttcaaaccctggctccatcatttactgtgtgcccttggacagattccttagtttctgagtttctaatcacttgaatgaggatcataaaagtttcaacggctctggtgaggatgaaaacccatgg

SEQ ID NO: 152361 - DNA, 290 bp, Homo sapiens
cctacagaaccaacaccacctcacggaaagagatttttgagcagagaagtggggctgtagagcacactgcgccctacagtgacacatgaatcaactggatgtgccaaagcttcaacggctgctcccacaggggccaactgcggtcactgtcatctgatttttatccaatcaacaactactctgtacgtacaaagccaaagctccaaaagtctcctgacacccgctcgcactccctccactcccagaccccgtcctgacacccgctcgcgctccctccactcccagacccc

SEQ ID NO: 152362 - DNA, 726 bp, Homo sapiens
cccttccgccgacctggaggtccaggctggccaagtgaacgtgaaactcccggagggcccccttcccgagggagccggcttcaaagggcacctccccaaggtgcagatgcccagtttgaagatgcccaaagtggccctcaagggcccccagatggacgtcaagggccccaagctggacctgaaaggccccaaggcggaggtgatggcccccgacgtggaggtgtctctgcccagcgtggaggtggacgtcgaggctccaggagccaagctggacagtgtgcggctggagggtgacctgtccctggccgacaaggatgtgactgccaaagacagcaagttcaaaatgcccaagttcaagatgccgtcgttcggggtgtctgccccaggcaagtccatcgaggcctcggtggatgtgtctgcgccgaaggtggaggccgaagtgagcctcccctccatgcagggggacctcaagaccacggacctctgcattccgctcccttctgcagacctggtggtccaggctggccaagtggacatgaagctcccggagggccaggtgcccgagggagccggcctcaaagggcacttgcccaaggtggatatgcccagtttcaagatgcccaaagtggacctcaagggcccccagacagatgttaagggcgccaagctggacctgaaaggccccaaggcggaagtgacagcccccgatgtcgaggtgtctctgcc

SEQ ID NO: 152363 - DNA, 264 bp, Homo sapiens
ggaggtgccagaatggaagagggagctgggtgcaagagctgctgctctgaaattgtgcacactgcggaaaggtgccccttccaggtggccacagcctgcactgggcacatggcttaatgacagagctccttcctcagctgggagcccttgtgcaagacacagcctggtcttgtgtttggaggtccaggtctacgttacgttagaacatcctagaaaaccgcagcatggaagatcaggaaggtaatacgtgggacagggtgacat

SEQ ID NO: 152364 - DNA, 425 bp, Homo sapiens
ctgctaacacctcgattttagcacttctgacctccagaattgtaagatggtaaatgtatgttgtttaaagacactaaatcggtgaaaatttcttgcaacagccacaggaaactaatacagtacccgacctgtgttcctcatacctgaccatctctgtattatccaggaagtccaaacaccagctccaggattgcatttctgttttcgtgttttgttttgttttttgttttttgagacggagacttgctctgtcgcccaggctggagtgcagttgcatgatctcagctcactgcaacctctgcctcctgggttcaagtgattctcctgcctcagcctcctaagtagctgggattacaggcatgtaccaccacacccggctaatttttgtatttttagtagagatggggttttgccgtgttggccag

SEQ ID NO: 152365 - DNA, 440 bp, Homo sapiens
ttaggtcaaaagttataaaaatggttttcagagcctcaagtccaggatatggacagggaaaacaaccttgattaggattctgactcaggcatcgccggtgtcattggagcaggagccttctgtctttgagtcctaggtttctctgccatgaaattggagtaattacaatgcacctacctcgccaggttgttgaggactccacaaggcgtagcgtgtgggtctcctagcctagggtgtggcactcaggagtggcacgggcatgaatccagggagtgtcgccagaggagaaaagccaccccaccttcaggccaaggatggtgccaggtgccaggcacccacagatccctcctttttcaggtcttggctcaagggtcaagccctttgggaaggcctctggtcgggaagccgccattacatctctaggcccctggcttggctcc

SEQ ID NO: 152366 - DNA, 387 bp, Homo sapiens
gagacccccctcccaggccagctgatcttctgctctacagaccagagtcacacactgcctgccccgctttcccccacccctgccgctccaggactggaatggcaggcggcatcccggcctctcctgaagcgagcatgcagcccctttgccatttcctagcgaagtggctgctagctagtctcaggaaaccaatactgtgaaagaactgatgtgcaggcagtgcacagccatggggtgatttgaaagtctcgggggcaagggtccccactgtgagttcagcttggccaagggtggcagctacctccctcagccccacttccatcctccgggttctggcactcctgatagtccgccttcctgccttaacccaggccagccgctgctcca

SEQ ID NO: 152367 - DNA, 399 bp, Homo sapiens
tatttttccataagttattcaggtacaggtggtatttggttacatgagtaagttctttacactagtgatttgtgagatattggtgcacccatcacctgagcattatacactgcaccatatttatagtcttttatcccttatccccctcccattcttccccccaagtccccaaagtccattgtatcattcttatgcctttgcgtcctcatagcttagctctcccatataattgagaacatacaatgtttggttttccattcctgagttacttcacttagaataatagtctccagtctcatccaggtcactgggaatttgggttggttccacgattttgtgttgggcatttgggttggttccatgatttgcaattggggatgatgctgctataaacatgca

SEQ ID NO: 152368 - DNA, 655 bp, Homo sapiens
agtgcactgtgatttgctgagagacagagcacttcattctagatacagctatcacctggtgtttgctaaatcactgaaattcttgcaacagctgtttgttcctggggaaacattcacttcatattgcagcaataaactgatcattgccaattaaatgcccattaattgtgtaagcaaggattactgccagatgtttacattagaaagaaaaatatcctttgctatttattttccacttatggccatccctttacatgtagacaattatgtatataagttttttataataagccacaaatttcaattcagaaattaataaaataatctctccataggtttgatctaacagaagataggctaggataaatcatacatgtaattaaaaagaataaatttggacagaatcactttgcaatgtaaaaaatatgctcaacattacatagtgactcaaatgttttggtttgttttatttgctatattctatctttcctagaagttgtccttattttccctttattctatttggaataataagcctatgaaattgtattttttaaagttgaaatagaataaactctctcccatagtctattatggagaagaaaactttaaaaataaagaacccatataaaataaaggaaggtggtgttttgta

SEQ ID NO: 152369 - DNA, 406 bp, Homo sapiens
caatgcccaaggaggtttctcttagggagttgtttctgatagatttggagcaagcaggtgctagttctgtgaagtcaggctgtgattaacaggtggtctgtgccatccacgtgggtataagggtcagtggggcaagtcaagttggtctgtctagcttttccacagtgaggtcgtcaccaggaggcagctgtgtaagtcacatatgtgggttgagcacatgcaggaactgggaggaggtggataactggaaactgttgaggtcaagtgcagctttcttcttcttcttttttttttttttttctgagacagtctctttctgtcgcatgaccccaggagacgaaggttgcagtgagccgagatcacgccactgcactccaacctaggggacagagcgagattccatctc

SEQ ID NO: 152370 - DNA, 818 bp, Homo sapiens
agtaaggtttagcatacttttatttggattaataatatcactagaactgtctattgaattcaaaaaatgtattatctctatctataagctattaaaaataaagatcaagtaccagaaaacctgatggcttgaggaaacaccagagagaaattagcaggtctactgcccaggtaaattgcatgtattatcccagacagatgaggttcagcataatttaaaaggtacacacctccacaaccctagatagtcctcaagtgtttcatttttcattgtttaatcaagggagagaaaaaatgattatggaaatcaaatgaaccttcaaggagaaggagtaagaccttgaaaaaacattttgctgaaatctctttattttggaaattgggaaactaagatgccccacaggcttccatcttttacagcttgcccaagacaagatcacacagacagatgactgaagcaagattagaagctcaataccatcattctagaccaacattctttctctacatgctgcattatgtgtaacttactttccacatactacaaagtaaactattgtctttattctcttttagtttaaatagagaggaagccacctcacaccctgtattgatcagcttgggctgccgtaacaaaataccatagcctgggtggcttaaacaacacatgttaattttctcacagttcaggaagctggaggtctgagatcaggatgtaagcacggtccagatctggtaggggctctctttggggtttgcaggtgactgatatcttgttgtgtcctcacgtggcctttcatctgtgcataatcagagaaa

SEQ ID NO: 152371 - DNA, 517 bp, Homo sapiens
  misc_feature (42)..(42): n is a, c, g, or t
ggggtgcggcgatacgtcaataaagaagtgttggagtggttngtggttccggccgcattcgttctttattttggaaattgggaaactaagatgccccacaggcttccatcttttacagcttgcccaagacaagatcacacagacagatgactgaagcaagattagaagctcaataccatcattctagaccaacattctttctctacatgctgcattatgtgtaacttactttccacatactacaaagtaaactattgtctttattctcttttagtttaaatagagaggaagccacctcacaccctgtattgatcagcttgggctgccgtaacaaaataccatagcctgggtggcttaaacaacacatgttaattttctcacagttcaggaagctggaggtctgagatcaggatgtaagcacggtccagatctggtaggggctctctttggggtttgcaggtgactgatatcttgttgtgtcctcacgtggcctttcatctgtgcataatcagagaaa

SEQ ID NO: 152372 - DNA, 133 bp, Homo sapiens
ccaaccagtcaaagacattctaagcctctacttttgtcatgcccgcttacattccattttccaaagcaggttatgtggccaaatccgaatccccaggccagggaagtactgttttcccagctcttgttcactc

SEQ ID NO: 152373 - DNA, 468 bp, Homo sapiens
tacaggaagcatagtgccagcatgtgcttctggtgagggcttttggaaacttagaataatggcagaaggtggcagaggatccagcctgtcacatggcaagagagggagcaagagagagagggaggaggtcccagactcttttaaacgatcaagtcttgcatgaactcagagtgagaactcactcgttaccgcaaggatagtaccaagccatttgtgagggatctgctcccatggtccaaacacctcccgccaggccccacctcaaaactggggattacatttcaacatgagatttagagaggacagatgtccaaaacgtatcagaggggatcttgttccatttttacgatgctcttgtgaatgacaatcattattcccatttgaaattgacatgcctcgttgcaggaagtagagcaccacgtgccaagttaacagcttcttctgatggtgttaagatttcactaactg

SEQ ID NO: 152374 - DNA, 307 bp, Homo sapiens
aaactataaaaatcatagaggaaaacctaggaaataccgtcctccttggcaaagaatttgtggctaagtccctaaaagcaattgcaacaaaaacaaaaattgacaagtgtgacctaattaaactaaagggcttctgcacagcaaaaatcaactcaagatgggttaaagacttaaatgtaaaacctaaaactataaaatctctagaagatatcagaggaaataccattctagacataggccctggcaaagatttcacaacaaagatgccaaaagcaattgcaacaaaaacaaaaatcggcaaatggaa

SEQ ID NO: 152375 - DNA, 284 bp, Homo sapiens
tcgagtagtaaaaatccccagtgaggcaggtataggcctgactagcacccatctgctcctttccccattcctttgttccttctcattcttctttccacttccttcctcctacttttctttattttatccttctgggagatcattggtggtagcctctctgggcttctctgatccttcaattcccatgacgccatgccatgtatcagtgggcatttaatacagaataataactgtcattgctctggtcataagttgaccctgggtgtgactggatgccaagaatt

SEQ ID NO: 152376 - DNA, 1602 bp, Homo sapiens
  misc_feature (1529)..(1529): n is a, c, g, or t
ggagcgggcgacctgggtgcagggagcagcccacacccctccctcacggaggaggaggacagccagacggagttgctgatcgcggaggagaagctgagccccgagcaggagggccagctcatgcccaggtacgaagagctcgcggagagcgtggaggagtatgtcctggacatgctgcgggaccagctgaaccggcgccagcccatcgacaacgtctccaggaacctcctgcggctcctcacctccacctgcggctataaggaggtgcggctgctggcggtgcagaagctggagatgtggctgcagaaccccaagctgacccggccggcccaggacctgctgatgtccgtctgcatgaactgcaacacgcacggttccgaagacatggacgtcatctcacacctgatcaagatccgcctcaagcccaaggtcctcctcaaccacttcatgctgtgcatcagggagctgctgagcgcgcacaaggacaacctgggcaccaccatcaagttggtgatcttcaatgagctctccagcgcccggaacccgaacaacatgcaggtcctctataccgcactgcagcacagctcagagctggcgcccaagttcctggccatggtgttccaggacctgctgaccaacaaggacgactacctgcgggcctcgcgggccctgctgcgggagatcatcaagcagaccaagcacgagatcaacttccaggccttctgcctggggctcatgcaggagcgcaaggagccgcagtacctggagatggagttcaaggagcgcttcgtggtgcacatcaccgacgtcctggccgtgtccatgatgctgggcatcacagcgcaggtgaaggaggccggcatcgcctgggacaaaggagaaaagaggaacctggaagtgctccgctcattccagaaccagattgccgccatccagcgggatgccgtctggtggctccacactgtggtcccctccatcagcaagctcgcccctaaggactacgtgcactgcctgcacaaggtgctgttcacagagcagccggagacctactacaagtgggacaactggccacccgagagtgaccgcaacttcttcctgcgtctgtgctccgaggtgcccattttggaggacacgctgatgcgcatcctggtcatcgggctgtcccgggagctcccgctcgggcctgcggacgccatggagcttgctgaccacctggtgaagcgggcggctgccgtgcaggcggaatgatgtggaggtgctgaaggtggggaggacccagctgatcgacgccgttctgaatctgtgcacctaccatcaccctgaaaacatccagctcccaccggggttaccagcctccgaaccttcgccattttttacccttttattggaaggcttgggccctcctgcttggtcgttcgccgcattcaacccagagaacatcggcctggctgcgtgggaggagtacccgaccctgaagatgctcatggagatggtgatgaccaacaactactcctacccaccgtgcaccntgacggatgaggagacccggacggagatgctgaaccgtgagctgcagaccgcccagcgggagaagcaggagat

SEQ ID NO: 152377 - DNA, 730 bp, Homo sapiens
ggagcgggcgacctgggtgcagggagcagcccacacccctccctcacggaggaggaggacagccagacggagttgctgatcgcggaggagaagctgagccccgagcaggagggccagctcatgcccaggtacgaagagctcgcggagagcgtggaggagtatgtcctggacatgctgcgggaccagctgaaccggcgccagcccatcgacaacgtctccaggaacctcctgcggctcctcacctccacctgcggctataaggaggtgcggctgctggcggtgcagaagctggagatgtggctgcagaaccccaagctgacccggccggcccaggacctgctgatgtccgtctgcatgaactgcaacacgcacggttccgaagacatggacgtcatctcacacctgatcaagatccgcctcaagcccaaggtcctcctcaaccacttcatgctgtgcatcagggagctgctgagcgcgcacaaggacaacctgggcaccaccatcaagttggtgatcttcaatgagctctccagcgcccggaacccgaacaacatgcaggtcctctataccgcactgcagcacagctcagagctggcgcccaagatgaactgcaacacgcacggttccgaagacatggacgtcatctcacacctgatcaagatccgcctcaagcccaaggtcctcctcaaccacttcatgctgtgcatcaggtgcgtggcgagccggggca

SEQ ID NO: 152378 - DNA, 211 bp, Homo sapiens
gagagagagagtgggcccacatgaagggaatgagaggtcattaatggtccttaaagcagcatagtgatgcaaatcagatttgttttaaagggctctctttagttttggtgcggaaaataaattggagggaacagaagggaaggcagtaaagtcaggagactgtgtagtaacctagatgatgaatgattgtctcctttaatgactagagtgg

SEQ ID NO: 152379 - DNA, 334 bp, Homo sapiens
ctgcctcaacctcccaaagtgttaggattacaggtgtgaaccaccacgcctagtgcagactgcctaaccttcatagtcttgtcccaaactggttccatttcttccaactatttctcttccataaatcatcccctactagactgcgccctagacatccaagaccgtggcttactggcctgtgtataccagtgtctagctcttaactgttttgtttagtcgtgcatcaggcactttcgtgtgtgtgtttccctcactagaatttcagctgcatgagagtggcgacctggcgtgttttgttcattgctgtgaccctacagcctggcacacagtagtc

SEQ ID NO: 152380 - DNA, 1005 bp, Homo sapiens
aggcatgagtcaccgtgcctggcgtgatagttaagtatttttaaatctattcatttagtgcaccacatgcacagaataaagaagaaaaagtatgtgttcacctaaatagattttttaaagttaacaaaattttcaaccgacttaggttaaaaatgcaaactagggatagaaatgtaatcaggtgacagaaaccacacagtaatttgaacaggaaagttcaatacaaagaattactatttcaggggattagagtaatgagggcttggctagtgaaaagtaaagagaactctaaagaagaactctaaagcgtgcaggatagcatttttaaggtacagccactattccctggactcagatagaacacctaaaaaagagctcctggccctcatacctacgcacaccacggctgagatcaagacctttttggagaaggcacagacatggctcgccgcgtggcagagaagtcaccaaggttccatgctggccaaactcgctggaaacccaccttctgaatgttgggggaagccatccacggggaggcgctgtgtcttagaactcaccacaaagctgcctttacagagtgccaggggaaactggtcaccagaggagcctaactgacagcactccactgtaaagtcagctgagaggactgactgccgggttcggctgaccctctgcacaatgaggagacagatgctacagaagtcacctatgttgcaggagtcaggcacagggaaagctatgaaagcctgtgttgtaggagtcaggcatttaggaagtggtacccgcagtggcctggccagaggagcacaccaagtcaggatgagaagcacccttcccatgcagcgtccttccacaccccacgatgacaaggcttaccatcttgccagctgacaaaggagaaatgtttaccagatccatccccatgatcacaaagcaggtattgaagggtggattggaactgaaagatgataagttggagctgaaaaagttactccctgcata

SEQ ID NO: 152381 - DNA, 344 bp, Homo sapiens
cacttcctaaatgcctgactcctacaacacaggctttcatagctttccctgtgcctgactcctgcaacatagggaaagctatgaaagcctgtgttgtaggagtcaggcatttaggaagtggtacccgcagtggcctggccagaggagcacaccaagtcaggatgagaagcacccttcccatgcagcgtccttccacaccccacgatgacaaggcttaccatcttgccagctgacaaaggagaaatgtttaccagatccatccccatgatcacaaagcaggtattgaagggtggattggaactgaaagatgataagttggagctgaaaaagttactccctgcata

SEQ ID NO: 152382 - DNA, 333 bp, Homo sapiens
tttctcatgccctacaaagcctgatgttaaacagtcagccttctgcccaccaaatgcctgggatagctggggagcttgagagagatactaaagaaaaagaccagaaatggtagcacccaggggcttctcctgacccagacaacaccctccatatttcccacatggggcttgagatcctgatgatggtgagaaatcagcttctggactttctagtagacatggtgccatctatttggtgttaaatatctggtggtctaaactttcctcagaaataatgaaggtgactgaaatctcagaaaaaatgctgatgagatcattcctccaaattttgga

SEQ ID NO: 152383 - DNA, 287 bp, Homo sapiens
atctcagtgcctggtacagggctcaatacataatgggtgctctgataatctattaaataaattgtctgtgttgaattatctcaaccttaaaggcaatactaagaagaagtgtgtgtgtgtgtgtgtgtgtgtttaacagagaatatggccagtgcgtgagttctttctccttctctctctctctttttttttttaaataactcttcggggaagtaggtttataagccttggccagggggtaactggtgtgaaatacccacgactaaatgtgctgagagggtaccgag

SEQ ID NO: 152384 - DNA, 331 bp, Homo sapiens
cttctaaaaattacctaacttacccttattaatcagtgttatcatttagtacatgttctatcaacagaaatagcagaattcaatctttgtgatgcaaaaaaaccaacttaataatgttcctgaatatattgccaattactaaattagtttttaaaaatccgaaagtattttaccattgattggtttcacccctcataaattgttggtattatacggctttctgaaggtgaaaagaatactctcctcagaaatatttatattgacagaattagctatttaataaatatttgtcacattatattgctttttgcgattcatcatcacatattgg

SEQ ID NO: 152385 - DNA, 485 bp, Homo sapiens
gtaatgagttcttgatagtcagtaaatcacagcatacatgcaaggaacaaaggagaaaatgaaatcatttacttggagatgagagaagtcaactttatcagtgaattcattctattttattttattttacattgtattttattttatttattttattttgacagagtctcgttccgtcaacccaggctggagtgcagtggcatgatctcggctcactgcaacttccgcctcccaggttcaagggatcctcatgccaaggcctcctgagtagctgaggcagaagaatctcttgaacctaggagacagaggttgcagtgagccgagattgcaccactgcattccagcctgggtgacagagcaagactctgtctcaaaaaaataaaaataaaaattagtcagattatgggcaagattactgtgccaaagtagaaatgactcttctcagtgctaccaaattaattctagtcagaatcagagtggggaga

SEQ ID NO: 152386 - DNA, 227 bp, Homo sapiens
tttgatctagattctaggggacttttaatttatcctagagatcatcactttggtctctggctgtgttcatttggttatatggaattttccattaaatttgatttggcaaacatatctctaagaattgtattttattctttgttccctttttgtatcagcctcatcatgttttaaacatgcagtttaaatatcctatgttttttttctcctaaggtcacatctccttg

SEQ ID NO: 152387 - DNA, 395 bp, Homo sapiens
gcacgcactcactgcacgaggctatagattatgcaacccctatgactccgagcttccatctgtaggatcaccctcagattatgaccttgaatcctactttactgagaaaactgaagcaattaaaagagatttccaaaatccaccacaaagtaatgttatacatttcaacaatgtgccatttcagcctaaactgaagactgatttcattacaactctgaaacacaagaaattaaatgcaatctggtattagctacacttttaaactaagatatttttggaatgagaaattaggaacatatctggcacatgaaacaaactcctgcctagctacatcatttgcttctcaatcaatgaaataaaagcactacaaaatatgccttttagcttaaaaaggg

SEQ ID NO: 152388 - DNA, 487 bp, Homo sapiens
gacatttttataacattgacttcctaatggggaagtttaaccaggtcttgtgcattcttcagaaatacattgcattttcttcataaagatctttaactttgttgtaaaatttattctaaggtccttataactttgtcacaaatctgagtggaattttaaaactccatttctttttcttactgttaattacttaatgaattaattcttactgttaattactgatatttttcaaaagctgttgatttcctaatatgaataactagcttgctaaactcttatcctaatagttcgtatttaatttcttaggtgtgtaggcgtaaacaagtaaaattttcttcttttctaataagtatattgtttctttgatttttatcttattctattattttatatccctaaaacaatattgaataataatgctaataccaggcaatatgtctttttcttgaatttagggggagaccttagtattctttcatcctttatg

SEQ ID NO: 152389 - DNA, 833 bp, Homo sapiens
gcacactaatatgcttgttgttcttatccgttttgtatattcatagaattcaattatttattgagcacctgccttttgcgacatgctacatgctattgtgtgtattcagaatacatcagaaaacaaaacaaaaattcctgtcctgtgaagcctacattttagcgtgtatgggacagaataaaaaataagccctgacgcagccaggcacagtaatcccagcactttgggaggccaaggtgggcggatcacctgaggtcaggagttcgaaaccagcctggccaatgtagcgaaaccccgtccctactaaaaatacaaaaattagccaggcgcagtggcacacacctgtaatcccagctattctggaggctgaggcaggagaatcagttgaacctgggagacagttgcagtgagccgagattgtgccactgcgctccagcatgggcaacagagcaagactccatctcaaaaaaaataataaggcgagttgcagtagcccacgccagtaattccagtgctttgggaggctgaggcaggaagattgcttgaggccaggagtttgagaccagcctgggtgagacaccatctctacaaaaaataaaaataataaacattatcacgaattatattagaaaatgttaagaaccatgtgaggatagggaaaatgatgggagattaagagggagtgcagttgcaaaatgatagagtggtcattatgggcttcattgaaaaggagttgcagatttgacttttcctttgtgaaatgagaagaatcagaaaatttctctcctcatcttttatgcaggggaaggatttgaagctgatgtaacaccatt

SEQ ID NO: 152390 - DNA, 336 bp, Homo sapiens
atccaagttatatatccaaaatatcttgtagacatgtaataaacattttaaagattattaataaatattttacattctcttttttcatactaagccttctaaatccagtttactcttgtagcacatctcaagtcagactaaccacatttcaagttccagcaaccagttcctagtggtcatggtggacagcacagtccttacagcttttttgtataacgtaatgtcttaagtattttatcagtgccctttaaaactttttagcatcatttttaatggctacgtagtatttcatcatttagatttactataacaatatattgaggtagttgtgttttt

SEQ ID NO: 152391 - DNA, 110 bp, Homo sapiens
ggatttatctatagtagctagccaataaactggatattggacaaaagtacaatttatacaggacagaagacaggaagtaataccaagttgcataaacatgtgtgaagtgg

SEQ ID NO: 152392 - DNA, 334 bp, Homo sapiens
caacctcccaagaatgaatcaggaagaaactaaaaccttgggcaaataacaagttctgaaattgaatcagtaattgtaaaaaaagaaaacctaccaaccaaaaaaagccatggaccagatagattcagagctaaattctatcagatggataaaaaagaaagagctggcaccaatcttactattacaaaaaaaaaaaaaaaaaaatcaaggaggagagactcctccctaaatcatgctacaaagccagcatcaccttgataacaaaatctgtcaaagacacagtgaaaaaagaaaactacaggccaatatccctgatgaacatagaagcaaaaat

SEQ ID NO: 152393 - DNA, 297 bp, Homo sapiens
tataagcattgtgtctcaaactgtagaatgatgtttcatttatttggctttttctaggaaaaagaaatgaaatatttttcctaagaagtgaaaagaacccataagagctccagtttgcaaaatgctagtctttttattgatccctttttttttttttttttgacatggagtgagtctctctctgtcgcccaggctggagtgcagtggcgtgatgtcggctcattgcaacctccgcctcccaggttcaaagaatcgcctgaacccagaagccagaggttgcagtgagccgtgatcccg

SEQ ID NO: 152394 - DNA, 487 bp, Homo sapiens
ggaatcgagctcggcccatgttcagataggcacaaacttctactatgttcagcctttgtcttacttcttctgaaagctcctaggtagtaggcattttgcatgatggacattgctcttggcagaactcactcttgcctcattttgcaacagcatctgtagctgagagcccagagaagaaaaaattcatgaaactttttgttttctgagagatataacagaggaaaacagacgtaaaaattgattctacaaaggttgtctaccagaaggggattcctagagcatagattatctttccttgttgtgagaaatttccatttgaatgctgaaggtggaagctcattctgatataaaacttaaaatgttagtacaagaagcccactcacgttgacatatattattccctatcatttgtgttactactttaacattattttaaaataaacctctcatttggtatgtggaaaagatacgacctctatctcatgtt

SEQ ID NO: 152395 - DNA, 157 bp, Homo sapiens
gtgccaagtttgtaccagtttctgaatcgtcctctgcacacactgctcagctgactgccttcctgcatgatgagcacagcaccaggggctgcagatgtcacagaaaaggtttgaatcaacatctaaagtcacctcagtgtggagcagaaattgagaa

SEQ ID NO: 152396 - DNA, 182 bp, Homo sapiens
ttgtttcatatacagtttgtttgttggttgttttaggcagcaaggtaatcgggccactatcttgtctggaagcgtaatacttgagctacttcttatgaaaaagaaaggctgactcagggttaaaacaagagcacagaggacagagaaaagagccacagaatcttctcaagaagcaggacaga

SEQ ID NO: 152397 - DNA, 263 bp, Homo sapiens
ggttcagaggatcccgaaaatgacatagagacaggatctggccatattgcccaggctggtctcagactcctgagatcaagcgatctacctgccttggcctcccagaatgctgggattacaggcgtgagccactgtgcccagcaagtagaggcatttttaaagttttaggtggagccttggcaagagatttctcttgtactggggtgacaaatattcatgcatttattcaagtatttactgagtacctgctctttgcaagtcat

SEQ ID NO: 152398 - DNA, 308 bp, Homo sapiens
  misc_feature (290)..(290): n is a, c, g, or t
atggggtggggggctgggggtggggcccggaggggagtggtgtgcttttcattttcatgtcctcaggagtcttgttgttgttgttgacctaggcaaatgagcttgtgtggtttccttgttagagtgcagggctggggtgtgagggctgaaggtggctcacatggagcccagttcctgccaggctccccaactcctagccacgtgatctttgctaagtccatgtacctctctgcatgtcacttcttcatgcactaggccgcaagttcctaaagtcaggactgcactgaatntgccttgatttctctaga

SEQ ID NO: 152399 - DNA, 380 bp, Homo sapiens
gcctcctgagtagctgggaccacaggcgcacactaccgtgcctggctaatttttcattttttgtagagacggtgtctctctatgttgcccagactggtcttgaactcctgggctcaagtgttgctcctgcctcagcctcccaaaatgttgagattacaagtgtgagccaacacgcccagcctttttttcttaagactatagattttcattggttgagaggacttggtaattttaacatggaacttctgaactgaccattttataagatatcgaacatatgatcagattcatattttaccctcattaatcaaaaaatagtaggaacttttttttttttgagagacctagtcttgctctgttgccctggctagagtgcagtg

SEQ ID NO: 152400 - DNA, 395 bp, Homo sapiens
atttatggcctagttcagatgctatcttctcctgaaaatgtctgattcccacaaagagaatcaattggtttccctcttccaaatgtcttggtttgaggttgcaaagcagcacttaccctatgctaccctgtaactgtaatagctgtttccacctttatgcccccaccaaggaagggctcactctttcttctgagcacgccctaccttcctcagagtgtgctgtgcttcataaaaatgtgttgaatggaatgaaagaaaagaacatgtttttctattaaagtcattttaaacatgctaatcagcaaggaatatggctgtgagcatttctcctcatcctcctagaatcatacaaaaacaaacaacgaagaaaataaaggaaacaccataaattccat

SEQ ID NO: 152401 - DNA, 209 bp, Homo sapiens
  misc_feature (168)..(168): n is a, c, g, or t
agtcgctgataaacgtcacgttcccatagacgtgctgcgggaaggccttgtcagcggattggctccctccgggtccagggactccggctgaagcgatctgcgacgtgcgcacgtggtacgggaagttcttgttggccgctgatgggcgggtcatgattcagaaacacngccatggcgcgtacaacgtggatccccagtctggtatgcca

SEQ ID NO: 152402 - DNA, 340 bp, Homo sapiens
acagaaagtacttagaacaggaccttccacatagaaagcactatgcaattattattattctacagcaaagaaatatatatttgaacactgacttagattacagctcagaggattgggttttactgctgttggattgtgagcagggctttgctctacattccaggtctcttgaaatctgacttgcaaaattaattcaaactggccttaggaatgaatatccccatggggcttaaaagagataaaaaattgtaaacaaagggcaaagagacaggacatttgtcagaatggcatttagtagcagggccactgttctttaacattagtgaggtggacaagaggt

SEQ ID NO: 152403 - DNA, 195 bp, Homo sapiens
tgccatgcacacaagtccctagacttccaggtttcagaccacacccagtcccttgacgttcagttcatgcccacccccggaggcctaagctgctttgaagcagaacagcctcaagataccaaagacgccgttcaggaggattgcctcatctctgaatcacttttaccctttcaacttcacccccaaacattccac

SEQ ID NO: 152404 - DNA, 332 bp, Homo sapiens
aagtgaataggcttggggcaaatagtggaggtggagcctacaggcctcgctgataagctggacatggaattctggatgcagaaaagacgaatgatttctagttttgggagtgagcaacctgggagctaccagtggtagatttactgagctacaaaaacagggttttttgatttggaggagaggtgaagggatactggtttgagctctgttttgcgtgtatcaggtttgaaatgcctccagcagacatcctagaaaagtcatgggggagattgggattatcaatctggagctcagggcagcgggcagaaaggatgcagatttgggagttgaac

SEQ ID NO: 152405 - DNA, 487 bp, Homo sapiens
cgtttatatggaacagcatcataatgtttatacagaacaaatgtttaaagacaatgttattttgacaagaaatatgttttagttatcagactgtaccatgaaactgctgaagttgctgccccgaataacagactatgctggcttttatatgggagaaaggcttactatgcattgtataatgtttaatattacctaaaatattgttattattcacgtacatgcattacttttcaatttgaaaaacaaaactagtgaagagcatatcgcaatgtgggcagaataatgatacacaaatctggaccatatctttacattcaaaataatataaagaattaaggtaattcatttttaatcaggtattctcaaatgactatttctatctgtatgtataagaaataaaaaaaaccatttcaaccccagataattcttaataattcttataagaaatcaaaaaaaataccatttctaccccagataattcttaaat

SEQ ID NO: 152406 - DNA, 505 bp, Homo sapiens
agggccggccaagccggtttgctagatttccctagagaggagagtggctagaggtatgtggcatatccacaccatggaacactactcagggaccagaagggaccagctacccgtgtacccagcaatgccgtaaatgcattatgctgtgtgaagccagattcagaggctgtggactgtaggattccatttatgtgacattgtacaaatggaaaaccatatacagaagacagatcagtggttgctggggtcaggacaagagacaaggatgaacaaacgggcttcaaaaacttttaggggttacaggattgttctaactcctggggtcaagcaatcctcctgccttagcctcccaagtagctggggctacaggcacacatcaccacacccggctaattttttttttaagagacggggtcttgctatgttgcccaggctggtcttgaactcctgaactcaagccgtgtccattctcccaaacagttgccccctcttggggggtacagca

SEQ ID NO: 152407 - DNA, 368 bp, Homo sapiens
gaagctgatgatctggatgagcatttatctgtacaatttgggttttgggaaaagtcactctactcctaagagatgaaatatatgggaaatccttagcaggtaatttatttattattaacttattgtagttgtattccctctaataaaactacaattttctactatattcctacctatggattggaatctattaggagaaaatcttctgtttgtagaacaagccagtgcaagtcagctcttggatctgtttctctgcctggacaccacaatgaaatggtaattgtccacatttgcaattgtccagcagtagccaggtcattgagaagttttgtgggcaggtggcctgattgatgtgcacaggaagctga

SEQ ID NO: 152408 - DNA, 315 bp, Homo sapiens
aattaaaactgtgccattggaacctagaatagtgtctggcgtataagaggacctcaagaaccagttatcaaatgtgtagtctatctccattacaaagtaagctctttaagggtaggggctttcttgatgccaaaggtcctggcacctagaacaatgtatgacacatggaagatgctcaacaagtacctgctaagcatttgtgaatatcttatagacatcacaaactgcatttcccaggtttatctaacatttccggccggaacacttgttgattactttggaaggcttttgaacaattgtggtattccggccaca

SEQ ID NO: 152409 - DNA, 460 bp, Homo sapiens
gcacagtggctcacgcctgtaatcccagcactttgggaggccaaggtggacagatcacctgaggtcaggagtttgagaccagcctggccaatatagtgaaacctcgcctctactaaaaatacaaaaataagccaggcatggtggcacacacctgtaatcccagctactcgggaggctgaggcaagagaattgcttgaacctggaaagtggaggttgcagtgagccaagatcacactactgcactccagcctaggtggcagagtgagaccccatctcaaaacaaaacaaaaaccagatgcaatttctttcatattctctcctacctctgtccctccaccagtattagcattattctgtacacagcacacatgcattttcttcttagatttctttccatggcaatacaataaatctgcttcagtcttttttaacctgctgaatattttcctggccccatggg

SEQ ID NO: 152410 - DNA, 841 bp, Homo sapiens
agttttgctcttgttgcccaggctggagtgcaatggcgcaatctcggctcactgcaacttccgcctcccgggttcaagcgactctcctgcttcagcctcccaaagtgctgggattacatgtgtgagccaccgagcccagccaacctttatcatttttaaaaaggtcccttagagccttaggctccactttcttcctcagctgccacatccaaaccatgggtaagcgatgcttgatctgcctccaagttcaagcagtccaggaaacagcccacttatgttcactgtccagtccccattcttggtccaggccaccatggatggctcctggactgtagcaacagcttccatgtgtgtctgccttgactgagtccctggcgtcctcaggcttcctgccacactgcagttggaggcttcttctaaaatccagtgctttctgggcaatttaaaacctgtgactttccaagtaggatctagtccccatgtccttaacaagaagaggtaacgtatttccctatgccactgcccacttatttttttattgttgagatgggatcgtgctttgtcacctaggctgggtggagtggtgtgatcacagctcactgctgccctgaattcctgggctgaagggatcctcttgcttcagcctcctgagtagctgggactacaggcaagagccaccacttatttttgaattttttgtggaaacaaggtctccctatgttgcccaggctggtcttgaactcctgggctcagcgatcctcccacctcaggcccctgtgctgggattatagcctcctgtgctgggattacaggcctaagccactgcaccaggcttttattt

SEQ ID NO: 152411 - DNA, 301 bp, Homo sapiens
aattgacacaattttatctatcatggtgaaaacaaaagtaatcagatatgaactactttatatgcctaccaaaaatgcatcaacctatgaccatccttattcatgatcttccattccttctttttacagtgtaagaaccatcctagatataattttagctcaattccttctctgctgccatacagcacagcctccttcaattatccccattatcaatattttaattcctctttactgagttattctcatatggaatacaacatacggtaaaatttcctatatgaacaatgtcctttcatac

SEQ ID NO: 152412 - DNA, 139 bp, Homo sapiens
ctgaatacaataaaaagcagagcggggcagctcttccctcacacacagggaggaggcatggacccacaggaccaccagcacctccggggccacgcgccctcgccagccacacccgggacaaattgggacatcactgaag

SEQ ID NO: 152413 - DNA, 286 bp, Homo sapiens
agtgggcccgggggacggcgcttagcatacggaggacccggcactggtctctgagttccctcagtatttactgatcactatctctactatctcggtgagggggatgtggcaggactataggataatggtggggagagggtcagcaggaaaacatgtgagcaaaggtctctgtgtcgtaaataagtttaaggaaaggttctatgcctcgatgtgcacataggccagatttatgtttgactttacacaaacatctcagtgcagtaaagagcagtattgcctccagcat

SEQ ID NO: 152414 - DNA, 326 bp, Homo sapiens
caaattgagttataatattttgcatgtttcttacctactaatccctctgtagttttttaatattttaactttcattttagtttagtttcagaggtatatgttcaggtttggtatataggtaaacttatgactcaggggtttgatgtacagattattttgtcacctggatactaagcatagtatccaaatttatttttctaaacctcttcctccttccaccctcctccctcaagtaggccccagtgtttgttgttcccctctttctgtccatgtgttctcattatttagctcccatttataagtgagaacatgcagtatttggtttt

SEQ ID NO: 152415 - DNA, 209 bp, Homo sapiens
cagggagagaggggaaggacccagggggcagcagcccaagcagggaaaacccataagctacgtaggtcaaaaacaaaccacccgagaccaaacaggaaggtaaggagacctgcagagattagaatacctgttactgccctacctgggggcttgagtccaaagcgcaaagacaatttcacaggtgacttcctctttcccctcctccccag

SEQ ID NO: 152416 - DNA, 173 bp, Homo sapiens
ccaaatacagatgctagctctgaagtgtgtgctcctaaccatcacattaggccacctctcttgaagccattactctttacaaagaagtattctagggattatatagagcatctccatctaaaaaagtttttgttcaagtgttacatgtataaagctacacaagatacaggtgt

SEQ ID NO: 152417 - DNA, 188 bp, Homo sapiens
tgagccactgtgttgagcctggaacctgaattttaataaggcttccctctcatgatccttacgcatatgatcccaggacaagatgttgaagaacagaccttgggataacatgcagtctcattaatttactgtaattctcacaatttggcatcagccttcttttctgtgctcattttctacattttttt

SEQ ID NO: 152418 - DNA, 324 bp, Homo sapiens
atgaggactagatttccagcagttcattcccaccctttccaccactcagttctgcatttgcaaatgtccacatgtatttctagaaagatccacatggtcctcacctgccctctgcagaaggagaggaaacttaaagaacccaggacagggaacatgcttctgctccaaagccaccagctcttgcctgtccccttcactctttctagatcattccttgcactctgctctatctttagaggtcactggttcaagtaagtcatcatgaaacacctgcaaaaaaactgccccacctggtgcctctagtgcctgatgactgaactgacc

SEQ ID NO: 152419 - DNA, 382 bp, Homo sapiens
tatgtggtggccacgcctccatggaatcatgtacaaacaggccaatcaagccccacattgactcagtctggaccttcgagaaggtggctgatgccatgaaacagatgcaggagcagacggtccaggtatgacggcataactggacctatctaacttcatttctcattcattaaataacccctagttgaaaaatgaatactctaccatgaccattctaatttccttccaatagctctttatggaagcattttccaaaaatcctctactccactgttcctcacagccacattagctcttcacattagctcagccaatgagcaacaataacaaagatcaaagctgaatagcatcagagcatcaaacagttttcatgaaaataaag

SEQ ID NO: 152420 - DNA, 140 bp, Homo sapiens
ccttccttctgattgattaactgattgattttgagacactttctttctgttgcctaagctggagtatagtggcacgatcatggaccactgcagcttcaacctcccacctcaaccccctgaagtagctggggctacaggtg

SEQ ID NO: 152421 - DNA, 321 bp, Homo sapiens
actggaaaactctaccaagcatttaaggaagaaatggtagcagttctctacaaattcttttagaaaataagcagagggaatacttcctaattaattcaaagtattaccctaataccaaaaccagacaaagatactacaaataaaggaaaactgcagaccagtatatatcatgaatataaatgcaaaaatccttgacaaaatattagcaaatcaaatctaacaatgtacaaaaagaattacacaccatgatcaagtgggatttactccaggaatgcaaggctggctcaacaacttaaagtcaataaatgtaatccatcataa

SEQ ID NO: 152422 - DNA, 263 bp, Homo sapiens
ctacccgtattttggggtttgtgtggtgtgatgagtagagattaaataatggaactaacttggttatagatagttctggggactaggagattaaagacaataacagatgtggggaaaaattacttttgtagaaatattcaagagaaattatttcagagaaataaatgtatgtttcatgtttagttcaatgttattttcaaaggattatgtacaagagaacccccactgtattttttccggagtgatgatgttcctgataattt

SEQ ID NO: 152423 - DNA, 220 bp, Homo sapiens
cataggctatttcaccattgtgtgagcctgctgcttctgaaagatgcaaagagtacatgttaagatcaaagaagcccttggttaccagccagttgcctcacttttgttgggaagtgattttattcatcagtggcactaagtggaatatcacactggcacacagggggcttgtacatgacaggtggaatagcctacagttgaggggcttggaggtgctcct

SEQ ID NO: 152424 - DNA, 316 bp, Homo sapiens
tgctgggattacaggcgtgagccaccgtgcccagcccattgtcactttttactgagcacctgctatctaccagggagtgtcaaatgcgtaaaaatgctatcagtatgccttccaacaactctatagagtgggcattatcacccatattaacagggaaggaaaatgagggttttttccttttttgtttgtttgtttggttttggttttggttactgagacagggtcatactctgtctcccaggctggagtacagtggcacccctcatagctcactgcagcctcaacctcccaggctcaagtaatccccccaagtagc

SEQ ID NO: 152425 - DNA, 163 bp, Homo sapiens
agcctttaatgatctagggcagccattctctctgaaggctgagggagcctggaggggcaggagaggcaaggcaggtccctgtggtcagagagcgccttctggatacagccacggtttgctttcattatgcaaggcacagaggaatgtgatgctagacacagca

SEQ ID NO: 152426 - DNA, 583 bp, Homo sapiens
  misc_feature (395)..(395): n is a, c, g, or t
  misc_feature (424)..(424): n is a, c, g, or t
  misc_feature (508)..(508): n is a, c, g, or t
  misc_feature (522)..(522): n is a, c, g, or t
caaacaggaatcctgcagctgaagaatttaatgtataaaatataaggtacaatagagagcatcaatagcaaacttactcaagcaaagaaagataaagagttgtttggaattaccagtgagagaagaataaataagaatgacaaggagtgaagaaagcctaccagacttattagataacatcaagggaaaaaaatttcatatttttagagttccagaaggcaaagagatgacaaaaggcatagaaaatatatttaacaggtcgggtgcggtggctcacacctgcaatcctagcactctgggattacaggcgcgagccagtgtgcccggccaggacattattttacacagaggcaaaactccaagtagtacaaacttagctcaatttggacaaattngtaagatcagataaatatgtccagagatntggagggcataccccctcctttcattacaaatctcagattttagtcccttttatttaaaccagattagcaaaactgagaaagtnatcagaacgcgggnggtatcctgagaaccagcaacaccattcatgcgttggatatgcgcatcaggtttcttcccc

SEQ ID NO: 152427 - DNA, 503 bp, Homo sapiens
tccagggccaggagtcttgtgtgtgggggccttcattctcccagagacttagaccctgcacgctgttggccccatatctgggttcccagaggaggagtgagttggccgaagtcacacagtcaggagggatctgggatctgaatccaggcgtgcttggccccatggcctgtgtgcatcccttcagccagggtttaccagacacagggtccttacctctgccttcagccgagccactagggacccgtttgcaccgtcccgggttgcgggtgtcctgggctttgctgccacccacaacctctactcaatgaacgactgtgcccagaagatcctgcctgtgctctgcggtctcactgtagatcctgagaaatccgtgcgagaccaggccttcaaggccattcggagcttcctgtccaaattggagtctgtgtcggaggacccgacccagctggaggaagtggagaaggatgtccatgcagcctccagccctggcatgggaggagccg

SEQ ID NO: 152428 - DNA, 736 bp, Homo sapiens
actttaaagggtgagggaaaattgaaatagaagttgggcaaatatagatttgccctttacccagcaataacgtacgtaaagtgggagtgaatagtcttgagtgagtctctcctattcagagagtgagctgggcagagaaaagttggttgaagaagaacagggtggtagtctagggggactgaagatggaggtccaagaaaaaagtgtgtagcgatgagtttaaatcatttttgtgtgatcccaatgtaattttatgaattgcaggggaaaacaatgaattaattttaaggtcaatatgttttagttcaagatattgaaaaagctttctaattactttttatttcatagttttttttctaatagaagcattctattacaaaaaggaaggtggtaatcttttttcaccttttaggacagcctcctaatgtttgtgatgtatttaaatcttttgtgtattttcaatctatgttaagtccccttgttacatattccagttatacttattccagttgtaatttactttgtaattatttattgtctatctctcttcccagaatgtaagttctgtgagggtcaggggtctctttccgcttctccactgtatccccagtgcctggcttagtgccttctatatagtagattgccaatgtttgtttgttgattgaatgaatgaatcttaggattggtactttaaaaaatgctaagaatacaattaaataaatcaagaagtttaagt

SEQ ID NO: 152429 - DNA, 269 bp, Homo sapiens
gagccaccgcacccggccgtgagtctcctatattatattttaactgtgttaaagtttcaaacacaatatatatgtggacaagtcatgtttttcttactaattgattgaaactaaattatacagcaaacctttcttttaaatgagcaaaagaaagaaaattatctttatattctataaataacattaaagattgttttggattttattatatatcttttaaaaatagagacagggtctcactatattgaccagtctggtctcaaactcct

SEQ ID NO: 152430 - DNA, 313 bp, Homo sapiens
gagaaaacacagaaaaagaggagaatagaacaagcagccagcaatccttgctgcatccaagttcacaaaaagtaacctaaagataactgatactcctgcgggcagctgggttaagaccgtggagaattgtagtaataaagatgattttggatcagacccaagttcatatggggcttaaagagaaatattcaccggagatactaccagaagcctggggacacctgaggaaagaacaggagtggacagttacttccagtcataaatccttgagtgtttccaggctaaggaaaaagaccgcctgcctgcctgcctg

SEQ ID NO: 152431 - DNA, 434 bp, Homo sapiens
aacacatcttaatccttccctacctcatatcctctgggccttatgcccataggggaaatatatagaaatattcttttacgaatacactgggttttttttttctattttagatacattctttatattgtactgaaattgattatagtcagcctactactaacataaacacgtgagaatgtaaaacataaatcaaaaggaaaagtcagaaaagacaggaagacagaactttaccagaaatccatgttaagagggtgacagtatttgagcattaaatttagctatgacctttctggagggcaaagttctcatgactttctgtttttcaaagtatttatcccttggcagtataatcatttgttactgtagtatctttactcagggagggtgcaaggatggttcatttctgaatcttcccccagcaatccccacatttt

SEQ ID NO: 152432 - DNA, 260 bp, Homo sapiens
aaatggatgtgggtgtagaggaaggggtgcaataggcatggggctggcaggcctgcacggccgtcatattccctgggcacattacctcatctgcatgcctgagtgtcatagccctgggtcgggactgaaggtcggtgcatgctgagccaaacagtaatctcctggggtgggtatgagcatccagggataaactgggaaggagtggaaggtactcagagggcatcggaagatgtctgggacctgaccttgttccctgacct

SEQ ID NO: 152433 - DNA, 133 bp, Homo sapiens
tgctggaattatagggttaagccactgcacctggccaggagattatattttaagatatattaaggcatctagcatggtgtctggtttttcttctttgggtatcattacctaaaagtttcctgacctctcttta

SEQ ID NO: 152434 - DNA, 125 bp, Homo sapiens
tgtaaggacaatggcaggggcaacacagagctcccaggtctggctgcccctctctcagtgctctgactgggattccaaagcaggacgctgctcactctcacagcaaacatcaccaagtgtgggtt

SEQ ID NO: 152435 - DNA, 120 bp, Homo sapiens
gcccatgagagatcctccagtccctcctccccagctcctgaaagatccggccttaggttctaggtactgagatcctacaagtctgtgcagaggagagtcccggtaccgactcacaatgaa

SEQ ID NO: 152436 - DNA, 532 bp, Homo sapiens
ctgcaactaccatgtgacccagcagttgcactcctgggcatttatcccagggaaatgaagacttgtatatcccagggaaatgaacaaatcaaatatttgttcatagcagctatatttgtaagattcccaacctggaaaaaacccagatgtctttcaacaggtgaatggttaaacggtggcacattcttaccctggaatacgatttagcaataaaaggaaggagttgttgatatatgcaacaccttgggtgaatctcaaaagaattatactgagtgggaagggccaacccccaaaggctgcatactgtatgattctatatataacattcttgaaataacactatataaatggagaacagattagtgtttgtcaggagttagggatgggagacaagaagtcagggattaggaattgggggtttggggtagctgtggttataaaaggacaatagaagggatcattgtggtgatggaactgctctgtatctttgccatggtggcagatacattaatctatacaggcagtgcaatta

SEQ ID NO: 152437 - DNA, 292 bp, Homo sapiens
actgtgccactgtactccagctaatgatgaaggttcaaattatataagctatttaattacctaactcaatagttacacttatttcattaaaacaaacaaaatcacttcaataaatggtgatgtttcaagcgctcttttcacttaaagagtcaaaagagattgactcataatttcttaggcaactagttttatggtggcaaagtagtgagtataacaataattctaccagcagacagacaccctgggccaccttccctggttgcagatcccataaatgtatgactagttctga

SEQ ID NO: 152438 - DNA, 3080 bp, Homo sapiens
  misc_feature (12)..(12): n is a, c, g, or t
gctgcaaaggtngatcccgccgggtccccgagcgtcccgcgccctcgccccgccatgctcctgctgctggggctgtgcctggggctgtccctgtgtgtggggtcgcaggaagaggcgcagagctggggccactcttcggagcaggatggactcagggtcccgaggcaagtcagactgttgcagaggctgaaaaccaaacctttgatgacagaattctcagtgaagtctaccatcatttcccgttatgccttcactacggtttcctgcagaatgctgaacagagcttctgaagaccaggacattgagttccagatgcagattccagctgcagctttcatcaccaacttcactatgcttattggagacaaggtgtatcagggcgaaattacagagagagaaaagaagagtggtgatagggtaaaagagaaaaggaataaaaccacagaagaaaatggagagaaggggactgaaatattcagagcttctgcagtgattcccagcaaggacaaagccgcctttttcctgagttatgaggagcttctgcagaggcgcctgggcaagtacgagcacagcatcagcgtgcggccccagcagctgtccgggaggctgagcgtggacgtgaatatcctggagagcgcgggcatcgcatccctggaggtgctgccgcttcacaacagcaggcagaggggcagtgggcgcggggaagatgattctgggcctcccccatctactgtcattaaccaaaatgaaacatttgccaacataatttttaaacctactgtagtacaacaagccaggattgcccagaatggaattttgggagactttatcattagatatgacgtcaatagagaacagagcattggggacatccaggttctaaatggctattttgtgcactactttgctcctaaagaccttcctcctttacccaagaatgtggtattcgtgcttgacagcagtgcttctatggtgggaaccaaactccggcagaccaaggatgccctcttcacaattctccatgacctccgaccccaggaccgtttcagtatcattggattttccaaccggatcaaagtatggaaggaccacttgatatcagtcactccagacagcatcagggatgggaaagtgtacattcaccatatgtcacccactggaggcacagacatcaacggggccctgcagagggccatcaggctcctcaacaagtacgtggcccacagtggcattggagaccggagcgtgtccctcatcgtcttcctgacggatgggaagcccacggtcggggagacgcacaccctcaagatcctcaacaacacccgagaggccgcccgaggccaagtctgcatcttcaccattggcatcggcaacgacgtggacttcaggctgctggagaaactgtcgctggagaactgtggcctcacacggcgcgtgcacgaggaggaggacgcaggctcgcagctcatcgggttctacgatgaaatcaggaccccgctcctctctgacatccgcatcgattatccccccagctcagtggtgcaggccaccaagaccctgttccccaactacttcaacggctcggagatcatcattgcggggaagctggtggacaggaagctggatcacctgcacgtggaggtcaccgccagcaacagtaagaaattcatcatcctgaagacagatgtgcctgtgcggcctcagaaggcagggaaagatgtcacaggaagccccaggcctggaggcgatggagagggggacaccaaccacatcgagcgtctctggagctacctcaccacaaaggagctgctgagctcctggctgcaaagtgacgatgaaccggagaaggagcggctgcggcagcgggcccaggccctggctgtgagctaccgcttcctcactcccttcacctccatgaagctgagggggccggtcccacgcatggatggcctggaggaggcccacggcatgtcggctgccatgggacccgaaccggtggtgcagagcgtgcgaggagctggcacgcagccaggacctttgctcaagaagccataccagccaagaattaaaatctctaaaacatcagttcgtggcttcagaagggaagaacagattttttcaaatgtcatgaaatttccttttgccagcatcctggaactataataaaaattcagaggaaagaacaacctatgactgggttttgttctgctgtgtccagatcatcctctggaagtcttgattgttgcctttctgctgctgtgctgtacgtgcaagttcctaaagccagggacatcccggagatgagctgtggatatagagtccgcacagcctgcgggagacagaatgtaattccttccaacacacacacacaggctttatggaatgccagaaaagcttcctcttggatgctgcctggagtaatgactttttgaccctcccctcttttttggagcaagcactatctttccttgtaaagaaatttggacaatttgagtagaaatggtgtggtatgtgcacatagaaactctcagaaaactgtcagatgagctagacagttgtcctctatctccatgggtcccgcatcccaaggatcgaaccaacaacagatcaaaaatacgtgaaaaaggaattgcatctgtattgaatgtgtacggactttttttcttgtctttgttccttaaacaatgtagtgtaacaactatttacatcgcatctcctttgcattcattattataagtaaactagagatgatttaaagtgtatagaaaggctgcgtgcagtggctaatgtctgtaatcccagcactttgagaggccgaggcaggtggatcacctgaggtcaggagttcgagaccagcctggccaacgtggtgaaaccccatctctactaaaaatacaataattagctgggcatggtggtgcacgcctgtaatcccagctattcgggaggctgaggcaggagaatcgcttgaacccaggaggcagagattgcagtgaaccgagattgcaccattgcactccagcctgggtgacagagtgaacctccgtctcaaaaacaaaataaataaataagaataaatt

SEQ ID NO: 152439 - DNA, 5689 bp, Homo sapiens
agagatattcatagtgcgcccgttgtaattcaggcggggcagtgttcatttgagttaggttctgcgtatatcaattaaccgaggcttccccagccatgcggaactatgattctgggcctcccccatctactgtcattaaccaaaatgaaacatttgccaacataatttttaaacctactgtagtacaacaagccaggattgcccagaatggaattttgggagactttatcattagatatgacgtcaatagagaacagagcattggggacatccaggttctaaatggctattttgtgcactactttgctcctaaagaccttcctcctttacccaagaatgtggtattcgtgcttgacagcagtgcttctatggtgggaaccaaactccggcagaccaaggatgccctcttcacaattctccatgacctccgaccccaggaccgtttcagtatcattggattttccaaccggatcaaagtatggaaggaccacttgatatcagtcactccagacagcatcagggatgggaaagtgtacattcaccatatgtcacccactggaggcacagacatcaacggggccctgcagagggccatcaggctcctcaacaagtacgtggcccacagtggcattggagaccggagcgtgtccctcatcgtcttcctgacggatgggaagcccacggtcggggagacgcacaccctcaagatcctcaacaacacccgagaggccgcccgaggccaagtctgcatcttcaccattggcatcggcaacgacgtggacttcaggctgctggagaaactgtcgctggagaactgtggcctcacacggcgcgtgcacgaggaggaggacgcaggctcgcagctcatcgggttctacgatgaaatcaggaccccgctcctctctgacatccgcatcgattatccccccagctcagtggtgcaggccaccaagaccctgttccccaactacttcaacggctcggagatcatcattgcggggaagctggtggacaggaagctggatcacctgcacgtggaggtcaccgccagcaacagtaagaaattcatcatcctgaagacagatgtgcctgtgcggcctcagaaggcagggaaagatgtcacaggaagccccaggcctggaggcgatggagagggggacaccaaccacatcgagcgtctctggagctacctcaccacaaaggagctgctgagctcctggctgcaaagtgacgatgaaccggagaaggagcggctgcggcagcgggcccaggccctggctgtgagctaccgcttcctcactcccttcacctccatgaagctgagggggccggtcccacgcatggatggcctggaggaggcccacggcatgtcggctgccatgggacccgaaccggtggtgcagagcgtgcgaggagctggcacgcagccaggacctttgctcaagaagccataccagccaagaattaaaatctctaaaacatcagtggatggtgatccccactttgttgtggatttccccctgagcagactcaccgtgtgcttcaacattgatgggcagcccggggacatcctcaggctggtctctgatcacagggactctggtgtcacagtgaacggagagttaattggggcacccgcccctccaaatggccacaagaaacagcgcacttacttgcgcactatcaccatcctcatcaacaagccagagagatcttatctcgagatcacaccgagcagagtcatcttggatggtggggacagactggtgctcccctgcaaccagagtgtggtggtggggagctgggggctggaggtgtccgtgtctgccaacgccaatgtcaccgtcaccatccagggctccatagcctttgtcatcctcatccacctctacaaaaagccggcgcccttccagcgacaccacctgggtttctacattgccaacagcgagggcctttccagcaactgccacggactgctgggtcagttcctgaatcaggatgccagactcacagaagaccctgcagggcccagccagaacctcactcaccctctgctccttcaggtgggagaggggcctgaggccgtcctaacagtgaaaggccaccaagtcccagtggtctggaagcaaaggaagatttacaacggggaagagcagatagactgctggtttgccaggaacaatgccgccaaactgattgacggggagtacaaggattacctggcatcccatccatttgacacagggatgacacttggccagggaatgtccagggagctctgaagctggcagccttaaagatgcaagtgcatgaaggacagtgatgtggggaggccgtggggcagctcttttcatggcttgtacacgcctcagctcctggcaattagctggactccatgacccacccctggtgcagcatagatccgacgtctgtctgggcgaagggtaggggtgggtaggggcgggaagcctgagtgcaaatgtcatttccctctactgcctcttcctgcctctccccaccctgcccacatccacagaggggagagaagggtcatagctaaatgcaacaaagtctgtatcttgtcccaacctgcttttctgttctgttagcatatcataaagtaagcctttctggtgaaggaaggttgctatgaaactttttttcttggtggaaatggccaagtttaggcactctgctttttgccttacactaatgcttagaaagctgtcttttcagtggtgttgcagcccccagatgtgtggccaacctctgctgcaaaggaatctcttgctgagtccaggccaccaatcaggcaaatagcccatacatttgatcgttgtaaaccatgaagtcttttcttgcaagacgtttttcttctgctgtggtatcttgcccttaaaaattagttttcattaaaaagaaatttgattgaaaataaaaacatctacagctcagatactgatctctttctaatgggctttgtaaaccacttgactttgctaatggctattctccaatttgttccaataagctaagggcttttcatacacaggacaactccatgtggttgattttactggcatgtcttggtgacgaagagttggccaagtgaatgatgcatcttttacttggagctctccagcctttgtcatagttcccagaccttttttccttgtggtcatccaggaggtgatcaattacatgtgcacagtgctaggacgggaggcagagccggctcagagcaggtccaccagcccacctatagcaggaagcgtgtcggtgcttaggaaatctaggacttccagcttccctcatgtcagatagaaaaaaagtcaggaaaccagctcgtggacaggggctttggttccaaaacttggacaaacctgatgccttaaggaaaaggttaagatgagagggggcttccagagtcaatgaacgtcacccttcagccgacggataccgggagcgcttgggcaaaacagcagagaaagaaagactgtggtcggggaagtggaatgcttcgatgcaggccagagttcaaggctctggggctggcctcacaagaggcttcttccacggggcttgacaccagagcagcccccgcgtgaaatgagaaggcacgcttagcactgggaggaaaagctgagttaagaaaattctttatcatgtttgccttccctggggaaacattcaggcagtaaaatgacatccacgtgttcctgtcggacgcagcggcttcgggaacaagttagcgctgggggactatctgggctcgtctctctctgcttcgtgaacccaccacaccagggcctgtctgctgtgctatttatttgccttccgtcttcccaacctcagctgcctgtattcatgccagaggtgcaaaggctgccagccagtgctgctgacagatgctttcagactgtagagctcagagaaagggagcggcagctagaggtagccagggagctggccaggctccccggggccttcctattatgtaaatcccagctggacagacagccctggagccaggtggccctgtcccctgtggagcacttggagcagtgatctgttgttccaggtgtaagtctcgacactgcagaaatgaggacgttattaggaaagaccagttcctactgcctgtgctgctactttaagagctgagaaaaacattccaatgagatatccatagctaacttgcttgctcagaaaaacataagtaacaaagttgagctttcatttttaaaaattatattttactttagaaaaatatcaccttttttcttcctcttccttacgtgtagatctttttttttttttcaaatggggtcagtacctgaaagcccgaaaccccataccaagcttatagttaggacctttgcatttgataaaaaaaaatatagtattttctgttgtccagaaaatcttcccagatagggaaactgaggcagagagtgccgtggagtggtttttgccaagtcatacaacatacttaatgcagggctacactgaacctccagaatcattttgtttgctttgaccctgtttcaccatctgggcaatcatttattttccttgagcatttataaaccagggcgagggttgttccaaaatgagtaattgaatgagatgaagaaatatgtcataattagaggagataaatctccttgttatcacaatagttaatgtgtcatgatcactgactaactgggaccttgaacaagtcagcatctctgcctttcaaaatgaaggaacattgttctctatcctcccctgaccccccacggccccatgctaggtgcaccgtcttcctccatttgactttttaatgctttacaacttcaggctaaagggaggggatgttgggaggagaaaccatcacaagattccctcggtgccacagctgtgctgaggaggccggggactgggaatcggagtgggcacctctgtgtttctctagggagtaacattcaacatttaattgaatcgtgtatcctgataggtggattaggaacaggattcattcctttaactttaacttttggctaaacgacatgccttggattgagtgtatatgtcttccccaaattcatatgttgaagcttaaatcctgaatgtgatggttcttggaattgggacctttggaaggttattaggtcttgagggcagagccctcacgaatgggattaaggcccttataagaagagacatggggccaggtgcagtggctcacacctgtaatcccaacattttgggaggccgagaagggtggatcatgaggtcaggagatggagaccatcctggccaacatggtgaaacctcatctctactaaaaatacaaaaattagctgggcgtggtggtgcgtgcctgtagttccagctacttgggaggctgaggcaggagaatcgcttgaaccaggcagtcggaacttgtagtgagccaagatcacgccactgcactccagctggagtgacagagccaaactccgtcaaaaaaaaacaaaacaaaacaaaaaaaagacatgggagagatggtgtttttcctctccaccacctggggatacgatgagaagatggccacctgcaagccaggaagacggccctcaccagacaccatgtctgctggcaccttgatcttggacctcccagcctccagaactgtgagaaataaatgtgttttgtttaagct

SEQ ID NO: 152440 - DNA, 4063 bp, Homo sapiens
ggctattcgattggtcacccacgcgtcgcaagaaacagcgcacttacttgcgcactatcaccatcctcatcaacaagccagagagatcttatctcgagatcacaccgagcagagtcatcttggatggtggggacagactggtgctcccctgcaaccagagtgtggtggtggggagctgggggctggaggtgtccgtgtctgccaacgccaatgtcaccgtcaccatccagggctccatagcctttgtcatcctcatccacctctacaaaaagccggcgcccttccagcgacaccacctgggtttctacattgccaacagcgagggcctttccagcaactgccacggactgctgggtcagttcctgaatcaggatgccagactcacagaagaccctgcagggcccagccagaacctcactcaccctctgctccttcaggtgggagaggggcctgaggccgtcctaacagtgaaaggccaccaagtcccagtggtctggaagcaaaggaagatttacaacggggaagagcagatagactgctggtttgccaggaacaatgccgccaaactgattgacggggagtacaaggattacctggcatcccatccatttgacacagggatgacacttggccagggaatgtccagggagctctgaagctggcagccttaaagatgcaagtgcatgaaggacagtgatgtggggaggccgtggggcagctcttttcatggcttgtacacgcctcagctcctggcaattagctggactccatgacccacccctggtgcagcatagatccgacgtctgtctgggcgaagggtaggggtgggtaggggcgggaagcctgagtgcaaatgtcatttccctctactgcctcttcctgcctctccccaccctgcccacatccacagaggggagagaagggtcatagctaaatgcaacaaagtctgtatcttgtcccaacctgcttttctgttctgttagcatatcataaagtaagcctttctggtgaaggaaggttgctatgaaactttttttcttggtggaaatggccaagtttaggcactctgctttttgccttacactaatgcttagaaagctgtcttttcagtggtgttgcagcccccagatgtgtggccaacctctgctgcaaaggaatctcttgctgagtccaggccaccaatcaggcaaatagcccatacatttgatcgttgtaaaccatgaagtcttttcttgcaagacgtttttcttctgctgtggtatcttgcccttaaaaattagttttcattaaaaagaaatttgattgaaaataaaaacatctacagctcagatactgatctctttctaatgggctttgtaaaccacttgactttgctaatggctattctccaatttgttccaataagctaagggcttttcatacacaggacaactccatgtggttgattttactggcatgtcttggtgacgaagagttggccaagtgaatgatgcatcttttacttggagctctccagcctttgtcatagttcccagaccttttttccttgtggtcatccaggaggtgatcaattacatgtgcacagtgctaggacgggaggcagagccggctcagagcaggtccaccagcccacctatagcaggaagcgtgtcggtgcttaggaaatctaggacttccagcttccctcatgtcagatagaaaaaaagtcaggaaaccagctcgtggacaggggctttggttccaaaacttggacaaacctgatgccttaaggaaaaggttaagatgagagggggcttccagagtcaatgaacgtcacccttcagccgacggataccgggagcgcttgggcaaaacagcagagaaagaaagactgtggtcggggaagtggaatgcttcgatgcaggccagagttcaaggctctggggctggcctcacaagaggcttcttccacggggcttgacaccagagcagcccccgcgtgaaatgagaaggcacgcttagcactgggaggaaaagctgagttaagaaaattctttatcatgtttgccttccctggggaaacattcaggcagtaaaatgacatccacgtgttcctgtcggacgcagcggcttcgggaacaagttagcgctgggggactatctgggctcgtctctctctgcttcgtgaacccaccacaccagggcctgtctgctgtgctatttatttgccttccgtcttcccaacctcagctgcctgtattcatgccagaggtgcaaaggctgccagccagtgctgctgacagatgctttcagactgtagagctcagagaaagggagcggcagctagaggtagccagggagctggccaggctccccggggccttcctattatgtaaatcccagctggacagacagccctggagccaggtggccctgtcccctgtggagcacttggagcagtgatctgttgttccaggtgtaagtctcgacactgcagaaatgaggacgttattaggaaagaccagttcctactgcctgtgctgctactttaagagctgagaaaaacattccaatgagatatccatagctaacttgcttgctcagaaaaacataagtaacaaagttgagctttcatttttaaaaattatattttactttagaaaaatatcaccttttttcttcctcttccttacgtgtagatctttttttttttttcaaatggggtcagtacctgaaagcccgaaaccccataccaagcttatagttaggacctttgcatttgataaaaaaaaatatagtattttctgttgtccagaaaatcttcccagatagggaaactgaggcagagagtgccgtggagtggtttttgccaagtcatacaacatacttaatgcagggctacactgaacctccagaatcattttgtttgctttgaccctgtttcaccatctgggcaatcatttattttccttgagcatttataaaccagggcgagggttgttccaaaatgagtaattgaatgagatgaagaaatatgtcataattagaggagataaatctccttgttatcacaatagttaatgtgtcatgatcactgactaactgggaccttgaacaagtcagcatctctgcctttcaaaatgaaggaacattgttctctatcctcccctgaccccccacggccccatgctaggtgcaccgtcttcctccatttgactttttaatgctttacaacttcaggctaaagggaggggatgttgggaggagaaaccatcacaagattccctcggtgccacagctgtgctgaggaggccggggactgggaatcggagtgggcacctctgtgtttctctagggagtaacattcaacatttaattgaatcgtgtatcctgataggtggattaggaacaggattcattcctttaactttaacttttggctaaacgacatgccttggattgagtgtatatgtcttccccaaattcatatgttgaagcttaaatcctgaatgtgatggttcttggaattgggacctttggaaggttattaggtcttgagggcagagccctcacgaatgggattaaggcccttataagaagagacatggggccaggtgcagtggctcacacctgtaatcccaacattttgggaggccgagaagggtggatcatgaggtcaggagatggagaccatcctggccaacatggtgaaacctcatctctactaaaaatacaaaaattagctgggcgtggtggtgcgtgcctgtagttccagctacttgggaggctgaggcaggagaatcgcttgaaccaggcagtcggaacttgtagtgagccaagatcacgccactgcactccagctggagtgacagagccaaactccgtcaaaaaaaaacaaaacaaaacaaaaaaaagacatgggagagatggtgtttttcctctccaccacctggggatacgatgagaagatggccacctgcaagccaggaagacggccctcaccagacaccatgtctgctggcaccttgatcttggacctcccagcctccagaactgtgagaaataaatgtgttttgtttaagct

SEQ ID NO: 152441 - DNA, 4931 bp, Homo sapiens
  misc_feature (12)..(12): n is a, c, g, or t
gctgcaaaggtngatcccgccgggtccccgagcgtcccgcgccctcgccccgccatgctcctgctgctggggctgtgcctggggctgtccctgtgtgtggggtcgcaggaagaggcgcagagctggggccactcttcggagcaggatggactcagggtcccgaggcaagtcagactgttgcagaggctgaaaaccaaacctttgatgacagaattctcagtgaagtctaccatcatttcccgttatgccttcactacggtttcctgcagaatgctgaacagagcttctgaagaccaggacattgagttccagatgcagattccagctgcagctttcatcaccaacttcactatgcttattggagacaaggtgtatcagggcgaaattacagagagagaaaagaagagtggtgatagggtaaaagagaaaaggaataaaaccacagaagaaaatggagagaaggggactgaaatattcagagcttctgcagtgattcccagcaaggacaaagccgcctttttcctgagttatgaggagcttctgcagaggcgcctgggcaagtacgagcacagcatcagcgtgcggccccagcagctgtccgggaggctgagcgtggacgtgaatatcctggagagcgcgggcatcgcatccctggaggtgctgccgcttcacaacagcaggcagaggggcagtgggcgcggggaagatgattctgggcctcccccatctactgtcattaaccaaaatgaaacatttgccaacataatttttaaacctactgtagtacaacaagccaggattgcccagaatggaattttgggagactttatcattagatatgacgtcaatagagaacagagcattggggacatccaggttctaaatggctattttgtgcactactttgctcctaaagaccttcctcctttacccaagaatgtggtattcgtgcttgacagcagtgcttctatggtgggaaccaaactccggcagaccaaggatgccctcttcacaattctccatgacctccgaccccaggaccgtttcagtatcattggattttccaaccggatcaaagtatggaaggaccacttgatatcagtcactccagacagcatcagggatgggaaagtgtacattcaccatatgtcacccactggaggcacagacatcaacggggccctgcagagggccatcaggctcctcaacaagtacgtggcccacagtggcattggagaccggagcgtgtccctcatcgtcttcctgacggatgggaagcccacggtcggggagacgcacaccctcaagatcctcaacaacacccgagaggccgcccgaggccaagtctgcatcttcaccattggcatcggcaacgacgtggacttcaggctgctggagaaactgtcgctggagaactgtggcctcacacggcgcgtgcacgaggaggaggacgcaggctcgcagctcatcgggttctacgatgaaatcaggaccccgctcctctctgacatccgcatcgattatccccccagctcagtggtgcaggccaccaagaccctgttccccaactacttcaacggctcggagatcatcattgcggggaagctggtggacaggaagctggatcacctgcacgtggaggtcaccgccagcaacagtaagaaattcatcatcctgaagacagatgtgcctgtgcggcctcagaaggcagggaaagatgtcacaggaagccccaggcctggaggcgatggagagggggacaccaaccacatcgagcgtctctggagctacctcaccacaaaggagctgctgagctcctggctgcaaagtgacgatgaaccggagaaggagcggctgcggcagcgggcccaggccctggctgtgagctaccgcttcctcactcccttcacctccatgaagctgagggggccggtcccacgcatggatggcctggaggaggcccacggcatgtcggctgccatgggacccgaaccggtggtgcagagcgtgcgaggagctggcacgcagccaggacctttgctcaagaagccataccagccaagaattaaaatctctaaaacatcagtggatggtgatccccactttgttgtggatttccccctgagcagactcaccgtgtgcttcaacattgatgggcagcccggggacatcctcaggctggtctctgatcacagggactctggtgtcacagtgaacggagagttaattggggcacccgcccctccaaatggccacaagaaacagcgcacttacttgcgcactatcaccatcctcatcaacaagccagagagatcttatctcgagatcacaccgagcagagtcatcttggatggtggggacagactggtgctcccctgcaaccagagtgtggtggtggggagctgggggctggaggtgtccgtgtctgccaacgccaatgtcaccgtcaccatccagggctccatagcctttgtcatcctcatccacctctacaaaaagccggcgcccttccagcgacaccacctgggtttctacattgccaacagcgagggcctttccagcaactgccacggactgctgggtcagttcctgaatcaggatgccagactcacagaagaccctgcagggcccagccagaacctcactcaccctctgctccttcaggtgggagaggggcctgaggccgtcctaacagtgaaaggccaccaagtcccagtggtctggaagcaaaggaagatttacaacggggaagagcagatagactgctggtttgccaggaacaatgccgccaaactgattgacggggagtacaaggattacctggcatcccatccatttgacacagggatgacacttggccagggaatgtccagggagctctgaagctggcagccttaaagatgcaagtgcatgaaggacagtgatgtggggaggccgtggggcagctcttttcatggcttgtacacgcctcagctcctggcaattagctggactccatgacccacccctggtgcagcatagatccgacgtctgtctgggcgaagggtaggggtgggtaggggcgggaagcctgagtgcaaatgtcatttccctctactgcctcttcctgcctctccccaccctgcccacatccacagaggggagagaagggtcatagctaaatgcaacaaagtctgtatcttgtcccaacctgcttttctgttctgttagcatatcataaagtaagcctttctggtgaaggaaggttgctatgaaactttttttcttggtggaaatggccaagtttaggcactctgctttttgccttacactaatgcttagaaagctgtcttttcagtggtgttgcagcccccagatgtgtggccaacctctgctgcaaaggaatctcttgctgagtccaggccaccaatcaggcaaatagcccatacatttgatcgttgtaaaccatgaagtcttttcttgcaagacgtttttcttctgctgtggtatcttgcccttaaaaattagttttcattaaaaagaaatttgattgaaaataaaaacatctacagctcagatactgatctctttctaatgggctttgtaaaccacttgactttgctaatggctattctccaatttgttccaataagctaagggcttttcatacacaggacaactccatgtggttgattttactggcatgtcttggtgacgaagagttggccaagtgaatgatgcatcttttacttggagctctccagcctttgtcatagttcccagaccttttttccttgtggtcatccaggaggtgatcaattacatgtgcacagtgctaggacgggaggcagagccggctcagagcaggtccaccagcccacctatagcaggaagcgtgtcggtgcttaggaaatctaggacttccagcttccctcatgtcagatagaaaaaaagtcaggaaaccagctcgtggacaggggctttggttccaaaacttggacaaacctgatgccttaaggaaaaggttaagatgagagggggcttccagagtcaatgaacgtcacccttcagccgacggataccgggagcgcttgggcaaaacagcagagaaagaaagactgtggtcggggaagtggaatgcttcgatgcaggccagagttcaaggctctggggctggcctcacaagaggcttcttccacggggcttgacaccagagcagcccccgcgtgaaatgagaaggcacgcttagcactgggaggaaaagctgagttaagaaaattctttatcatgtttgccttccctggggaaacattcaggcagtaaaatgacatccacgtgttcctgtcggacgcagcggcttcgggaacaagttagcgctgggggactatctgggctcgtctctctctgcttcgtgaacccaccacaccagggcctgtctgctgtgctatttatttgccttccgtcttcccaacctcagctgcctgtattcatgccagaggtgcaaaggctgccagccagtgctgctgacagatgctttcagactgtagagctcagagaaagggagcggcagctagaggtagccagggagctggccaggctccccggggccttcctattatgtaaatcccagctggacagacagccctggagccaggtggccctgtcccctgtggagcacttggagcagtgatctgttgttccaggtgtaagtctcgacatgcactccagctggagtgacagagccaaactccgtcaaaaaaaaacaaaacaaaacaaaaaaaagacatgggagagatggtgtttttcctctccaccacctggggatacgatgagaagatggccacctgcaagccaggaagacggccctcaccagacaccatgtctgctggcaccttgatcttggacctcccagcctccagaactgtgagaaataaatgtgttttgtttaagct

SEQ ID NO: 152442 - DNA, 2379 bp, Homo sapiens
  misc_feature (2144)..(2144): n is a, c, g, or t
  misc_feature (2175)..(2175): n is a, c, g, or t
  misc_feature (2187)..(2187): n is a, c, g, or t
  misc_feature (2194)..(2194): n is a, c, g, or t
  misc_feature (2227)..(2228): n is a, c, g, or t
  misc_feature (2231)..(2231): n is a, c, g, or t
  misc_feature (2233)..(2233): n is a, c, g, or t
tggccttcttagaacgtgttcgctttgcgtttgccttctgcgtgattgtaagtttcccgaggcttccccagccatgcggaactatgattctgggcctcccccatctactgtcattaaccaaaatgaaacatttgccaacataatttttaaacctactgtagtacaacaagccaggattgcccagaatggaattttgggagactttatcattagatatgacgtcaatagagaacagagcattggggacatccaggttctaaatggctattttgtgcactactttgctcctaaagaccttcctcctttacccaagaatgtggtattcgtgcttgacagcagtgcttctatggtgggaaccaaactccggcagaccaaggatgccctcttcacaattctccatgacctccgaccccaggaccgtttcagtatcattggattttccaaccggatcaaagtatggaaggaccacttgatatcagtcactccagacagcatcagggatgggaaagtgtacattcaccatatgtcacccactggaggcacagacatcaacggggccctgcagagggccatcaggctcctcaacaagtacgtggcccacagtggcattggagaccggagcgtgtccctcatcgtcttcctgacggatgggaagcccacggtcggggagacgcacaccctcaagatcctcaacaacacccgagaggccgcccgaggccaagtctgcatcttcaccattggcatcggcaacgacgtggacttcaggctgctggagaaactgtcgctggagaactgtggcctcacacggcgcgtgcacgaggaggaggacgcaggctcgcagctcatcgggttctacgatgaaatcaggaccccgctcctctctgacatccgcatcgattatccccccagctcagtggtgcaggccaccaagaccctgttccccaactacttcaacggctcggagatcatcattgcggggaagctggtggacaggaagctggatcacctgcacgtggaggtcaccgccagcaacagtaagaaattcatcatcctgaagacagatgtgcctgtgcggcctcagaaggcagggaaagatgtcacaggaagccccaggcctggaggcgatggagagggggacaccaaccacatcgagcgtctctggagctacctcaccacaaaggagctgctgagctcctggctgcaaagtgacgatgaaccggagaaggagcggctgcggcagcgggcccaggccctggctgtgagctaccgcttcctcactcccttcacctccatgaagctgagggggccggtcccacgcatggatggcctggaggaggcccacggcatgtcggctgccatgggacccgaaccggtggtgcagagcgtgcgaggagctggcacgcagccaggacctttgctcaagaagccataccagccaagaattaaaatctctaaaacatcagttcgtggcttcagaagggaagaacagattttttcaaatgtcatgaaatttccttttgccagcatcctggaactataataaaaattcagaggaaagaacaacctatgactgggttttgttctgctgtgtccagatcatcctctggaagtcttgattgttgcctttctgctgctgtgctgtacgtgcaagttcctaaagccagggacatcccggagatgagctgtggatatagagtccgcacagcctgcgggagacagaatgtaattccttccaacacacacacacaggctttatggaatgccagaaaagcttcctcttggatgctgcctggagtaatgactttttgaccctcccctcttttttggagcaagcactatctttccttgtaaagaaatttggacaatttgagtagaaatggtgtggtatgtgcacatagaaactctcagaaaactgtcagatgagctagacagttgtcctctatctccatgggtcccgcatcccaaggatcgaaccaacaacagatcaaaaatacgtgaaaaaggaattgcatctgtattgaatgtgtacggactttttttcttgtctttgttccttaaacaatgtagtgtaacaactatttacatcgcatctcctttgcattcattattataagtaaactagagatgatttaaagtgtaaaaanaaaaaaaaaaaaaaaaaaaaaaaaaaaaaanaaaaaaaaaaanaaaaaanaaaaaaaaaaaaaaaaaaaaaaaaaaaaaacannaananaaaaaaaaaaaaagaaaaaaaacaaaaaaaaaaaaccaacaaaacacgaaaaagaagaggagggaggggcgggacgacgaaaaaaaaacgagagaggagacaggaagaaaaaagagcaagagagaacaaaaaagcagacacagaag

SEQ ID NO: 152443 - DNA, 2014 bp, Homo sapiens
tggccttcttagaacgtgttcgctttgcgtttgccttctgcgtgattgtaagtttcccgaggcttccccagccatgcggaactatgattctgggcctcccccatctactgtcattaaccaaaatgaaacatttgccaacataatttttaaacctactgtagtacaacaagccaggattgcccagaatggaattttgggagactttatcattagatatgacgtcaatagagaacagagcattggggacatccaggttctaaatggctattttgtgcactactttgctcctaaagaccttcctcctttacccaagaatgtggtattcgtgcttgacagcagtgcttctatggtgggaaccaaactccggcagaccaaggatgccctcttcacaattctccatgacctccgaccccaggaccgtttcagtatcattggattttccaaccggatcaaagtatggaaggaccacttgatatcagtcactccagacagcatcagggatgggaaagtgtacattcaccatatgtcacccactggaggcacagacatcaacggggccctgcagagggccatcaggctcctcaacaagtacgtggcccacagtggcattggagaccggagcgtgtccctcatcgtcttcctgacggatgggaagcccacggtcggggagacgcacaccctcaagatcctcaacaacacccgagaggccgcccgaggccaagtctgcatcttcaccattggcatcggcaacgacgtggacttcaggctgctggagaaactgtcgctggagaactgtggcctcacacggcgcgtgcacgaggaggaggacgcaggctcgcagctcatcgggttctacgatgaaatcaggaccccgctcctctctgacatccgcatcgattatccccccagctcagtggtgcaggccaccaagaccctgttccccaactacttcaacggctcggagatcatcattgcggggaagctggtggacaggaagctggatcacctgcacgtggaggtcaccgccagcaacagtaagaaattcatcatcctgaagacagatgtgcctgtgcggcctcagaaggcagggaaagatgtcacaggaagccccaggcctggaggcgatggagagggggacaccaaccacatcgagcgtctctggagctacctcaccacaaaggagctgctgagctcctggctgcaaagtgacgatgaaccggagaaggagcggctgcggcagcgggcccaggccctggctgtgagctaccgcttcctcactcccttcacctccatgaagctgagggggccggtcccacgcatggatggcctggaggaggcccacggcatgtcggctgccatgggacccgaaccggtggtgcagagcgtgcgaggagctggcacgcagccaggacctttgctcaagaagccataccagccaagaattaaaatctctaaaacatcagtggatggtgatccccactttgttgtggatttccccctgagcagactcaccgtgtgcttcaacattgatgggcagcccggggacatcctcaggctggtctctgatcacagggactctggtgtcacagtgaacggagagttaattggggcacccgcccctccaaatggccacaagaaacagcgcacttacttgcgcactatcaccatcctcatcaacaagccagagagatcttatctcgagatcacaccgagcagagtcatcttggatggtggggacagactggtgctcccctgcaaccagagtgtggtggtggggagctgggggctggaggtgtccgtgtctgccaacgccaatgtcaccgtcaccatccagggctccatagcctttgtcatcctcatccacctctacaaaaagccggcgcccttccagcgacaccacctgggtttctacattgccaacagcgagggcctttccagcaactgccacggactgctggagtctggcatcctgattcaggaactgacccagcagtccgtggcagttgctggtcga

SEQ ID NO: 152444 - DNA, 615 bp, Homo sapiens
aggctgcagtgagctatattgcaccacccaatagatgggtggcagaggcacattctgaccctcattgagtttagaagacatttgttttagagatccggagcatgcatccttccagcctctgctatcataaacataaaatggtgctaccaaaataaaaatgtctggtgtgacaggcaggctttgtttttgttttcatttttttcagttcgtggcttcagaagggaagaacagattttttcaaatgtcatgaaatttccttttgccagcatcctggaactataataaaaattcagaggaaagaacaacctatgactgggttttgttctgctgtgtccagatcatcctctggaagtcttgattgttgcctttctgctgctgtgctgtacgtgcaagttcctaaagccagggacatcccggagatgagctgtggatatagagtccgcacagcctgcgggagacagaatgtaattccttccaacacacacacacaggctttatggaatgccagaaaagcttcctcttggatgctgcctggagtaatgactttttgaccctcccctcttttttggagcaagcactatctttccttgtaaagaaatttggacaatttgagta

SEQ ID NO: 152445 - DNA, 2919 bp, Homo sapiens
tggccttcttagaacgtgttcgctttgcgtttgccttctgcgtgattgtaagtttcccgaggcttccccagccatgcggaactatgattctgggcctcccccatctactgtcattaaccaaaatgaaacatttgccaacataatttttaaacctactgtagtacaacaagccaggattgcccagaatggaattttgggagactttatcattagatatgacgtcaatagagaacagagcattggggacatccaggttctaaatggctattttgtgcactactttgctcctaaagaccttcctcctttacccaagaatgtggtattcgtgcttgacagcagtgcttctatggtgggaaccaaactccggcagaccaaggatgccctcttcacaattctccatgacctccgaccccaggaccgtttcagtatcattggattttccaaccggatcaaagtatggaaggaccacttgatatcagtcactccagacagcatcagggatgggaaagtgtacattcaccatatgtcacccactggaggcacagacatcaacggggccctgcagagggccatcaggctcctcaacaagtacgtggcccacagtggcattggagaccggagcgtgtccctcatcgtcttcctgacggatgggaagcccacggtcggggagacgcacaccctcaagatcctcaacaacacccgagaggccgcccgaggccaagtctgcatcttcaccattggcatcggcaacgacgtggacttcaggctgctggagaaactgtcgctggagaactgtggcctcacacggcgcgtgcacgaggaggaggacgcaggctcgcagctcatcgggttctacgatgaaatcaggaccccgctcctctctgacatccgcatcgattatccccccagctcagtggtgcaggccaccaagaccctgttccccaactacttcaacggctcggagatcatcattgcggggaagctggtggacaggaagctggatcacctgcacgtggaggtcaccgccagcaacagtaagaaattcatcatcctgaagacagatgtgcctgtgcggcctcagaaggcagggaaagatgtcacaggaagccccaggcctggaggcgatggagagggggacaccaaccacatcgagcgtctctggagctacctcaccacaaaggagctgctgagctcctggctgcaaagtgacgatgaaccggagaaggagcggctgcggcagcgggcccaggccctggctgtgagctaccgcttcctcactcccttcacctccatgaagctgagggggccggtcccacgcatggatggcctggaggaggcccacggcatgtcggctgccatgggacccgaaccggtggtgcagagcgtgcgaggagctggcacgcagccaggacctttgctcaagaagccataccagccaagaattaaaatctctaaaacatcagtggatggtgatccccactttgttgtggatttccccctgagcagactcaccgtgtgcttcaacattgatgggcagcccggggacatcctcaggctggtctctgatcacagggactctggtgtcacagtgaacggagagttaattggggcacccgcccctccaaatggccacaagaaacagcgcacttacttgcgcactatcaccatcctcatcaacaagccagagagatcttatctcgagatcacaccgagcagagtcatcttggatggtggggacagactggtgctcccctgcaaccagagtgtggtggtggggagctgggggctggaggtgtccgtgtctgccaacgccaatgtcaccgtcaccatccagggctccatagcctttgtcatcctcatccacctctacaaaaagccggcgcccttccagcgacaccacctgggtttctacattgccaacagcgagggcctttccagcaactgccacggactgctgggtcagttcctgaatcaggatgccagactcacagaagaccctgcagggcccagccagaacctcactcaccctctgctccttcaggtgggagaggggcctgaggccgtcctaacagtgaaaggccaccaagtcccagtggtctggaagcaaaggaagatttacaacggggaagagcagatagactgctggtttgccaggaacaatgccgccaaactgattgacggggagtacaaggattacctggcatcccatccatttgacacagggatgacacttggccagggaatgtccagggagctctgaagctggcagccttaaagatgcaagtgcatgaaggacagtgatgtggggaggccgtggggcagctcttttcatggcttgtacacgcctcagctcctggcaattagctggactccatgacccacccctggtgcagcatagatccgacgtctgtctgggcgaagggtaggggtgggtaggggcgggaagcctgagtgcaaatgtcatttccctctactgcctcttcctgcctctccccaccctgcccacatccacagaggggagagaagggtcatagctaaatgcaacaaagtctgtatcttgtcccaacctgcttttctgttctgttagcatatcataaagtaagcctttctggtgaaggaaggttgctatgaaactttttttcttggtggaaatggccaagtttaggcactctgctttttgccttacactaatgcttagaaagctgtcttttcagtggtgttgcagcccccagatgtgtggccaacctctgctgcaaaggaatctcttgctgagtccaggccaccaatcaggcaaatagcccatacatttgatcgttgtaaaccatgaagtcttttcttgcaagacgtttttcttctgctgtggtatcttgcccttaaaaattagttttcattaaaaagaaatttgattgaaaataaaaa

SEQ ID NO: 152446 - DNA, 6290 bp, Homo sapiens
  misc_feature (12)..(12): n is a, c, g, or t
gctgcaaaggtngatcccgccgggtccccgagcgtcccgcgccctcgccccgccatgctcctgctgctggggctgtgcctggggctgtccctgtgtgtggggtcgcaggaagaggcgcagagctggggccactcttcggagcaggatggactcagggtcccgaggcaagtcagactgttgcagaggctgaaaaccaaacctttgatgacagaattctcagtgaagtctaccatcatttcccgttatgccttcactacggtttcctgcagaatgctgaacagagcttctgaagaccaggacattgagttccagatgcagattccagctgcagctttcatcaccaacttcactatgcttattggagacaaggtgtatcagggcgaaattacagagagagaaaagaagagtggtgatagggtaaaagagaaaaggaataaaaccacagaagaaaatggagagaaggggactgaaatattcagagcttctgcagtgattcccagcaaggacaaagccgcctttttcctgagttatgaggagcttctgcagaggcgcctgggcaagtacgagcacagcatcagcgtgcggccccagcagctgtccgggaggctgagcgtggacgtgaatatcctggagagcgcgggcatcgcatccctggaggtgctgccgcttcacaacagcaggcagaggggcagtgggcgcggggaagatgattctgggcctcccccatctactgtcattaaccaaaatgaaacatttgccaacataatttttaaacctactgtagtacaacaagccaggattgcccagaatggaattttgggagactttatcattagatatgacgtcaatagagaacagagcattggggacatccaggttctaaatggctattttgtgcactactttgctcctaaagaccttcctcctttacccaagaatgtggtattcgtgcttgacagcagtgcttctatggtgggaaccaaactccggcagaccaaggatgccctcttcacaattctccatgacctccgaccccaggaccgtttcagtatcattggattttccaaccggatcaaagtatggaaggaccacttgatatcagtcactccagacagcatcagggatgggaaagtgtacattcaccatatgtcacccactggaggcacagacatcaacggggccctgcagagggccatcaggctcctcaacaagtacgtggcccacagtggcattggagaccggagcgtgtccctcatcgtcttcctgacggatgggaagcccacggtcggggagacgcacaccctcaagatcctcaacaacacccgagaggccgcccgaggccaagtctgcatcttcaccattggcatcggcaacgacgtggacttcaggctgctggagaaactgtcgctggagaactgtggcctcacacggcgcgtgcacgaggaggaggacgcaggctcgcagctcatcgggttctacgatgaaatcaggaccccgctcctctctgacatccgcatcgattatccccccagctcagtggtgcaggccaccaagaccctgttccccaactacttcaacggctcggagatcatcattgcggggaagctggtggacaggaagctggatcacctgcacgtggaggtcaccgccagcaacagtaagaaattcatcatcctgaagacagatgtgcctgtgcggcctcagaaggcagggaaagatgtcacaggaagccccaggcctggaggcgatggagagggggacaccaaccacatcgagcgtctctggagctacctcaccacaaaggagctgctgagctcctggctgcaaagtgacgatgaaccggagaaggagcggctgcggcagcgggcccaggccctggctgtgagctaccgcttcctcactcccttcacctccatgaagctgagggggccggtcccacgcatggatggcctggaggaggcccacggcatgtcggctgccatgggacccgaaccggtggtgcagagcgtgcgaggagctggcacgcagccaggacctttgctcaagaagccataccagccaagaattaaaatctctaaaacatcagtggatggtgatccccactttgttgtggatttccccctgagcagactcaccgtgtgcttcaacattgatgggcagcccggggacatcctcaggctggtctctgatcacagggactctggtgtcacagtgaacggagagttaattggggcacccgcccctccaaatggccacaagaaacagcgcacttacttgcgcactatcaccatcctcatcaacaagccagagagatcttatctcgagatcacaccgagcagagtcatcttggatggtggggacagactggtgctcccctgcaaccagagtgtggtggtggggagctgggggctggaggtgtccgtgtctgccaacgccaatgtcaccgtcaccatccagggctccatagcctttgtcatcctcatccacctctacaaaaagccggcgcccttccagcgacaccacctgggtttctacattgccaacagcgagggcctttccagcaactgccacggactgctgggtcagttcctgaatcaggatgccagactcacagaagaccctgcagggcccagccagaacctcactcaccctctgctccttcaggtgggagaggggcctgaggccgtcctaacagtgaaaggccaccaagtcccagtggtctggaagcaaaggaagatttacaacggggaagagcagatagactgctggtttgccaggaacaatgccgccaaactgattgacggggagtacaaggattacctggcatcccatccatttgacacagggatgacacttggccagggaatgtccagggagctctgaagctggcagccttaaagatgcaagtgcatgaaggacagtgatgtggggaggccgtggggcagctcttttcatggcttgtacacgcctcagctcctggcaattagctggactccatgacccacccctggtgcagcatagatccgacgtctgtctgggcgaagggtaggggtgggtaggggcgggaagcctgagtgcaaatgtcatttccctctactgcctcttcctgcctctccccaccctgcccacatccacagaggggagagaagggtcatagctaaatgcaacaaagtctgtatcttgtcccaacctgcttttctgttctgttagcatatcataaagtaagcctttctggtgaaggaaggttgctatgaaactttttttcttggtggaaatggccaagtttaggcactctgctttttgccttacactaatgcttagaaagctgtcttttcagtggtgttgcagcccccagatgtgtggccaacctctgctgcaaaggaatctcttgctgagtccaggccaccaatcaggcaaatagcccatacatttgatcgttgtaaaccatgaagtcttttcttgcaagacgtttttcttctgctgtggtatcttgcccttaaaaattagttttcattaaaaagaaatttgattgaaaataaaaacatctacagctcagatactgatctctttctaatgggctttgtaaaccacttgactttgctaatggctattctccaatttgttccaataagctaagggcttttcatacacaggacaactccatgtggttgattttactggcatgtcttggtgacgaagagttggccaagtgaatgatgcatcttttacttggagctctccagcctttgtcatagttcccagaccttttttccttgtggtcatccaggaggtgatcaattacatgtgcacagtgctaggacgggaggcagagccggctcagagcaggtccaccagcccacctatagcaggaagcgtgtcggtgcttaggaaatctaggacttccagcttccctcatgtcagatagaaaaaaagtcaggaaaccagctcgtggacaggggctttggttccaaaacttggacaaacctgatgccttaaggaaaaggttaagatgagagggggcttccagagtcaatgaacgtcacccttcagccgacggataccgggagcgcttgggcaaaacagcagagaaagaaagactgtggtcggggaagtggaatgcttcgatgcaggccagagttcaaggctctggggctggcctcacaagaggcttcttccacggggcttgacaccagagcagcccccgcgtgaaatgagaaggcacgcttagcactgggaggaaaagctgagttaagaaaattctttatcatgtttgccttccctggggaaacattcaggcagtaaaatgacatccacgtgttcctgtcggacgcagcggcttcgggaacaagttagcgctgggggactatctgggctcgtctctctctgcttcgtgaacccaccacaccagggcctgtctgctgtgctatttatttgccttccgtcttcccaacctcagctgcctgtattcatgccagaggtgcaaaggctgccagccagtgctgctgacagatgctttcagactgtagagctcagagaaagggagcggcagctagaggtagccagggagctggccaggctccccggggccttcctattatgtaaatcccagctggacagacagccctggagccaggtggccctgtcccctgtggagcacttggagcagtgatctgttgttccaggtgtaagtctcgacactgcagaaatgaggacgttattaggaaagaccagttcctactgcctgtgctgctactttaagagctgagaaaaacattccaatgagatatccatagctaacttgcttgctcagaaaaacataagtaacaaagttgagctttcatttttaaaaattatattttactttagaaaaatatcaccttttttcttcctcttccttacgtgtagatctttttttttttttcaaatggggtcagtacctgaaagcccgaaaccccataccaagcttatagttaggacctttgcatttgataaaaaaaaatatagtattttctgttgtccagaaaatcttcccagatagggaaactgaggcagagagtgccgtggagtggtttttgccaagtcatacaacatacttaatgcagggctacactgaacctccagaatcattttgtttgctttgaccctgtttcaccatctgggcaatcatttattttccttgagcatttataaaccagggcgagggttgttccaaaatgagtaattgaatgagatgaagaaatatgtcataattagaggagataaatctccttgttatcacaatagttaatgtgtcatgatcactgactaactgggaccttgaacaagtcagcatctctgcctttcaaaatgaaggaacattgttctctatcctcccctgaccccccacggccccatgctaggtgcaccgtcttcctccatttgactttttaatgctttacaacttcaggctaaagggaggggatgttgggaggagaaaccatcacaagattccctcggtgccacagctgtgctgaggaggccggggactgggaatcggagtgggcacctctgtgtttctctagggagtaacattcaacatttaattgaatcgtgtatcctgataggtggattaggaacaggattcattcctttaactttaacttttggctaaacgacatgccttggattgagtgtatatgtcttccccaaattcatatgttgaagcttaaatcctgaatgtgatggttcttggaattgggacctttggaaggttattaggtcttgagggcagagccctcacgaatgggattaaggcccttataagaagagacatggggccaggtgcagtggctcacacctgtaatcccaacattttgggaggccgagaagggtggatcatgaggtcaggagatggagaccatcctggccaacatggtgaaacctcatctctactaaaaatacaaaaattagctgggcgtggtggtgcgtgcctgtagttccagctacttgggaggctgaggcaggagaatcgcttgaaccaggcagtcggaacttgtagtgagccaagatcacgccactgcactccagctggagtgacagagccaaactccgtcaaaaaaaaacaaaacaaaacaaaaaaaagacatgggagagatggtgtttttcctctccaccacctggggatacgatgagaagatggccacctgcaagccaggaagacggccctcaccagacaccatgtctgctggcaccttgatcttggacctcccagcctccagaactgtgagaaataaatgtgttttgtttaagct

SEQ ID NO: 152447 - DNA, 6402 bp, Homo sapiens
  misc_feature (12)..(12): n is a, c, g, or t
gctgcaaaggtngatcccgccgggtccccgagcgtcccgcgccctcgccccgccatgctcctgctgctggggctgtgcctggggctgtccctgtgtgtggggtcgcaggaagaggcgcagagctggggccactcttcggagcaggatggactcagggtcccgaggcaagtcagactgttgcagaggctgaaaaccaaacctttgatgacagaattctcagtgaagtctaccatcatttcccgttatgccttcactacggtttcctgcagaatgctgaacagagcttctgaagaccaggacattgagttccagatgcagattccagctgcagctttcatcaccaacttcactatgcttattggagacaaggtgtatcagggcgaaattacagagagagaaaagaagagtggtgatagggtaaaagagaaaaggaataaaaccacagaagaaaatggagagaaggggactgaaatattcagagcttctgcagtgattcccagcaaggacaaagccgcctttttcctgagttatgaggagcttctgcagaggcgcctgggcaagtacgagcacagcatcagcgtgcggccccagcagctgtccgggaggctgagcgtggacgtgaatatcctggagagcgcgggcatcgcatccctggaggtgctgccgcttcacaacagcaggcagaggggcagtgggcgcggggaagatgattctgggcctcccccatctactgtcattaaccaaaatgaaacatttgccaacataatttttaaacctactgtagtacaacaagccaggattgcccagaatggaattttgggagactttatcattagatatgacgtcaatagagaacagagcattggggacatccaggttctaaatggctattttgtgcactactttgctcctaaagaccttcctcctttacccaagaatgtggtattcgtgcttgacagcagtgcttctatggtgggaaccaaactccggcaggacattggtttctccctcgctgtccaaaattgggttcccaagggctatttggatatttcatgtgtaaccttacaggtgcacgtgtaactggaaagggaaggcaaaggccaagaccaaggatgccctcttcacaattctccatgacctccgaccccaggaccgtttcagtatcattggattttccaaccggatcaaagtatggaaggaccacttgatatcagtcactccagacagcatcagggatgggaaagtgtacattcaccatatgtcacccactggaggcacagacatcaacggggccctgcagagggccatcaggctcctcaacaagtacgtggcccacagtggcattggagaccggagcgtgtccctcatcgtcttcctgacggatgggaagcccacggtcggggagacgcacaccctcaagatcctcaacaacacccgagaggccgcccgaggccaagtctgcatcttcaccattggcatcggcaacgacgtggacttcaggctgctggagaaactgtcgctggagaactgtggcctcacacggcgcgtgcacgaggaggaggacgcaggctcgcagctcatcgggttctacgatgaaatcaggaccccgctcctctctgacatccgcatcgattatccccccagctcagtggtgcaggccaccaagaccctgttccccaactacttcaacggctcggagatcatcattgcggggaagctggtggacaggaagctggatcacctgcacgtggaggtcaccgccagcaacagtaagaaattcatcatcctgaagacagatgtgcctgtgcggcctcagaaggcagggaaagatgtcacaggaagccccaggcctggaggcgatggagagggggacaccaaccacatcgagcgtctctggagctacctcaccacaaaggagctgctgagctcctggctgcaaagtgacgatgaaccggagaaggagcggctgcggcagcgggcccaggccctggctgtgagctaccgcttcctcactcccttcacctccatgaagctgagggggccggtcccacgcatggatggcctggaggaggcccacggcatgtcggctgccatgggacccgaaccggtggtgcagagcgtgcgaggagctggcacgcagccaggacctttgctcaagaagccataccagccaagaattaaaatctctaaaacatcagtggatggtgatccccactttgttgtggatttccccctgagcagactcaccgtgtgcttcaacattgatgggcagcccggggacatcctcaggctggtctctgatcacagggactctggtgtcacagtgaacggagagttaattggggcacccgcccctccaaatggccacaagaaacagcgcacttacttgcgcactatcaccatcctcatcaacaagccagagagatcttatctcgagatcacaccgagcagagtcatcttggatggtggggacagactggtgctcccctgcaaccagagtgtggtggtggggagctgggggctggaggtgtccgtgtctgccaacgccaatgtcaccgtcaccatccagggctccatagcctttgtcatcctcatccacctctacaaaaagccggcgcccttccagcgacaccacctgggtttctacattgccaacagcgagggcctttccagcaactgccacggactgctgggtcagttcctgaatcaggatgccagactcacagaagaccctgcagggcccagccagaacctcactcaccctctgctccttcaggtgggagaggggcctgaggccgtcctaacagtgaaaggccaccaagtcccagtggtctggaagcaaaggaagatttacaacggggaagagcagatagactgctggtttgccaggaacaatgccgccaaactgattgacggggagtacaaggattacctggcatcccatccatttgacacagggatgacacttggccagggaatgtccagggagctctgaagctggcagccttaaagatgcaagtgcatgaaggacagtgatgtggggaggccgtggggcagctcttttcatggcttgtacacgcctcagctcctggcaattagctggactccatgacccacccctggtgcagcatagatccgacgtctgtctgggcgaagggtaggggtgggtaggggcgggaagcctgagtgcaaatgtcatttccctctactgcctcttcctgcctctccccaccctgcccacatccacagaggggagagaagggtcatagctaaatgcaacaaagtctgtatcttgtcccaacctgcttttctgttctgttagcatatcataaagtaagcctttctggtgaaggaaggttgctatgaaactttttttcttggtggaaatggccaagtttaggcactctgctttttgccttacactaatgcttagaaagctgtcttttcagtggtgttgcagcccccagatgtgtggccaacctctgctgcaaaggaatctcttgctgagtccaggccaccaatcaggcaaatagcccatacatttgatcgttgtaaaccatgaagtcttttcttgcaagacgtttttcttctgctgtggtatcttgcccttaaaaattagttttcattaaaaagaaatttgattgaaaataaaaacatctacagctcagatactgatctctttctaatgggctttgtaaaccacttgactttgctaatggctattctccaatttgttccaataagctaagggcttttcatacacaggacaactccatgtggttgattttactggcatgtcttggtgacgaagagttggccaagtgaatgatgcatcttttacttggagctctccagcctttgtcatagttcccagaccttttttccttgtggtcatccaggaggtgatcaattacatgtgcacagtgctaggacgggaggcagagccggctcagagcaggtccaccagcccacctatagcaggaagcgtgtcggtgcttaggaaatctaggacttccagcttccctcatgtcagatagaaaaaaagtcaggaaaccagctcgtggacaggggctttggttccaaaacttggacaaacctgatgccttaaggaaaaggttaagatgagagggggcttccagagtcaatgaacgtcacccttcagccgacggataccgggagcgcttgggcaaaacagcagagaaagaaagactgtggtcggggaagtggaatgcttcgatgcaggccagagttcaaggctctggggctggcctcacaagaggcttcttccacggggcttgacaccagagcagcccccgcgtgaaatgagaaggcacgcttagcactgggaggaaaagctgagttaagaaaattctttatcatgtttgccttccctggggaaacattcaggcagtaaaatgacatccacgtgttcctgtcggacgcagcggcttcgggaacaagttagcgctgggggactatctgggctcgtctctctctgcttcgtgaacccaccacaccagggcctgtctgctgtgctatttatttgccttccgtcttcccaacctcagctgcctgtattcatgccagaggtgcaaaggctgccagccagtgctgctgacagatgctttcagactgtagagctcagagaaagggagcggcagctagaggtagccagggagctggccaggctccccggggccttcctattatgtaaatcccagctggacagacagccctggagccaggtggccctgtcccctgtggagcacttggagcagtgatctgttgttccaggtgtaagtctcgacactgcagaaatgaggacgttattaggaaagaccagttcctactgcctgtgctgctactttaagagctgagaaaaacattccaatgagatatccatagctaacttgcttgctcagaaaaacataagtaacaaagttgagctttcatttttaaaaattatattttactttagaaaaatatcaccttttttcttcctcttccttacgtgtagatctttttttttttttcaaatggggtcagtacctgaaagcccgaaaccccataccaagcttatagttaggacctttgcatttgataaaaaaaaatatagtattttctgttgtccagaaaatcttcccagatagggaaactgaggcagagagtgccgtggagtggtttttgccaagtcatacaacatacttaatgcagggctacactgaacctccagaatcattttgtttgctttgaccctgtttcaccatctgggcaatcatttattttccttgagcatttataaaccagggcgagggttgttccaaaatgagtaattgaatgagatgaagaaatatgtcataattagaggagataaatctccttgttatcacaatagttaatgtgtcatgatcactgactaactgggaccttgaacaagtcagcatctctgcctttcaaaatgaaggaacattgttctctatcctcccctgaccccccacggccccatgctaggtgcaccgtcttcctccatttgactttttaatgctttacaacttcaggctaaagggaggggatgttgggaggagaaaccatcacaagattccctcggtgccacagctgtgctgaggaggccggggactgggaatcggagtgggcacctctgtgtttctctagggagtaacattcaacatttaattgaatcgtgtatcctgataggtggattaggaacaggattcattcctttaactttaacttttggctaaacgacatgccttggattgagtgtatatgtcttccccaaattcatatgttgaagcttaaatcctgaatgtgatggttcttggaattgggacctttggaaggttattaggtcttgagggcagagccctcacgaatgggattaaggcccttataagaagagacatggggccaggtgcagtggctcacacctgtaatcccaacattttgggaggccgagaagggtggatcatgaggtcaggagatggagaccatcctggccaacatggtgaaacctcatctctactaaaaatacaaaaattagctgggcgtggtggtgcgtgcctgtagttccagctacttgggaggctgaggcaggagaatcgcttgaaccaggcagtcggaacttgtagtgagccaagatcacgccactgcactccagctggagtgacagagccaaactccgtcaaaaaaaaacaaaacaaaacaaaaaaaagacatgggagagatggtgtttttcctctccaccacctggggatacgatgagaagatggccacctgcaagccaggaagacggccctcaccagacaccatgtctgctggcaccttgatcttggacctcccagcctccagaactgtgagaaataaatgtgttttgtttaagct

SEQ ID NO: 152448 - DNA, 3782 bp, Homo sapiens
  misc_feature (12)..(12): n is a, c, g, or t
  misc_feature (3547)..(3547): n is a, c, g, or t
  misc_feature (3578)..(3578): n is a, c, g, or t
  misc_feature (3590)..(3590): n is a, c, g, or t
  misc_feature (3597)..(3597): n is a, c, g, or t
  misc_feature (3630)..(3631): n is a, c, g, or t
  misc_feature (3634)..(3634): n is a, c, g, or t
  misc_feature (3636)..(3636): n is a, c, g, or t
gctgcaaaggtngatcccgccgggtccccgagcgtcccgcgccctcgccccgccatgctcctgctgctggggctgtgcctggggctgtccctgtgtgtggggtcgcaggaagaggcgcagagctggggccactcttcggagcaggatggactcagggtcccgaggcaagtcagactgttgcagaggctgaaaaccaaacctttgatgacagaattctcagtgaagtctaccatcatttcccgttatgccttcactacggtttcctgcagaatgctgaacagagcttctgaagaccaggacattgagttccagatgcagattccagctgcagctttcatcaccaacttcactatgcttattggagacaaggtgtatcagggcgaaattacagagagagaaaagaagagtggtgatagggtaaaagagaaaaggaataaaaccacagaagaaaatggagagaaggggactgaaatattcagagcttctgcagtgattcccagcaaggacaaagccgcctttttcctgagttatgaggagcttctgcagaggcgcctgggcaagtacgagcacagcatcagcgtgcggccccagcagctgtccgggaggctgagcgtggacgtgaatatcctggagagcgcgggcatcgcatccctggaggtgctgccgcttcacaacagcaggcagaggggcagtgggcgcggggaagatgattctgggcctcccccatctactgtcattaaccaaaatgaaacatttgccaacataatttttaaacctactgtagtacaacaagccaggattgcccagaatggaattttgggagactttatcattagatatgacgtcaatagagaacagagcattggggacatccaggttctaaatggctattttgtgcactactttgctcctaaagaccttcctcctttacccaagaatgtggtattcgtgcttgacagcagtgcttctatggtgggaaccaaactccggcagaccaaggatgccctcttcacaattctccatgacctccgaccccaggaccgtttcagtatcattggattttccaaccggatcaaagtatggaaggaccacttgatatcagtcactccagacagcatcagggatgggaaagtgtacattcaccatatgtcacccactggaggcacagacatcaacggggccctgcagagggccatcaggctcctcaacaagtacgtggcccacagtggcattggagaccggagcgtgtccctcatcgtcttcctgacggatgggaagcccacggtcggggagacgcacaccctcaagatcctcaacaacacccgagaggccgcccgaggccaagtctgcatcttcaccattggcatcggcaacgacgtggacttcaggctgctggagaaactgtcgctggagaactgtggcctcacacggcgcgtgcacgaggaggaggacgcaggctcgcagctcatcgggttctacgatgaaatcaggaccccgctcctctctgacatccgcatcgattatccccccagctcagtggtgcaggccaccaagaccctgttccccaactacttcaacggctcggagatcatcattgcggggaagctggtggacaggaagctggatcacctgcacgtggaggtcaccgccagcaacagtaagaaattcatcatcctgaagacagatgtgcctgtgcggcctcagaaggcagggaaagatgtcacaggaagccccaggcctggaggcgatggagagggggacaccaaccacatcgagcgtctctggagctacctcaccacaaaggagctgctgagctcctggctgcaaagtgacgatgaaccggagaaggagcggctgcggcagcgggcccaggccctggctgtgagctaccgcttcctcactcccttcacctccatgaagctgagggggccggtcccacgcatggatggcctggaggaggcccacggcatgtcggctgccatgggacccgaaccggtggtgcagagcgtgcgaggagctggcacgcagccaggacctttgctcaagaagccataccagccaagaattaaaatctctaaaacatcagtggatggtgatccccactttgttgtggatttccccctgagcagactcaccgtgtgcttcaacattgatgggcagcccggggacatcctcaggctggtctctgatcacagggactctggtgtcacagtgaacggagagttaattggggcacccgcccctccaaatggccacaagaaacagcgcacttacttgcgcactatcaccatcctcatcaacaagccagagagatcttatctcgagatcacaccgagcagagtcatcttggatggtggggacagactggtgctcccctgcaaccagagtgtggtggtggggagctgggggctggaggtgtccgtgtctgccaacgccaatgtcaccgtcaccatccagggctccatagcctttgtcatcctcatccacctctacaaaaagccggcgcccttccagcgacaccacctgggtttctacattgccaacagcgagggcctttccagcaactgccacggactgctgggtcagttcctgaatcaggatgccagactcacagaagaccctgcagggcccagccagaacctcactcaccctctgctccttcaggtgggagaggggcctgaggccgtcctaacagtgaaaggccaccaagtcccagtggtctggaagcaaaggaagatttacaacggggaagagcagatagactgctggtttgccaggaacaatgccgccaaactgattgacggggagtacaaggattacctggcatcccatccatttgacacagggatgacacttggccagggaatgtccagggagctctgaagctggcagccttaaagatgcaagtgcatgaaggacagtgatgtggggaggccgtggggcagctcttttcatggcttgtacacgcctcagctcctggcaattagctggactccatgacccacccctggtgcagcatagatccgacgtctgtctgggcgaagggtaggggtgggtaggggcgggaagcctgagtgcaaatgtcatttccctctactgcctcttcctgcctctccccaccctgcccacatccacagaggggagagaagggtcatagctaaatgcaacaaagtctgtatcttgtcccaacctgcttttctgttctgttagcatatcataaagtaagcctttctggtgaaggaaggttgctatgaaactttttttcttggtggaaatggccaagtttaggcactctgctttttgccttacactaatgcttagaaagctgtcttttcagtggtgttgcagcccccagatgtgtggccaacctctgctgcaaaggaatctcttgctgagtccaggccaccaatcaggcaaatagcccatacatttgatcgttgtaaaccatgaagtcttttcttgcaagacgtttttcttctgctgtggtatcttgcccttaaaaattagttttcattaaaaagaaatttgattgaaaataaaaaaaaanaaaaaaaaaaaaaaaaaaaaaaaaaaaaaanaaaaaaaaaaanaaaaaanaaaaaaaaaaaaaaaaaaaaaaaaaaaaaacannaananaaaaaaaaaaaaagaaaaaaaacaaaaaaaaaaaaccaacaaaacacgaaaaagaagaggagggaggggcgggacgacgaaaaaaaaacgagagaggagacaggaagaaaaaagagcaagagagaacaaaaaagcagacacagaag

SEQ ID NO: 152449 - DNA, 2086 bp, Homo sapiens
tggccttcttagaacgtgttcgctttgcgtttgccttctgcgtgattgtaagtttcccgaggcttccccagccatgcggaactatgattctgggcctcccccatctactgtcattaaccaaaatgaaacatttgccaacataatttttaaacctactgtagtacaacaagccaggattgcccagaatggaattttgggagactttatcattagatatgacgtcaatagagaacagagcattggggacatccaggttctaaatggctattttgtgcactactttgctcctaaagaccttcctcctttacccaagaatgtggtattcgtgcttgacagcagtgcttctatggtgggaaccaaactccggcagaccaaggatgccctcttcacaattctccatgacctccgaccccaggaccgtttcagtatcattggattttccaaccggatcaaagtatggaaggaccacttgatatcagtcactccagacagcatcagggatgggaaagtgtacattcaccatatgtcacccactggaggcacagacatcaacggggccctgcagagggccatcaggctcctcaacaagtacgtggcccacagtggcattggagaccggagcgtgtccctcatcgtcttcctgacggatgggaagcccacggtcggggagacgcacaccctcaagatcctcaacaacacccgagaggccgcccgaggccaagtctgcatcttcaccattggcatcggcaacgacgtggacttcaggctgctggagaaactgtcgctggagaactgtggcctcacacggcgcgtgcacgaggaggaggacgcaggctcgcagctcatcgggttctacgatgaaatcaggaccccgctcctctctgacatccgcatcgattatccccccagctcagtggtgcaggccaccaagaccctgttccccaactacttcaacggctcggagatcatcattgcggggaagctggtggacaggaagctggatcacctgcacgtggaggtcaccgccagcaacagtaagaaattcatcatcctgaagacagatgtgcctgtgcggcctcagaaggcagggaaagatgtcacaggaagccccaggcctggaggcgatggagagggggacaccaaccacatcgagcgtctctggagctacctcaccacaaaggagctgctgagctcctggctgcaaagtgacgatgaaccggagaaggagcggctgcggcagcgggcccaggccctggctgtgagctaccgcttcctcactcccttcacctccatgaagctgagggggccggtcccacgcatggatggcctggaggaggcccacggcatgtcggctgccatgggacccgaaccggtggtgcagagcgtgcgaggagctggcacgcagccaggacctttgctcaagaagccataccagccaagaattaaaatctctaaaacatcagtggatggtgatccccactttgttgtggatttccccctgagcagactcaccgtgtgcttcaacattgatgggcagcccggggacatcctcaggctggtctctgatcacagggactctggtaagttctaccttccgctgcagcatctgggcaaggaccaggtaggtactgcatccccctctgttcttcagatggatgtccagtgatccaagggccaccttacagacgctcagtgagtatcgtcagtggttaagggaagcgcactgcgctcctggacttatgcatccgactccctgctttatgacaagtgccgtgtgaccttgggcacatgccttgggagttgtttcccttgtaaaatggagataggaacactctcttggcctcacagagctaatataaaatggatcaaatgaaactggttatgaagttgttttttaaatgctgaagtgctttagaaatccgctatgtaggctgggcgcggtggctcatgcctgtaatcccagcactttgggaggccgaggcaggtggatcaccggaggtcaggagttcaagaccagcttggccaacatggtgaaaccccatctctactaaagttacaaaaaaattagcccggcatagtggtgggc

SEQ ID NO: 152450 - DNA, 207 bp, Homo sapiens
gtataaaatatattaaatatcaagaattctgtccctaaactcaccaattccaaaacttgaaaaatgcctttttacaatagaggaatttttttaaatcttgcaaatgttgattttcaattgaaaatattcagaccttatacaaataattatttctaccttgagaatatttaaaatatgaccatgccggccaagcacagtggctcacac

SEQ ID NO: 152451 - DNA, 384 bp, Homo sapiens
agaacccactgaaactgtaccctttaaaatggtgaattttatgttatgtgaatcacatctcaattagaagaatcgtaaccagaaaaataaaattgacttctaaaaaaatatgtcattcagtaaattgtttccttcagtctcagaaatcctgacttgcgctcaaactggcagaatttctctctggatgaggtctctgccttccaacaagccttatgcctctattgggccaatgttcaattttctgtttataagacatgttgaggccatgacaaagcaggtgtgtttaaggccagggcaaactgagcctgaacgctgatttgccacttaatagctttgtggcctgcagcaagctgtgtgaatgctctgcacagtgtcctcacgtat

SEQ ID NO: 152452 - DNA, 589 bp, Homo sapiens
tcatttcttggtcattctggaagcagcatggtggtgaaatgggagagttccctgaacccctttgcctgatgtttgacaggggtgtggcttgtctgtttggtcaccatcccttcaaccccttacgggatggggagcaggcagctggacaagtgcaggagcccaagtgggcgtgtgttacagtgtgcccttttagccttgctgtccacggatggcttgagtgttggccagctcagtggaccctctgcctttctgtaagggcagagtgccagtgtgacagctctctgtatcccaaactcttgtccagcatcctgggagaagcgggtcacacatgtacttgaatgtaaagaagtgactttggcttgtttttgactcaaatctagcatgaagcttggtttcttcgaagacacaaacactttaaacatgagagatattcaataaagatgagtcatctttccctggatctttatagtttgtcctccataaacatcaccttatttgtatatgaagctttattatctgcactaaattcactacagattgtttccatttttctctctttaagacctgagattatcctcaagtacaatta

SEQ ID NO: 152453 - DNA, 352 bp, Homo sapiens
aatgaaagggtgtgggccattagaggaaataagtgccttgcccctggaggcctcaattagatgtcagacatcatttcctgggagggctgatcagcagattcctatatctaaggagaaagttgggggagatcaccttagagttctttacaactctaaagtttctttggttctatctatgatgtagggctgagtgatccatctcagatgagctactccttcttaggccccatttttcaaataaggaaactgagatgtttgaaaattaacaaaaaggtcacagagcatgttagttgtggaggtgagacagaagaaactcagatcttctccagccctgctagtttcactccctctc

SEQ ID NO: 152454 - DNA, 521 bp, Homo sapiens
tgtcgtcaaggttctgatgaggaaaaatttctaaaatagttgggaaaaaatacagattgagcatcccaaatcgaaaagtgctccaaaatttaaaacatgacactcaaaggaaatactcactggaacatttcagatttctaggtccaggatgcccaaccagtataatgcaaatacaggtattccaaaatctgaaaaaaactgaaatccaaaatacctctggttccaagcatttcagataagggatactcaacgtgtatccccaaaatacactcttatcagcatagaaggatgcacatactttttttgaattaaaaaaaagtgaaagtacagctgggtgcagtggctcacacctgtaatcccagcactttgggagactgaggcaggcagatcacctgaggtcaggagttcgagcccagtgtgaccaacatggagaaaccccatctctactaaaaacacaaaattagccaggcgtggtggcgcatgcctgtaatcccagctactcgggaggctgaggcaggaga

SEQ ID NO: 152455 - DNA, 410 bp, Homo sapiens
tcttttccacactgttttccatagcagctatactagtttacattcccaccagcagtgtagaaatgttccttgatcactgcatccacagcaacatctactgttttttgagtttttttattatggcaattcttgcaggagtaaggtggtatcgcattgtggttttgtctgtttgtgctctttcagactttttgaggtaggcatttagggctatgaactttcctcttagcactgccttagctgtatcccagaggttttgataggctgtgtcattattgtcattcagtctgaagaattttttaaatttccatcttgatttcgtttttgacccagtgctcattcaggagcatggtttttttgttttttttgtttgtttgtttttttccgaaactccatctcaaaaaaaagaaaaa

SEQ ID NO: 152456 - DNA, 699 bp, Homo sapiens
ggaggacaagcagctctgctcaagatagataaagccaccctcttcatactgagcaaaataaacctgttattactggtattattgggtgtctcatgtctcagatacccaggaacttgtaagttaaaaaaagtaaaagtgattctcatatgacaccttagttgaaaatcattgcccttgtgaatttatagcatttgatcaaatgtttcccgggaataacaaccactgcataaagttatatactcgcaggttactctgagacataaattaggagattgtcataagaactcatatatcttaacatacacgactgtgtcagaagaatgtgttgtataggaacagcagattttcttcaaagaccagaatgattagacacactggtcaaacatattgaagaattaagtgtttatcatatgggtcttggatgtaaaaacagagcttcagaatcctgattatactatcagtatactccatcggattcatttttgtattacttactttgttgtcttctgttatcaaaacatgttgcaattggggtgatctaaagaataaaatcaatgacatctattcctacagtgtttttacttttaaaattcttgctctttttgacttcataaaacttcatggataatcaccatggctatcttatagagcagagaattgaaatagaaaatcacactattttttaagctgataggatgt

SEQ ID NO: 152457 - DNA, 844 bp, Homo sapiens
  misc_feature (83)..(83): n is a, c, g, or t
tttgtgtgttgcccactgcctgaaggaagtaacaatgtggattctgctgatccggaggaggatgactcggatgtctggtgggncggagcagacacagactatgcagatgggagtgaagacaaagtagtagaagtataaagcgttgagctcaacgctttatacttccaagatagataaagccaccctcttcatactgagcaaaataaacctgttattactggtattattgggtgtctcatgtctcagatacccaggaacttgtaagttaaaaaaagtaaaagtgattctcatatgacaccttagttgaaaatcattgcccttgtgaatttatagcatttgatcaaatgtttcccgggaataacaaccactgcataaagttatatactcgcaggttactctgagacataaattaggagattgtcataagaactcatatatcttaacatacacgactgtgtcagaagaatgtgttgtataggaacagcagattttcttcaaagaccagaatgattagacacactggtcaaacatattgaagaattaagtgtttatcatatgggtcttggatgtaaaaacagagcttcagaatcctgattatactatcagtatactccatcggattcatttttgtattacttactttgttgtcttctgttatcaaaacatgttgcaattggggtgatctaaagaataaaatcaatgacatctattcctacagtgtttttacttttaaaattcttgctctttttgacttcataaaacttcatggataatcaccatggctatcttatagagcagagaattgaaatagaaaatcacactattttttaagctgataggatgt

SEQ ID NO: 152458 - DNA, 644 bp, Homo sapiens
caagcaattctgcctcagcctctcaagtatctgggactacaggcacccgccaccacgcccagcaaatttttttgtatttttagtagagatggggtttcactatgttggccaggctggtctcgaactcctgaccttgtgatccacctgccttggcctcccaaagtgctgggattacaggcgtgagccaccgcgcctggccaggatttttatttttaaattatgaatgggtgctgaattttgtcagataccctctctcctttttggtatttacagagaatgccaacccatggtataattctggacagcagttctttcccctgtgtatgttaggacctgggccgtggcttcagttattgcccctcagtagatgctctgtgatgtctagctctgggtgagaatggctgaatccaaagccgctggtgacaaagtggggtgaattgaaatgaaccagctcccactgaggccaactggaggtagaaaggaagaaaaatgcctaagacaaggggaacgtgcaaagggacaaaacatagaggggtgagggtacagtgtgcccaaatgtctttattgatatctaacaccttttcaaaaaggattcgaggtcgtcggtggacatggtggggtggggagtgctttccaagtcagta

SEQ ID NO: 152459 - DNA, 583 bp, Homo sapiens
catgtttgttcttcagagggatcactcaatcagctgcaaggaagatgaatttgaaggggtaaaatcagaggcagttatccagttcagaaagctcctcactcacaattacagagaaagataaacaaggcctgagaaccgaggcattgctaagacaagagaggcgcttacctgaggaaattaaaaggtaggattttaatgctgttttacagtatcttaatgatgtgctagtaaaccttacctatgaatacaaataaatggagaagtaaacaggaaatggatagaatacagtccttacaattcttcagtgtagaggccactttatttcaataaaccccattgaaactctatgcgtgcctgtgtgtgtgtaacagacgcagttcatttaagagttatttgtgttgctgtccagctaaggagtgtttattccctagggatcaaagtacccaaatctggcaaactccaaagcagtgagaaggatgaggactgcttggtgctcaggtgctcatcttggagcctcattcttttttttttatgggggggcccctcaaaatccacccggagggtttgaaccttgggcttggcc

SEQ ID NO: 152460 - DNA, 300 bp, Homo sapiens
ccacatcagcctcctgagtagccaggactacaggcatgctcctccatacctggccagtattccttttacctaagctaacacttgaaccctccttattgtttacctgggacactgaactttttgtgtcatctcccttcctctctggctgttccttctcaggctgctttactggttcctccggcctccctgaactctgaacagtccagggccccacgctcagtcctttgtcctctcctctgcagtgtctacgcttgctcgctaggtgagcccctcctgtctcatgtctccctgatgatgacc

SEQ ID NO: 152461 - DNA, 420 bp, Homo sapiens
ccaatgatgaaaaattataagaattcctttttaagtcatgtcaagaaaaaaagtacctcattactgcttctatttgatacttccctggaagtcctctcaaggcaataagaaaatgaaaggaaataaaaggtataaaggctagaaatgaataaacaaaaacagtatgatttgtagacaatatggctgaacacatagaatactccaagaaatccacagattgttagaattaagaaattcagcaaggttggtgaatacaaagtcaatattttttaaatgcccattcttagttagcaacaaaacctaattagaaatatatcttttaagaatagagattgctttgataaaatttattcgtgtaggtatttcatttgatatctgtcattttaaatatattggtatgaataaatttaattcgactgt

SEQ ID NO: 152462 - DNA, 332 bp, Homo sapiens
gtctggggcacagtaggtctttaataagtgtgtttttatttttgaggtgaaggtatgcaaacttccacgctgaatgagcatggaaatagacctgaaagcaggaaacattcccgagaaatagtggggcttggcacagaagcaagggatggacaagacagcctcctagtcatcctccttcatgaaagctctgtcctctctctaagtgactcttatttcatacctcccaagatgcttcagagaatcttccgagttctggcctatgaaccagcattccatttggcccagccagcctcccctcaatgctccccaaccccacggtgcgttggcccaag

SEQ ID NO: 152463 - DNA, 138 bp, Homo sapiens
ataccaaaccatcagccagcactttcggccgtcctcaccatcccaggtgaggacagatcatggggtagcacagagacttttccgataggagaatcttaatgaagcgagcatgaaacagaatgtgctatgcgccaaatt

SEQ ID NO: 152464 - DNA, 196 bp, Homo sapiens
tgcgctccatccgtgcccacagacgccaacctggaaacctgtgtgtccaagggcagctgctgccactcactgcagccaggcccactctgacatggagggagccactgaagaactgagaaacactcaactcgcccgaggtcctgagagggccgatgcctcatctgagaccacggagtcagacggtgacctgaccctg

SEQ ID NO: 152465 - DNA, 348 bp, Homo sapiens
tgacactagaggatcccctaacggtgcgtatgcaggaggctagagacacggcacagcggcgcagctcgcctcgctatgtcctttaggttgtttgagggacattcatcaaggaaaccggagaaacttaaaatgctcttccgcttctttggaacagtcacagagaaaagtgaactcctttcattcttgcagtaatttttcttgctgatgggaacagttcaagtcaagtgacatgtgaggaacattttgtgtttaacgtaaaccttcctgtcccaactacattgaaacagtaatgatgcgacaagttctttgtagaaatacagtacaacattgctcttggtctgcagtatg

SEQ ID NO: 152466 - DNA, 265 bp, Homo sapiens
gtaagtaaaagctaaagttattacaatgatagaagaaaatatagaagaaaaatcttcggggcagaaacatttctacaggatagaaaaattttaaaaatggatgaactggaattcatcaaaattaagtatcactcatgttccttgaaagacactattaagaaaatacaaagatgagccacaggcaaggaagaaaattctgataacacatgtatctgacaaagaacttatatccataatataaaaggaattctcatcactaaacaag

SEQ ID NO: 152467 - DNA, 192 bp, Homo sapiens
ttattatcctgcaacaatatattcagaacatattattagtaaagagcataaccccttctttgatttgaaaagtcaccgcaaaccttgtcagacacatgaacttgtgctgtgtgtcagggccccagctaccctgcaggaagtggaggggtggccccaggccttcaggccagccaggcaggagtctcttctcct

SEQ ID NO: 152468 - DNA, 560 bp, Homo sapiens
cacaaaagtaaccatgtctgcaatttccgcagtagtttctggtttctctctgcccttcctctctgggaacccagctgtcaggcctggggtctatccgtcggaattaggtagaagaatctccaccaagattctgaatgtttccaacacatttcagcagcagttccctcaccacactagttattctctcgattctcttttcccaaaccctcaattcataagttgtaccagtttgtttgaagctcatgttaagcactttttcccactcttgggggacccataagaattgtaacataaacaagaaccatcttttctctcccttgtgccacacccaccaaagcaaatggcctgggtcacgtcctgcacaccccaggaaattcatgtctgggagatgctgggggggagaggcgccagggaggcagagaacattattatgtctgattcatttacactgcaatctgtcagccaccatgctgtcaaggctgggctgaagccaagaaattgaatttagagggtgatttttcttagaacaggaagttccatttggctaagagagaacaaac

SEQ ID NO: 152469 - DNA, 449 bp, Homo sapiens
ccagaactgaaggaggagaatttttagactgaaagggttcactgagtgtccaacacagtggatgaaagtcagctcacaccaagatatctcactgtggaacttcaaacactgggacaattcaagatcctaaaagctttcagagagaaaaaaatcaggtcacacagaaatgatcaggactcagaatagctccagacttctcaccaatagcactggaaacctaaaagaccatggtgcaatgccctcagggatttaaggaaaattatttctgacctagaattctatatccagcaaaactacctttaatcaagtgtagggccgaataaggctattttcagacgtgtgagattttagaaagctcatttccttcatggtttctttctcaagaagctactggagatgatgttctaccaaaatgaggtgggtagaccatgaaaaggaagacgcggtat

SEQ ID NO: 152470 - DNA, 494 bp, Homo sapiens
tttagttcatcaggaaagaaagggcagtgttcagaatggtagagaaaatatctacagtttataaaggaaaacagaaactgctttcccaatgtagcaaatcctcatcattaaaaaatcactcactccagaaggaaaggtccatggtagaatactgtttttacctatcctttttcacttcgtcacccagaagttacctattaataatggcagagtctcagttgagaaaaattcaaaaaattgggcagaatttttaaaattttctctcctatcctttcagctgtctgcccagaatttgaccgtaattggaagcaagttctatgtttacagcaatttatctttctacatcacctgtttctaggtgataaatatgccattttaaaattagtgtggcatttgtgcagttaattatatgcattagaaatcactgcaacaggaatgtaattttcaccccacacatacgaaagcagaaatcttccctaaacacacaactccca

SEQ ID NO: 152471 - DNA, 350 bp, Homo sapiens
agcaggtatattgcgggtgtgtggctgggatgagggggactagctgggggatgaggctgccgaggtggctgaaagtatgggatggaattagagcttcagaccttggccgtcatcctgggccagcacagtgctgcgaggagccactgtgtgttgacacttgagcaggcctcagggaagagagctctaaaccaatggtcattgtccccactggcctggagcaattgggactggttcctgagctctctgatgctgctccgcagggaacaggtgctatgtgtttgagccaatgtgcccaggcccctcgtctcagtctacgctggctgccatcacaaaacaccaggtggcttaca

SEQ ID NO: 152472 - DNA, 134 bp, Homo sapiens
gactctgcctcaaaaaaataaaaataaaaaaggacattcctatttcagatatgttataaaaaatatgcatctagaattgatgaaccatgatagcatgttaacttttcagtgatattttatactgatggtggggg

SEQ ID NO: 152473 - DNA, 527 bp, Homo sapiens
atagctgttccagatgtagacctggtaattcgtcgagttctgtttctctggagaaccctgactaatacatcacctctaccacctccacaccctgtcatcacgacaaacaagaaaacacaacttgtgcatatgaaaaccttatccctgtggtctccttgacaggaacaaggctacctctcaagagtcagtgaagtttttgttcatatgcacaagtctactcaatttaacacatacagttattcaatgatctctgggggcagctggccccactgagccatgagtccaggtggtgttaaggctcactggtttcgtggagactggtccttctaggaacagcttgagaagttgagctttggacagggattcaaatgtaatgcagaacttcaccacttcagctgtggggctatgtggttcttcagagcaagcacatctccttctgtgagtatcttcaaggacaaatcaacactcatccccactgtcctggccaggaaaacatgactgcaaggagtgaccacacaggctctgag

SEQ ID NO: 152474 - DNA, 357 bp, Homo sapiens
agaatcacttgaacctgggaggtgaaggttgcagtgagctgagaccgcgccactgcactccagcctgggcgacagagcaagactctggaaaaaaaaagaaaagaaagaaagaaatataccttattagtaataataatgtatagtgacagttcggctgtagtatcagtgtaattagacttacatcttacgatttgatattttcccctggttcactcagtctttttctgttttctacaggacgttgacagtagtgataggaaaagcccgacagggcaagacacagaaatagaagatatgccagaccccagttctcttgcttacacacccctcgctgctccacacctgcctcgcccttgg

SEQ ID NO: 152475 - DNA, 456 bp, Homo sapiens
atatttttagtagaaacagggtttctctatgttggtcaggctggtgccaatgctgcctggcatcctcacaggaattttctgttgatcaactgttcctctttttcacccataggattaacaatgtgtcttcgtactagggtgcaataagcttttcttgcatttaatgttactatcccctgaacaagtttctatattggtacttatagctgtactttatttattttaaatgcctcagttttatcattgagccataatttatttaagcggttcttgtacatatatattggtgtgcgcttgtgcaagtacacctgtaaggatatatttccagcagtggaatttctaggtcaatgtgtatgatcttttttattttgataaacggacacattgcctatcaaggaaacatctgaggttctatgacagtggatacagtttatcattgaagttctcagaatcctc

SEQ ID NO: 152476 - DNA, 132 bp, Homo sapiens
gtgtgcgtgtatgtgtgtgagagaggcccagggcacaaagcctgggtgcgtcatggttgctgggagagtttgacgagtctgactcagtggggacatgcggcaggaaaggaagggagagcgcagtggcatttg

SEQ ID NO: 152477 - DNA, 380 bp, Homo sapiens
cacagtaagagagtaacaacagtagtaataaagtaggccataaccacatgccagcatcactacttttgtgctttgggattactagcactgtgataccaaaacagtcaatctgaaataactagcgggtggaaagcacacacagcgtggagatgttggacaaagggatgatttcatgtcccaggcgggacgtgagatttcctcctaatactcataaccgcacgcaattgaaaacttatgaattgtttatttctggaattttccacttaagattttcagaccaccaggcacggtggctcacgcctgtaattccagcactttgggaggccgaggcgggcggatcacaaggtcaggagatcgagaccatcctggctaacatggtg

SEQ ID NO: 152478 - DNA, 335 bp, Homo sapiens
cctctcagcaagcaagtttcctcaacttaaaacaatttaccttttgtcctatcatccacccaagtgatgttctaactttcttcccctaacaatagacttttaaaacaatagtctacatttgctgtgtccagtttctcaatcgtcattccctccttagccacttatccgacttctgcccctgccattgtatttgaaacggaaattgccctattcccattccttcctaattttcaaatgcatcgctctttgtagccctaagtatttgattaccccttcttctcacagcaggaatttatctccctggttctttcttggttctttattcatccctgata

SEQ ID NO: 152479 - DNA, 473 bp, Homo sapiens
gtgtaactggttctcgatcccagagagaagaccctcagatggcagaccacccgaggtgacacatctaaaaggactgcgcagggcccacccgcaaggttccaggacatggaatagaagagtgtgcaccaggcatcctatgcagggcatcagctcatcctcaaattccccaggacagatgcagcgctggatgtgtggaatatttaaaggttcccttgcagctgaagtaccttggcaaaacctgtttttactgactccagatatactggcttctacttctgttccagagtcagtgataaacccccaagaactcattagtactttctagcatgcataaaaggacagtaagcctttgttttgctgattagggaggccacatacatttttaaaaacggattattaagaaataaattaccgatcgcggcctgatttattgtctgattactaatattatcggtcacatattaattgtgatc

SEQ ID NO: 152480 - DNA, 305 bp, Homo sapiens
gggagccaagtgtggagtgagcacgaggaatagagagagaccagataaaatagaagggtgtgagttggggttgggttagagatggaaaacaggtaccaagaaaaggctgtctcttattaacacccattcttcaggatggatacaaacagttcttcaggatttcaggtgttccctgaaacccttgcaaaggacgttttctcgatttcatgttgattcagactctgagtcattctacggcacccaaagtctagatggacacttttgatgagttcttaccaactgaactgaacttttttttttttttt

SEQ ID NO: 152481 - DNA, 162 bp, Homo sapiens
tccagtggcggctggatgggagaggagcaacaagactgctgccagaagaccacccaagggggggtatgctgaagggccacgagaaaggtctccaaacaccccaaagctacagacacttgttccactgcattattttcatagccatatcaggtcgccctgcag

SEQ ID NO: 152482 - DNA, 431 bp, Homo sapiens
ctgcaacaaccaagcagtggtattgtccatgagagctcaaggagtggcccccacactccaggtgccgcccgtgagagcttgagggaggggcccccacactccaggtgccacccatgaaagcttgagggaggggcccccacactccaggtgccacccgtgagagctcgagggaggggtccccacactccaagtgccgctcgctgtgccccgggcatgtgacaggggggacatgagagctcaagaaaggggacagaggctggccccccaaaggccaaggtagatgggagcgcagctgcaggcaggtggggggcactgccttcctgccacagcccacctctaaaatcgctgtcagccagcccctccctgataactctgactggggactgggacccagggaacggaaaccgccaatgaggccctggagctccctg

SEQ ID NO: 152483 - DNA, 266 bp, Homo sapiens
caggaccgatccttcaacctcttcaggagaagagagcgcgctcagcagctctctcgccctctccagcctccaagtgcccttgggcggttcacagagctccggatctggcgctgggaacccgaccaaggcctcctccccattcccccgcccttcctagagagctcccgctccctccgactggagccagccctggggctcccagaacccagggcgcgacaatagcgccgtttgttggcttcggttggaaacttcacccagcgtagcct

SEQ ID NO: 152484 - DNA, 475 bp, Homo sapiens
catctgaagtgtggctcagctttggaggtgaactggttacaagttctgggcttgtgtgtaacatgtctgtggtcgttaccgggctagaggtgagaagtgaagtcacaggaagaggagaggaggagatagtcactggtaatgtggaggaaatgggaggaggtgaggttgtggcaggtaaagacagcagggaagggagagagctgggattttccagagagggagagctttgccatgacatatctccaggacctctgctcatgagagtggtcatctctgagtgtggaaatctctgagtcaaagttgaatgagtctttgcctgggactttgtggtggatgtgtccaaggtaagggtatcctgtgaggtagacccagaaggacctgtttgagagaggttgggcgggactgctgatggattcttggtgagagaagcttctggtgtagttactgagatggtagatatttctaggtctttgag

SEQ ID NO: 152485 - DNA, 425 bp, Homo sapiens
ggagcacactcgagaagccccccaggcgccatataaccactgctacaggcagtgttataatctccatttctcatgagctaaagagactaaggctcagagacgtcaagagacttgcccaaggtcacacagcaactgagtggtagaggtagtcagtccacaccctcccttcttccctctgtgctggcgctcactccctccccaacactcccctgggagcccagcaccagtccttggagtgggatgacgcagcctgcagagaagctttccttccgagcgtctggaagaacccgaggctggcacagcaccatcagcaaataaaaccatgtgacttaaaaaggtgaacgagcggacatgattaaaatacttaacacaaaagcgaattcccgcctggtggcatgttatcagcagctgacaggaatagcctg

SEQ ID NO: 152486 - DNA, 275 bp, Homo sapiens
caggagttgcctgtcacagtaaccaaagttcttgggaattgatgttcacatagaaacagaagattcagacctagaactacataaactagagaaattgaattgagacctccccttcttcataaagctggagcctcagagagctatgccctcagtgaaagggtggacaagaacaatctttaccaatcttgtctgttttgttttctcttaagctctggatgaaaagtaaaggttttcctggggaattcataaccattaggcgtgctgtcacataggtt

SEQ ID NO: 152487 - DNA, 350 bp, Homo sapiens
attagtggcactctaacgctaagcaagtgggcacttacaggtcccccagcttgcccccgcttcactctccctgttaggaggccagaacgatgggggccttccaagtttctaacttgctgacaagcaccgctactaaccaaaatgaaagtctgggtggctctgcctcagaagccgccgcttagaaacccaggggcacacactccactcaagttcagcaggcctaccttccacggtcctgcccaggccgcccgctgtgggttaaagacttgatttacgcacgctctgggggctcagcatggaccaattccagacgtagaacagggccttaaccaggtgcttaagatgcaggg

SEQ ID NO: 152488 - DNA, 285 bp, Homo sapiens
ctctgtttgagtttagccaggtctgtcacttatctggccacaaactgtactcatttatactttttctatctctccctgcattgaactggcacacccagtgcactctcctcaccagctaagcaaccagttgactgatccatagcattgttggttctgtcccaccttccccagcctgtaggctttctttgtcttggtgaccctcaccaaagctattctcaatcattttatctctggcacaactgctttcccctctagaactctgttaactctggtcatggtcctctc

SEQ ID NO: 152489 - DNA, 445 bp, Homo sapiens
ctcaacactgtaacaggaacattaattttaaaaaatctaataactattgaggaaactaatagtagcatacctttccttatatacagcttttaaaatatgattctgagtgaagaacaggcaaaagagcctactctgcctactactctgttgtcctcaggaagccaaaggagtagagagaagaggagatatacaccattatcgcttttgcccatgaaaatggtaggccacctaccattctcatttttgtctattaattttgacattgaaatacattctagatttttaaaagtgagtctttttgaaataatagagaatcagtttgaacacatttgaaatatgtatttcagtgtacactcagaatattttaaatagattataattaaaatccaaaattttaatatatcccaaacttaatagtttataagtcttttataagtcaaacaaa

SEQ ID NO: 152490 - DNA, 248 bp, Homo sapiens
ctaaattataaattttaaaaaagtcaaagaataccatatgattatatgaaactttccattttcatcttctctaaggcatgctgatctctccttttatgtcttttactgcttattccaaaggatgtagtaggtattatcattttctctaatctttttctgcatcatctttataaatccccaagttgtaaatccctgaaggacaggagtcctagtctttcttttttttttctgttttttctaattccagg

SEQ ID NO: 152491 - DNA, 140 bp, Homo sapiens
aaggaatgataacattttgagggacaatagacacatcaagtttttctgccattcagatttacctaattaacaccagcacttacctaatctgaattaggtaaattcagatttacctaacacccaagtaatttaatttacct

SEQ ID NO: 152492 - DNA, 274 bp, Homo sapiens
tctctcctctactcctgtctccaatttaatctccctcacttcccctataggaacacttttctctggccaaaattggtggacttgtccactgtccctctatgaacccacctccgtgcctgatctcacgctcacttaaaaccaggagtatttttttccactttccttcactggacacctgtctcaaatttcactttctccatgaagattggcaatcccagcagcttctatttccacacaaaaagactgcctggaaaagctggggtcttgacacaca

SEQ ID NO: 152493 - DNA, 242 bp, Homo sapiens
tttgggaaaatagtttgcttttataatattagaacagctattaccatgttaagaaaggtttctatcctgactcttctattggtaatgtttgtgggtaggggagaaggaggccacatatggttaaaacaaacaagtgatcctaatactctgctgtccccatcagctggttcttggccagcaagtcagcctagttaatcttggttttttaaccagtacatacttagttgcctttattaagcgta

SEQ ID NO: 152494 - DNA, 287 bp, Homo sapiens
taagctttgactgaatacacaaaggaaagagcaggagggcagagtgtccttggtgaagggagattaagagtctggtgaagcctggttatttaccaaaaacttcatctacttaactccaatgtcaggcctgcaaaaatattttcccttcctatttcctgttgccctggggaaagttgctgttaccatagaaaagggagtctatgtgtgtaacctatgcattcctttctaggggcagacaaaagacacattgtgagtgaatgactttcacagctcttcagctctagacc

SEQ ID NO: 152495 - DNA, 294 bp, Homo sapiens
tgtatttctaggttacagggattaggacgtagatatctttgggtagggttgggggcatttttcagtctaccagagtcttccctttgacccctaaagattcacatctgtcttttgtaaaatacattcagcctatcccaaggtcccacaaactctgaacccattgcaaaatcaactcaaaatccaaaatgtcatctaaatatcatcagcccctaagtcccatttcatcatttaattatctaaagctggtttatgtgacactctgggtatgattcatcctggggcaaaattcctccc

SEQ ID NO: 152496 - DNA, 458 bp, Homo sapiens
aacctggggcctttatccgacatacacgaaaagcttcatcatggacaagagaataaggacctgctgcaaccttggcctgaggtggaggacacggcctaggcagactgcagggtttccagatgtgagactacagggactttgaatgtggctgaagaaataggccttagtttatcctgggtttttaattccgaacttttccaaacatacagagaagttgggtgaatagattgattgcccgtgtatctccacctagaactgttaacatctcacctatgatatttaaggaaccaagtgtaccacctcaaaatatcataagaaaaacacaagggaatttggagattgggaaaaacagaatcaatagagctgcacagtgcagaaaagcaaagaaagattaagatagcaattaacaccacctctgagactgtaaatcaaccagctattaaggctctgattctacg

SEQ ID NO: 152497 - DNA, 293 bp, Homo sapiens
gagaaacaaaaaaagtcacctgtagggggagcccaaatggatttcagcaacatagttctagtaattgcaattaatttagagaagactttcaggtaaagatagcaactgtagattatttttcacggccttaaagttcttacctctccatgtcattaaaagtattttaaaataactagtaattaatttacgtaagtaaaaattttcaataacttattttcttgagttttaattgacaagtttttcagctcagtggaaatatcactttttctgaagatattgttacacaaacactt

SEQ ID NO: 152498 - DNA, 231 bp, Homo sapiens
caaatgggcattcgggggggcctgtgggtggtcccgattctgttcttgggagcgggagtgaaaagcaagcctgtcgtggggaaactggcaccttcactggtggccacgctgctggggctgggcgtgaagctgcctccggcccttggagaggagtgtgagggaagggaggcggcagtgctttttatacacaggagctggaggagggtgatggcagcttggaggaagtcatca

SEQ ID NO: 152499 - DNA, 401 bp, Homo sapiens
gctgctctttgagtcatttcttttccatattgtttctcctactgtagcagggccatggccagggatagaggctgtagctcccactgagacctcggggtctggtggaacccggtcttgtgtgggtgctgtcggcctctcctgctttcccacctgcctcacggttcacttgtgtgcctcaaaggcacacatgtcctagcactccaaagcccaccagggtgggctcccaggggtgaggtcgaggtagaccgggaacccaagagagctggtgggcctttcttctacccctctcccctcacagtctcagagcagccccttcatgggagatgggaagtgagggacaaggtctcagtgtcagagccgtccttgtttgcccttccccgtgcctcttatgaagctcaggc

SEQ ID NO: 152500 - DNA, 305 bp, Homo sapiens
aaagtgattcttcatggtggcctaaaaccaaagactaaggaagaccaccatgatattataagtaacaggtgccattatcaaggtaaattacatttcacatttaagtgttttctaatttataaagcactttcagatgtattatcacatctgactttcacatcagcccagtgagctaaggaacaggactgaatattacatattatagaattattagctgtttcctaatatgtaaaatgagaataaaaataatattattacactacataaatttatacacatacacatatgcatgcacacatgcacac

SEQ ID NO: 152501 - DNA, 406 bp, Homo sapiens
gactggtcagggatgccctgtgtggctgctccaaggactgaaggcatcgatagttcaggcacgactgtaacccatttgttgcataggttacagctggtgggaagccctggtctttggttcggggttagacgactagtggtaaaatctagtcctgtactggtactttgagattttcatcaaaatatgagggaacacagaaacttgtattagatgacacatcaaaagcttccacagagggtgatatacttgatagataatcatgaggaacccaagtctcccttctacttcctacttagctgggcctgcagttgccagctacagaatccagcctaaagggaagataaatgatagaggaagaaggaaccacagtatatatctaataaggtgtgagtatgcctatatgtca

SEQ ID NO: 152502 - DNA, 634 bp, Homo sapiens
ttcaccaggaggcagagctcggagtcccgattttctcctgtagctgtggcctggacatggcggctcctggccctgtgactccagaggtcccctttgaaccatggaagcccccagtcatttaggggtttagctccactgtttacagcaatccagagagtttcaaggaaaaattccttcacaagacccgcgagaaccacatggtacccaggttgcctaggcatggcgaccgccctcacctacggcctctactgcttccaccagggccacagtcagcgctctcagctcatgacacgcacccggatcgctgtccagggcttcacagtcgcagccatcttgctgggtctagtcacaactgctatgaagtctcaatcctgagcccatggtctggccttgaaagctctgcagagatcattccaaaacccaggagcaaccactggccctgccgtgggacttagtccttcctcccctttcagaggccccagtgtcgttgggggtggaagtgatcctttgtgtacccgcaactaaaatactttttcaaaaatcccagattctgttgtttgaatgttacatacctctatttgtgccacatctcttccactcccctgcttaataaactctaatccacttataaaat

SEQ ID NO: 152503 - DNA, 119 bp, Homo sapiens
attagctagaaaccactgaaaataaaaaccttcaggaaaaagttttccttctcttaaccaggaagaaaaggaaataacactaaaattgacaaccttaccagcttcagctatcaaaaggg

SEQ ID NO: 152504 - DNA, 584 bp, Homo sapiens
ccaattgtagaaacacacatccaaaaataaagtgatgattaccgtctttcttttttccattaaaaatcactttaagcttttcttatcaacttaattatttacatgcacattgactaaatcttaacaagctcttaaatgctagttgccctgttgcctctcagcactagccttcccagtgccacacacgtgccatttgcctttgtgctctgtgacaccaccatctgggtgtctggtccaacaagcgccttcttgaaaaccttacataactccccttttcctgtgccatgggcttcacctcaccatatctaatgggagctctggcctggactctaggaatgtcattccagataggcctgacgggtctcactgcccattaacatgagctcccccttccctgctgggaagccagaatgccgtgtcttcctggcacgtccacgtcctgccaattcaggagacaaaaccattagtctaccatgagaaatctggttttctctccatggccagaaaaccttcagttttcagtaccagtaaagcctacccttctaaaacatgcttacactgaacatcaataaactctttgataa

SEQ ID NO: 152505 - DNA, 382 bp, Homo sapiens
cgaatgactttgatgaagatctaagaggcttgctttaaaatccatggattaattgaaaagggatagctgttagaaataggtaacaatttagagttaacatggtttttaagtgggctgcaatgctgtgctgaaagcaaaaaaatattttatagtagtaaatgcatcataattcattggtatggaagtatggagatgactttgtatggtggcagttctttaggaaaatgaaggttaatatgaaccagtggcatgatatggttgcaaaagaaaaaaaaattagttaggttctggtagtagtatagtgtccatatgtcacaaaaattaatagtaccctgctctaatcaaccacatctgtagtattgtgtccatttctggctgtcac

SEQ ID NO: 152506 - DNA, 400 bp, Homo sapiens
gtgtactgtgactatctcccattctttgatttgcctattaattttattactgatgttgtaaactaagaataaaatcctaagtcccccgccgactgaacgagctccctcttggtcaaggggaccccagagaaaccttaaaaattgagtttccggccataaaaggatgggaggttggacacacctggttatactgccaccctttttcagtttagacacaactgaccaacattagtgttaaagtggagatcacgagactgacagactctgcggcaataagacgccgagttataatcaggacctaaggccgtgccaggccggggttaagtcacacacccttacagttaaagaataaggcttgggttttcttttcctctagcagttaagcaggcactggcctgag

SEQ ID NO: 152507 - DNA, 375 bp, Homo sapiens
ttcattcattcaacaaatccgtgtgagtattctgcctctggattcacagccaggacagaatgtagttcccaaatacctgccccaagcccacagacatgtatccccagcatatatgggccaggatgtctctgtattctcgaagttctctcacagctaagaccttcctaaactgcatttttaccagcctcctccacctgcttctcatctccctgaaaaggcttcactagactctgagacctacaagagatccttccgagacactccctctctcctttcagctgcatctaagatggatccacactgggcgcttttgggtctaagaccatcccctatattgtgagggtacaaggtttccatggtgaaggaggcattctg

SEQ ID NO: 152508 - DNA, 323 bp, Homo sapiens
atagaagctagccagctggggtaagagatggggatgagtcagaaagcaacaagtacaagagcactgagacagagagagctttgtatgttcaaggaaaaggggaaggccatagaagctatggctggtgtgctatgtggacagtgcctcaggaccagagagacagcaaaggacccagattatcaggaagacatggaagcaatttgaggaaagcaaagatgtcagacagatgcagaaatctaccaagagatcagcattgccagctggtgtcctttcaacatgggcaagtgatcatgtatttgaagagtaaaaaagaaggttttgag

SEQ ID NO: 152509 - DNA, 1189 bp, Homo sapiens
atctcagctcactgcaacctccgcctcccaggttcaagcagttctcctgcctcagcctcccaagtagctgggattacaggtgcccgtcaccacgcctggctaatttttgtatttttaatacagacagggtttcaccatgttggccaggatggtcttgatctcttgacctcgtgatcctcccacctcggcctcccagagtgctgggattacagatatgagccactgcgcccagctgcaagatgtatttctatcagtattctacaaaacgatttcctatgtctcttcttgactgatttcttctcctcggtccttcaatgaacaagcctactgtaggaaaaggaatgttgtccactttataatgagatcatttgaggatatgacttagaaacttgagggagaattgaaagatttgggttctatcccattactggtttgaataaagtagtttgaaaggaaaaggttcactgttgtcttgttcagtgttgtctggtaattgagagaggtgccttcgagtctgcagagagtcttcagctttcggaagttaatgaagccgtgaaggttgatagccataggggcccacgtgaaaggcatttacataaaatattcactttaggtaattaatttattcaacaaatatgtacattgaatgcctattgtatgtcaggagactgagaccttactgttgaaagaagagagaacatttagaaaacagatgaagagaccaccagtgaataatagttccctgttgactaaaacgaattcaacagccagtagcagggaaatatggtctttcaaggcatcagaaactcatttacaaaaattatagagctgccaggaaaaaggctgcacaacaaaaatagttgagtaaactagaaacatacactgggaagagagtatgggggcaagttgttagctggatagataggactgtgctttgacacctctgtggtctatgatctctgaacctggaatagggttcattttaatagcgataaagtcattatcccagtgcatccaaattgattagttcatgctttattaggaaacagaagttacccaaaacttagcaaacctaagtaccaagtatccaaaacattcttttcctacacaatgtttggggtattgtcaaagttggattgattcaccagccagtcttaattggctactacggttcagcctgttttctcct

SEQ ID NO: 152510 - DNA, 502 bp, Homo sapiens
acttccaactatgtggtcaattttggaataggtgtggtgtggtgctgaaaagaatgtatattctgttgatttggggtggagagttctgtaggtgtctattaggtccgcttggtgcagagctgagttcaattcctggatatccttgttaactttctgtctcgttgatctgtctaatgttgacagtggagtgttaaagtctcccattattattgtgtgggagtctaagtctctttgtatgtcactaaggacttgctttatgaatctgggtgctcctgtattgggtgcatatatatttaggatagttggctcgtcttgttgaattgatccctttaccattatgtaatggccttctttgtctcttaacatactgttattaaccaagccactggatcaacaattcttggctgactcattccaggcacctctccttccttcgtctcatgtctgagagtccccagaagacagggttgaggacacagggaaaagatcttccagatattca

SEQ ID NO: 152511 - DNA, 143 bp, Homo sapiens
ctttggacttcatcacagctggggccttttgtgtcacttaagatctaaacttgtaaccatgctagatgtgtttctaatgtgacaacatcacgaaccacgagtccagaagcctaatccttaatcctacctcctcatgatgaagt

SEQ ID NO: 152512 - DNA, 206 bp, Homo sapiens
gggaacagatattttagcataagaacttagcataagaacaaactaaaatgattagtattccaaaggtacaaaatcatatttggccaaaatccttcaaaagccaacgtaccactactacagacagatctgggtgacgatgcgtgcttattgcaacagtgaacttctggaccttagaatgtgccctgtatgtaacagcagacgctgaa

SEQ ID NO: 152513 - DNA, 226 bp, Homo sapiens
accataatcactacttctaccatcaccaccactacagtcagcaccctgattaaccagtagagctattgcaaaaggagatcaaatagttacagtatacttcatagctattggaggcatgtgttaacacaccagatattaataatgttccaaaagaacagtttaagtaaattttaaaaattagtgaataacagaagataatcaagtatccattaagtatcaataaaca

SEQ ID NO: 152514 - DNA, 398 bp, Homo sapiens
gggctgcagccttcgggatctgctgggtcacagtgggtgttaccctaacaagtttcctagagggatgttcattagaaaaataatttattttatggtataaaaattagcaatgacaggctgggcacggtggctcccgcctgtaatcctagcactttgggaggccaaggcgggcagatcaccttgaggtcaggagtttgagaccagcctggccaacatggtgaaaccccttctctactaaaaatccaaaaattagcccagcatggtggtgcacgcccgcagtcccagctactcgggaggctgaggcaggagaatctcttgagcctgtgaagtggaggttgcagtgagccgagatcgcgccattgcgctccagcctgggcaacagagcgagactccgtctc

SEQ ID NO: 152515 - DNA, 459 bp, Homo sapiens
tccggttacacactgcacatggttggttggtttctttctttctttttctttctttcttcttttctttagagatggagtctcactctgtcacccaggctggagtgcagtggcgcaatcttagctcactgcaacctctgcctcctagattcaagtgattctcctgcctcagcctcccaagtagctgggattacaggcacacgccatcatgcctgggctaattttttgtattttttgctttatgtaaaatgtcaatggtttgctgactctttaatcttaaaattattttacatttgaaccttgcctctagccccaaatatttaagtactttgaatacacatgaataattttagttgaccattaacaggtgtgggtgccaacatttcttaacctactgtgttattttaatttattttgagagatggggtcttgttctgttgcccaggctggagtgcagtggtg

SEQ ID NO: 152516 - DNA, 1056 bp, Homo sapiens
ggtgtgacttttttctttgaaactaatattcaccaattataacatatgcacttgtcaatctataatataccgaacaaataccatgtgtatatttttaaaggagctaatttgaggctttatgtctgtcaagaacaagcaagtaatgttagtggtgtttgatttttgttttgttcatgtcactacaatacatactgttttactcccagctttcacttcgtccaagtatttcatccttttgagtgtgtctttacagttcatcagacagctgaatgtagaggtgtaaagatttatactggaaagatttcatgtaataacggctgatggcatttgtgaaactgtccccagagaagtggtgtgtgcgcacagcaccctcctgcctcctctccaaacacaaaattcttttttccaaaggagttgatttcactctttctttgcttagcagtgggcattcagtatgtgcaggttttaaaatattcctttttctgcagctgttatccccaccttgtctagtgaacttcaacaaaaacccaaggcaggtactgtccacatcaacaggacttagtataaggtgtcagtcaccttatatcagtagttgtcccatcagtgttcataagatcattctgatctagttgccagatgcctgtagtttctctccttagagcatggcttggataaatgcaaattagatgaatatagttgttgcatccctgctcctgctgaatggggggagggcaggggctacaaagtgcttcccagcactgtccttctaggcgacccatgtgcatggtggatcataatggaaagtaaatggaaaatgtcatttatctacttactcaaccggcagagctctggtaagtgtttttaatggttagtatttgaagaataataagacctgtaatggaaacggaagaggatgtcttcaattaatttttgttctgtgactgtgccttctgaatggtaggacagatggacaaaatcaaggcataggggaaaaatagctgaaaggtatttagagggcttttcaaagagattcatgaagaaacaaaaagatgtgct

SEQ ID NO: 152517 - DNA, 349 bp, Homo sapiens
gactcggaccgggttactagaagataagaggcagtgagaagaggtgatgagtctttctttttttagagttagtctactttgtgttccctgctagtgagtctgtgcctatgggcttacatatggacataagtttgtgtaagaattatattttgttctatcctaagtggcagctctcaaaccttttcagccagggaccctttttagcatcgccaatccttctggcttgagaattttctatgtgtttctttagtcaggatttttttcccattctccactacccacattaagaaatagaaatagaaaactccctgtgctgtattattctctgagcccctcattttcatgcatc

SEQ ID NO: 152518 - DNA, 492 bp, Homo sapiens
ccactgcgcctggctgttagcagtatagtttcttaaacttttacaaagtatcctctagaacctctagcctccacattagccattatctgaaatgatcatctctagaacctaatttgtgtcctggttatcagagaatttctctcagactgtgggtgctacaaggacaaggaacatatcttacttttcatctctatagccctaatgcttagtatcccatcatataggacaggctcaaaatgcactttagacagatgtgtgaatgcgactgaatacttcagtttcataaaaacgtgaactgagtgagatgtttgccccattttctccttttctcaaagatccaagaggaaagtacttggaagaaaagattccggggacatgtctgttcgaagcaaatcgagagctcccctcagcagtagcagcagcagcgccagttccatcacttcacccagcagtaatgtgacaacccccaacagccagaggtctcctggtctc

SEQ ID NO: 152519 - DNA, 453 bp, Homo sapiens
gaaggctaggtcagcagctgccaggcaggaaaggtagtcacataaggttcatgtgaatcctgttgcttcagactgtcccagtgagaggccatcatgcctcttaatcacatgggcaatgactaggagggtagggggaggaggttctcagcaaaaataaccatcaaaccttttaaaacacagatgctgaagatagccacatactacttgtatttcaaacataaagtcggggcctgtcgcatggaagggtagacacgagtagatgtgtcagtcaagtttctgtgtaacaaccaaagtaggccagggctccccagcctttccttttcagggcagtaatggaaaatagtacagttttccatatgttgggtaaactaaaggcaatggtgagggcatctgtgttgaacttagtgaaaaaaaaatcatttctttatattacatgattaaaagaaaactaaa

SEQ ID NO: 152520 - DNA, 560 bp, Homo sapiens
cctcactgctggggggcctgcaggtctgggtgcaccttgttacccaggctagccttcctctgcagaggtgtgaactctgccaccaccccgttctagtcaagatgggaatggaatctcagaaaggaagccatctaggagaaaaatgaaagaagtgtttctcttatgtttgctgccgtcaaagttgctactttaggagctcagaaaaacagttatttgtaagatggattaagtaagtagtttagtaagattgcccaaaaccacctcccagagttagtgggaagcgcctgatgctggggagaaaagcccgaggcctgagctggccgacctgcattcagtttcctctgtctctagcttctctctgatggtttagaaatggtactaagggattcctaagtcccttttgcttcctgtggtcaaccaacatgctaggctaataaattactcctgaagttcactttcattttggcaacattttctggttctttcgccaactctaatttcttttctttaaaagatgctttaattttacttgtattcttaataatatatcttatatatac

SEQ ID NO: 152521 - DNA, 408 bp, Homo sapiens
taatttgtatactgtctccttattttgaggatcgcctcatttatatttggcttagtttcttctcatacttgatttcttctacgcttcctccaaaagattatactattttatctttcgatctgtgatgccatcttaggatattaaatagatttcaatattatttcattatatttgttgtattagttttttagggctaccataagaaagcataccacaaacaggctggcttaagacaacagaaatttgttctctcatagtactgaagaccagaagcccaaaattagattgttggcagggccacactctctgtgaaggctctggggaaaaattatttcttgtctccttcctaatttctggttattgatggtcattcttattatttattgacttgtagctgtatcattctgg

SEQ ID NO: 152522 - DNA, 435 bp, Homo sapiens
ttattttcagctgcccaacattcgcgaatcaccttctatgtgacctctgttttgtcagtacctctttttagcacgtggatgggaattgagcacagcaccctccagtgcagtctctgccgtttgtccatgttatcactcttttctcatctgcaaccaaatggaaactcccagtcctgctgcatcacagatttatttgtaccattagctttttgaacctaaaagctacactttatatggatccttgttcaactccatcttttcagttttggcccagtattgcattctgttgagaactttaaaaataatgacgtatacctataaagtttactttcaatgtcctcagcctttcaaaaaaaatgaagaggaaaattgcataaaatcccatgcagaaagtattctgtgtatccgtaatatttcatttctttttgacttgac

SEQ ID NO: 152523 - DNA, 239 bp, Homo sapiens
tgagaggctggggtagagctgtggaaatgtttgagggactattttaagaatgtgtaatattcaacttaaaattgttttcttctttccaacttaggtcccgcagaagaagggtgggaagaagaagggggccattcagccatcaatgaggtggtgacaccatcaacattcccaagcacatcccattgaaacggacttcaggaagtgtgcccctcgggcactcagcaaagatatctggaaat

SEQ ID NO: 152524 - DNA, 442 bp, Homo sapiens
cagaccaatcaggcaagagggaaaaaaagaaaaggcatccaaattagaaaagaggaagtcaaactgtccccctttgctgatgatatgatcttatatttagaaaaacctagactccaccaaaaaacttagttctgctaaataaattcagtaaagttgcaggacaaaatcaacacacataaatcaatatgcatccacctgtgaagtagggagtgttaagatgttagatgaaatgttctgtaaatgtctgttaggtctatttggtctgatatgcagtttaaatccagtgtggctttcttaatttttgtatctacatgatccatttaatgctcacagtggggtgctggtgtccctaactattatcgtagtggaatctatctctccttacagatctaataatacttgctttatatatctgggtgctacagtgttgggtgccttatat

SEQ ID NO: 152525 - DNA, 436 bp, Homo sapiens
tgagggtgggggcagggatgccgcagagagtcactgaagaaagcctgaagagagtcctcatcctctttttctacttcccttttctcaaggacatcagctagacctaactataggaggtaggatcaaaccataggtagcatgagatactgtgatcagacttcagggagcactgtttgctagcaaggtaaccaggggaggagagcaataatagtctgtgttgcaggtcttaaaaagaggggaaatggggaaatgaatgaatgacctccgggtcccctgccatggcttaaaggtggctggtgggggtcttagaagacctattatgaatgagagctgatgatttcaggaatctctaaaacatcagcttgagcatgttatacctggtgactcatgggttctgtcaatgttccatatatcccatgctattttatgccttttc

SEQ ID NO: 152526 - DNA, 568 bp, Homo sapiens
taggatgctgtgcgtttaaactgtaaaccgcttgctcttacaggcttgccactctgctgttcttaagtcttcctacttcaggggtcttcaacccacaggccacagactggtactactccatgacctgttagaaaccaggccgcatgagcagtgaggaagcctcatctgtatttacagccactccccattgctcacattactgtctgggctccacctcctgtcagatcaatggtggtattagattctcataggaacgagaatcctattgtgaactgcacatgtgagggggctaggttgtgtgctccttagaagaatctaatgcctgatgatccgaggtggagctgaggtggtgatgctagagctgaggtggtgatgctagcactggggagtggctgcaaatacagattaacattagcaaagaggtttgactttacagagatgataataaatcaattgcttgcagactcatcaacccctatctgtgagtggcaagtgacaagctgcatctggtggcaggctttatagtggcaagtgagttggtgtacttcagttgtacagctgtatctgg

SEQ ID NO: 152527 - DNA, 221 bp, Homo sapiens
gggaagcaggtcagaggctcctgccacctgcccgttgacctcaggaggacattgtgcttgcagcagctgagtggcctgggaagcctgcctggaacctgggactgtgatgggtggagtctccaggagggctagggaggcggggaggagcaccctgtgagctgcaggcaccgctgtgttgcagtcagcaaacactggggtctgggaacccactttcatgtttg

SEQ ID NO: 152528 - DNA, 166 bp, Homo sapiens
caggtccagggataagagcccagaaggaaacctgagtccttcagcagtgctgctcaaggtcgccaatgacccgctgagcctgtgacccagggcccaggagcaccagccaccttcctgttcccgtcgcagctccgccaagcctcccaaccctgcctgccttggtgcc

SEQ ID NO: 152529 - DNA, 445 bp, Homo sapiens
ctccatctcaaaaaaaaaaaaaaaaaaaatgaaaccagtagtcaaattactatttggtaatacatttttgacatgaacttgcagctcccttggtaagtctgttgaagagtaaatgaagttttactacctcaggaaaaacatagttgtaattttatttaaatatcaaggttgctataataaaattcctttcagaatcatgagtttaatatgaaacactaagatttgaagagtttcattctggggataaatggtgaggcatttaggttaaacgtttaataaaggctaagagagaagaacattcgcaggtgtaatagtttgctttccacttggaaagaattagttttattctagaagttatattttagagccatctgaatagatgagtagctaatttatagttggaaattagggatcaggagttgggatagtgggtagacacattttc

SEQ ID NO: 152530 - DNA, 283 bp, Homo sapiens
taagctcctctctgggtgtccacctgtagggacctcaaattagaacgtcagctcctcccagagtcttcagctgcatgaccctcaatctttaacatcagctcctctccgggttgcagcttggtgacttctctgaatagaccttcgagggcactggggggtgattgttggagggcttggggagctcaggcagcacttgtgtgggaacgtggctgttacaggaactgcagaaactgggactgggttcctggggaaaggattgggggtgttggaggcgctggcaggg

SEQ ID NO: 152531 - DNA, 180 bp, Homo sapiens
cagcaatagtaatttgggattgtttctaatgcctgtatgagacccacatagggcctcataaaaagagggagtgggtctagggactcagtaaatgcttaacacttagtttcaaacctctttcttgggggctactttgcttttttatgccaaattttcaatgttatatatagcaatgttttg

SEQ ID NO: 152532 - DNA, 468 bp, Homo sapiens
tctactaaaatagccctgaaccctatacataaacctaaaaaataatagttgctcaataaatatttattgaatgaaaggatgaaccgttctactttctccttaactataactctgtattatctgtcctgaatgagattagatttcatgctcaaagataagtattggtttatctcagaactaaacttccttgctcagccctccttttgtcacacctgcatggcatgactgcaaataagcatggcttagtgctgtttaagaacacattccaacacattgacaggggtacgatataaatacattttgaacgtccatagatctttcaccactgcccctagaaatcctattttgtcttcttactcagctcacacagccattctctaccagaaaactgtcaaaccatttccacaaatcattccacctcctgaactttatcctcagtatctagcttcatctcacaacacaaaaagt

SEQ ID NO: 152533 - DNA, 245 bp, Homo sapiens
aagctaatagcctaaagtgggaagcagctaccatggggggagagcttgcctgtgagtgatgctatatgcatttgtgtgagacatacagaatgatggatgagaattatttctgtgtacttggatccagctgtgcatgctctaaaaaaacttactcgagccgataattaccttttttgctcaagcccatttaagttgggtttttattacctggaaccaaaagttttgactgacgctgtttttttttg

SEQ ID NO: 152534 - DNA, 421 bp, Homo sapiens
aacgggtgatgcggttggcattcatttctcccctttcccaactgtagggatctttatctgggatctgccagaagggctggggaaccccagcttatgtttagtttatagctcattcaggagatgaacccggatagctggaatataaagagggccacagaaagataagcacccccttcacttccagaatatcctggcctttaggaaaggtggctttggcctggcttgccccaggacatgcagtgacagcccacagtcatgcctcctgcaaacattgaactgtaggcttgcactggcctacagaacaggaccgggatcttctgatcccgcagccctgcaatcgcctcttccctgccgctagagaatggccaagcagggtcttgtggggggagcactgtgttggagatcctggctttggtcaagt

SEQ ID NO: 152535 - DNA, 137 bp, Homo sapiens
attgtctagttactttgttgttctgattgcaacgttctgtgattggattagctgcaaaaggtatagcaagcctctaaggaccatcatcttgctatcattttataccttctttcttgaagtcctttttatccaaaacg

SEQ ID NO: 152536 - DNA, 488 bp, Homo sapiens
ccaaccccaccccttcccataagggaaattcattcattcttgttacatagccgcttgggggtgggggtggaaggaatactacataacctttgaactaatgcgcaactaacatgccattaaaaacaaacaaaaatcaaccagtctcctttcaaataaattttcccaagtaagacttcagcttataacaatccagtttcttgttttatttattatctgcttccagttatcttactcctggtgggaaataaaatttattgtgcattaaaatgacacatttggagaaaagaggctggaaaatgactttttgctctaagtagctaagcagtgctcaaatacattcacagggatatctggttaaccctgaacaaattaccaatatttaatgggacagtttgagaactgtctacaaatatcttcaaaacatttccatataatgaactgcaagtccaagctttcagagaagaaaaaggtaacaccacacaagattc

SEQ ID NO: 152537 - DNA, 250 bp, Homo sapiens
caggcgtgagtcactgtgcccggcctccatgcccacttttaggggaaaagtttagaagatggagacaaaaccaactatccttctgctatctcttagattttcatctctttctattctgtagcctacaatcgtaatgtagaccaagattaggctgaagaataaaatattccttaatgtatctaatatttttatagtattgaactgtaaccccataatgaatttttttggggaaagtcagattatttggtta

SEQ ID NO: 152538 - DNA, 505 bp, Homo sapiens
cctcctgcctcagcctcccaaagtgctggaattacaggctttagccactgcacccctctgactatgtttcccgttgtgtgttaattatggtcagtgtgaggcccaccctagcctcccaaagtactgggattacaggcgtgagccaccacacccggtggatgtagaattttatcaaatgcttttctagcatcgattgaaataatcatatggtttttgtccttcattctgctgatacgattttatcacattgattggtttgtataagttgaaccatccttgcctctctgggataaatcccacttggtcctgatgaatgatctttttaatgtattgttgaattcagtttgctagtattatcctccttattgaggatttttgcatcaatgttcatcagggatattggcctatttttgttttttcgatgtgtctttgcctagttttggtatcagggtaaaactggcctagtagaatcagtttggaagtattctctccatgtctgttcaga

SEQ ID NO: 152539 - DNA, 282 bp, Homo sapiens
aactgtcattgctggggacctaccctcacagcccaatgttgaatcatgaaaggattcacactttgaagtgtgacaagtatgatactgtcaatagccctcttgtgaaaaatagcactgtttcctcaaagtcaatccaatgtgacacacttggagctaaatctctgaccctatgtgattaaaacagaatttcaaagccacacacatatcctgcttcttggtattttttggttctgccccttgctggatagaaataaatttaatccttgcattagtttcatctag

SEQ ID NO: 152540 - DNA, 304 bp, Homo sapiens
aagtgaaaagccagaaggaggtctgaccggtcagtttgaaacgctgtcttctctgccctgtatgaccttgaagtaggcttcctgcctatgtgaatttgtgacattgtgtaagaataaacaataatattgagcatttccggtgcattttgtggtatgtgctgtcctggtgttttatttaacctgcccagcagctctgtgaggcaggtggaattatagtcctcattttcaaagagtggaagctgggacttagagaggtcaagtaaattcgggtcacacaaccagcaaatggcagaacatgaatata

SEQ ID NO: 152541 - DNA, 461 bp, Homo sapiens
ggctggtgtcagccggtgctgttcaacaactcctaaatacagaatgctgcggttgctgagcctgtgggatctcacattgttagaaggtggttctgctcttagtaactgaggggggcctcctgggtcctgcctactgactccactttctgcctttggagttaaaagaagcctattttattctacacagctgcccttcatgtttttcaaacagataacatcctttccaaggcttctcccagctaaataaatgtccaatcccctctttctcttgtaacagaccccttactactctctctgtcctatgagtactcactagtttgtcaatgaccttcttagtgtgcagtgctcagggttagatacagttactttgatggattggaatgaggaagataaagcttaatagaaacgttaaatgcttcatttagattaaaaatatttgacaatgtaattaccacattccc

SEQ ID NO: 152542 - DNA, 501 bp, Homo sapiens
atagttgagaagcttaatctagactttggttttatttgtgtataattcatattcatcagtggtgtaatgaatcacaaaagtagcattgtgaatatacatcctgtctttgataggaaaaagcgaaagcactaggtaatttcatcctaattaacccaggcttaggtcaactgctgctatgtatctggagagcaggaaaagggcagagtgaaatgatctctacaaagcaggacaaatctaatactgtcaggatgggtcactagactcgtgttcctggagttacaggtggaaagtagtagcttctttttatagaccactaaatgcctacttactaaaatctgccaggaaaggaaaaatcttgtctgacaaattattttaaaatgtggattgatcctggagaagacagaaagccacactaaaagtataatttgtcagtatcatctagcacagcagttttcaaactatgatctcaggactcctttacaatcttaaaaaattttcaag

SEQ ID NO: 152543 - DNA, 352 bp, Homo sapiens
agaggcaggtggatcatttgaggtcaggagttcaagaccagcctggccaacatggtaaaaccccatctctactaaaaatacaaaaattaacagggtggtagtggcgcacgcctgtaatcccagctatctataggctgaggcaggagaatcgcttgagactgggaggtggaggttgaggtgagccgagatcgtgccactgcactccagcctaggctagagagtgagacctctcaaaaacaaacaaaaaaactggaaataggtaaatttctttttctgtacagagaacttctttctatgttaaaggtagaatttcctattaaacagataggttactgtattaaagttttctgat

SEQ ID NO: 152544 - DNA, 417 bp, Homo sapiens
aaggtcaaatgttaactgtgttactaggcaacattatggcataaatgactgctgattggtcaactgtttctgggctggaagagtgataaatgcctggtaggaagctgtatcattggacttctgtgactgtagtgaaacttgtgattcagcatgctccttgacacatcaaagattgatctattgagttactggagatattggttcctttgaggcacaaggcttttaagccagggtaagttctgaacctacctaaagtagatcactttccttgcactggagatgatttggggaggagaggctcaggaggacagcagtgtggacggctacatggacagttgtgaagattttcctaaaggggaaaggctgatgttgccttgctggtgactctaatctgtgtatttctgaagtgattctggt

SEQ ID NO: 152545 - DNA, 296 bp, Homo sapiens
catcactttttgtgtgatcttatgatctacctctcagtgcctctgtttacttatctgaaaatgatgacattagtaagatctaacccacaggactactgcgaggattaaatgacacaatgtaaataacatacttagcaggtgccaggcacacagggagtgttcagtaagcattagctattattatgaatactatcattgctactaagtctatagggtctatgttgccccaagtgcaccagctataggcttcttgggccagagtgactggtgcaagattaactcgtttgtcctctgct

SEQ ID NO: 152546 - DNA, 720 bp, Homo sapiens
tggagacagagtttcgctcttgttgcccaggctgaagtgcaatggagtgatcttggctcactctaaactccgcctcccgcgttcatgccattctcctgcctcagcctcccaagtagctgggattacaggcatgcggcaccacaccaggataattttgtatttttagtagaggcagggtttttccatgttggtcaggctggtctcgaactcccaacctcaggtgatccgcccgcctcagcctctcaaagtgctgggattacaggcgtgagccactgcacctggctgctttgttcccaatcttaaagaaaacatttcagtcttccaaggattggttttgagctgaagctgctctccttggcttgcagatggctgcccccttgctgccttgtcacatgattggccctctgtccacttgtagctctcggtgctttgcatgtccagatttcttcttataaggtcaccagtcatattggactagggcccaccctaacggcctcattttgacttaatttcttctttaacggctttgtctcctaatacagtaacattctgcagctctggggattgggacttcaacatgtgaattcgagggaacaaaatacagcccataacaatgaagaaatggatccatgaagggatggaaaggagggctcacatgcagctctgaggggaaacgaggaggccatgaccacattttctcctaaaaataaataaataaat

SEQ ID NO: 152547 - DNA, 406 bp, Homo sapiens
ccttcctggaaggctcttccttctgaaccccacagcgctggttccctctcctcatttcagtctcagctcaactgtcacctccttaaaaactgctggacgccaggagcccagtccgcatcacacggccttgcttttttgtctctactgttcaatttttcagccaagttcaaatacaagaagcctcttatggccaggcacagtggctcacatctataatctcagctacttgagaggctgaggcaggaggattgcttgagcccaggagtttgaggctgcactccagcctggacaagagagcgagacttcatctcgttttttattatgaattacccatcccccagtctcagacatatacacaaacacatgcacacacgtccaaaaaaactgcagagatcttagtagaaat

SEQ ID NO: 152548 - DNA, 407 bp, Homo sapiens
tgggaagggagaggactggattagaaaggaggcagttaatggaaaatgaagagggaggggagaggtgagttacacgctgctccccagggcagtgacttccgagctaacagcaggtggagttgccctcctccctcgctgttggtggggttcgcttagggacggagggagaaggaggctggcagagggcatagccccacttcccaaccctgatttgagttatcttccccagggggcctttctccctatctgtcctccaagccccagcagtgtgatcatcagaagaaagcactggaagctcttggaaacgctggagtccacttcaggacaatttgttttcctttcttttttttcttgtcactgactcgaagctcatcaagacaatttctaagcagcttcttaggttaatg

SEQ ID NO: 152549 - DNA, 602 bp, Homo sapiens
tggattcaagtgattctcctgcctcagcctctggagtagctggaattatagacgtgtaccactgtgcccagctatcattatataacatttttgacatcttattttactgtttgcttctgcctactcttgtttatcttctattccctttattatctgttttacttttttttttttcttttgatctttgtgtttcataggcttcctcgagcaatagatgatccttggttgtctccccacttgaatgaggcaatacagttctgatggaagattctgtgcttctgtgtggggcctgttaattgttgggcattgctttagatcagggattggcaaactggcccatgaactaaatacagtcaactgtatggttttgtatgacctgtgagccaagaatgatttttatattttaaatagttgggaaaaaagaatattttgtgacacatgaaaattattagaggccaggcagggtggcttacgcctgtaatcccagcactttggaaggccaaagtggacagatcacctgaggtcaggagttggagacaagcctcgccaatgtggtgaaacctcatctctactaaaaatacaaaaaaaaattcgctgggtgt

SEQ ID NO: 152550 - DNA, 493 bp, Homo sapiens
tggattcaagtgattctcctgcctcagcctctggagtagctggaattatagacgtgtaccactgtgcccagctatcattatataacatttttgacatcttattttactgtttgcttctgcctactcttgtttatcttctattccctttattatctgttttacttttttttttttcttttgatctttgtgtttcataggcttcctcgagcaatagatgatccttggttgtctccccacttgaatgaggcaatacagttctgatggaagattctgtgcttctgtgtggggcctgttaattgttgggcattgctttagatcagggattggcaaactggcccatgaactaaatacagtcaactgtatggttttgtatgacctgtgagccaagaatgatttttatattttaaatagttgggaaaaaagaatattttgtgacacaaaatattcttttttcccaactatttaaaatataaaatcattcattggctcagca

SEQ ID NO: 152551 - DNA, 434 bp, Homo sapiens
acaaagaagaagaagtagtagaagtagtagtagagggaagagggaagaagaggaggaggaagaagaagaagaggaggaggaggaagaggaagaagaagaggaggaagaggaagaggaagaagaggaggaggaggaagaagaggaagaagaggaggaagaggaggaggaggaagaagaagaaaaaagaagaagaaggcggcaaataatacatgtctccttttactactgtgatcacaattccatagagaattgcctggtatagcaggaactcaataaatgtgtgttgaataaatgaatgaaggaagtcggagtgactcaagagttgatacagagaagccttcttttcccaaatgatatgaaatcattcaccttcatggcttttaaatactaccaatatataatgttgcccaaatttgtgtctctgtctctgatgt

SEQ ID NO: 152552 - DNA, 621 bp, Homo sapiens
gaaggtgaactcccgaggagcagagatcacatgtaattctgctcttacttatcaggatgaagaaagctgtgcaacaagtttggctgagttattttagaagagatacatattttctaaatgagatttggataacagcctacgtctaatcctctggtgactgaagatgcaaagaattgtcagagcagtttggctcatcaagctataaagtacaaaattattatgacactcagttggcacatgtgaaaccaaccgaactaaacccttaatcctgtgtagtccctcaaacaggatctgtttctaagaggcaagcagcagttttgtggattatatatatgttacatgattggagtgagttaaaagtaaaataatatgaaggccagtatcagcaacccattgctttgtttttatttagtttttggtaatttcatggcttgaatattactttccacttctgtctactcatacataggaagctattttaatgttgctaagattaaatattgatgcttatgtagtgagcaatgatggcttttaagacctgaatttatgttaattttgatacatccaattatcatgcatgtaatagtaagtaccattgttcttttgctcaaactatttata

SEQ ID NO: 152553 - DNA, 461 bp, Homo sapiens
ttttgttgctattgttttaattcattttctgattggttgctattgtgttggaaagttattgagtatatattgattatatattcaatctcctgaatgtcttatgacgttctgtttttttggttcattctgtttaattttttaggtgatgtttcatatcattcatgcgtatatttgctttgcatctttcttgtctattttctgcatttttttttctggtctaattacattgtctaggattacaatgtttgttcctatttttaattgcaaaggtttttatgtctttaccatttagtgtcacgtctgttggagatttctttcgtctattctgcatgtcagtttaaggatgtctctattcctggattgttaagagtgtgcacaaaaagaagatatagttatttaattttaagagaataccaatactgtaaatagctttatgccaataaatatgaaaagctggatga

SEQ ID NO: 152554 - DNA, 612 bp, Homo sapiens
gccactgcacctggccaaaacttttaaattatggtaaagtctaatttattatttttttcctttaaggatcatgattttgatctcatgattaaaaactctttgcttaacccaaggtcatgcatattttgtgtgtattttcttctgaaaggtttatagctttacatataggtcaagggtccactttgggtggattttcacatgaagtgtgaggtggaggttgtgggtctgttgctcatgggcggcgaattgtcccaacagctgcagacacaactcttctccttctgatttcctctcatgtttgttcatacaccatagacagaccgtgactgtattttgagtgagtttgcaaaaatatggccagtttgttagaacttgacccaccatctgctcacttatcagtttcagggtttttttgtttagtttttttagtgacaaggtttcgctctgtcgcccaggctggagtgcagtggcgcgatctcgactcactgcaagctccgcctcccgggttcacgccattctcctgcctcagcctcccgtgtagctgggactacaggtgcgcgccaccatgcacagctaatttttgtatttttagtagagacggtgtttcaccgt

SEQ ID NO: 152555 - DNA, 389 bp, Homo sapiens
gggaacctgtttaagattttctatcatctggtgtcagcctgtatttccccttgcagacaaaaagtgatgtccctcaggtaccctatttccctctggaatctaccagcttacgttttttatgaatgttcaaagatgtcccaaacatttataatgtgcagatttaccagaattttcattcatgaatgtttactggttttattttgtaggtagtttagagaaagtactcactggtaatcatcttgacccctaagggcacctttccgttttttatctccacatctttgatcatctcttttgttctaggctgccagaaatgccatccttgtctacccacatttttaagactcaacgaaaatcccaccattgtgacaaaggcttctcacagtacc

SEQ ID NO: 152556 - DNA, 188 bp, Homo sapiens
cattgaaataagatgaataagaaagaaaggaaagctcttccttatacgtagaaagctaactaatgaatgtagaaaaaatgatgaattaggaaatcatcatttggcagctactgtaacaataattgtttctggtaagagtcattaatgattagcaaaaccagttagtggaaatttaaggagtcaaatat

SEQ ID NO: 152557 - DNA, 352 bp, Homo sapiens
aagaacacagagttactaagatattttttaaaataaaatatataactcaaattacaaataagagtcactacggtttgcttttacttattatttccttatctttgggtcaaccctcactcacaagtaattcaattggtgtctctgtccttatctttcttctcttattttcacataatatttttgctaccagaagccgagacaactatcctatgaaatattatttgactcttcattatgataactcttcattatgataatctattttttacagtttatttccattttagttagcagatactttatttcttattaacatacatttgttcttgcctgtgattttgtattgctaatt

SEQ ID NO: 152558 - DNA, 355 bp, Homo sapiens
gttcaaatgtccacaattttaactatgagatattttgatatcatgagctattaagtgttatatgtagtatggtaatatactaaataatggctaacaatcacaaggaaacatagcccaaggagattacaatataaattggtcataagtgtaattcagaacagcaaatgaaggctaaagcagcagagaagatactatctttctggcaagacagatttgttgttgttgttgttgttgtcaataattagtaaagtctgaatgaacatcctagttctagattatggaaaataagtttttaagttgttctctctttgataaaattgtctttacataagaaaaaaatgagtgctcatctgag

SEQ ID NO: 152559 - DNA, 649 bp, Homo sapiens
tgagggtggagtgggtactggacgtggcaggagaagagcttttggggcgccttctgttatcttggagtgaggcagctgatgtgatattttaatagggaactcattttaatagcctacaaatgaggagtcagagacaattaaaattcatttccaattaattgttttttcttctctcattaccaagagttgccagtcagacaccgacaaagccttcaaaacaaaagcagctcccagcctccgcttcaatcggacgccacctggaaggaggctccggagagtgccagcatctttgcttcaaacttctctcccttcagcaaatgacttatccggcccctttgtgggcaagagatcgctcaaatcttcagaagctgggaccttctaagccgtgaagtcacagacaagtttattaccacggagctgcaggatacttttttatagttttaatatggtttatttgctctcctgaggaatggtctcagcaactgcatttcttgagactgatttagcttcctgtctttcccctgctgcctcccttctatgctgtggccaaaaacccaggctatgacaaacagcctgagatgacagagcctcacctgagcctggagccggaagcctcggtgcccccaccgctgaattgctgagtgacgtt

SEQ ID NO: 152560 - DNA, 784 bp, Homo sapiens
taatataccccacccccccatcatgcgtgcatgaacgtacactaaagtagatgaaactataccagagtattaatttactctgggtgatggttttattggtaaggattttgtttgcaggtttattgtttctgtaacaagcacacattacttacataactaggaataaaacatttattttaaagggttaatgctacttaattgcagttttttccccaacaagttaatagttaagaaccctgatctcaactcttcgtttttccaggttatttatttcataagatgactatccataaatcttccgatgaacgaacctctttatgaccagagctcctggggttaaaggagaaaggttttataatggctgtcttaatttgtttggtggttttccaggtattaatgccaaatttgcctttgtttagtttctgtttcttatcacactgttttcaggttacatcattatcttaaaaaggcagaggctttattttcttcgttgtgatataacctaattcttagaggtttcttaccaagatcactttgcttgttttgcttaattttattttctaaattttacaaattaatattttccaccaaaaggtggaacgaaacaaagacagcaaaatatcaaactgtttagtaatagttaaaaaagtcaagtgggaaggaaggttgaggctgaggcaggagaatcgcttgaacccaggaggtggaggtttcagtgagctgaggctgcgtcactgcactccagcctgggtgacagtgagactctgtctccaaaaaaaaaaaa

SEQ ID NO: 152561 - DNA, 518 bp, Homo sapiens
gattatgggtaatgcctcttgggagatttatgtgcaagtctgcatattaaaggtttgggtaagtgctgtttgtttgtttgtttgtttgtttgtttaagcccatttagctttaaactagcatttcccaaacatatctggccaagattctctctttttaaaaataaaatagagcttttatcttcttaaaaacataacagagcttaaaaaaagaactaaaaaagaaacacacaaaattagtgactagtagaccgtaagttggaaaagactaggttacagttttcaccccatcataaaattctgaatagacttttacttacaaaacgttctacatggcatagggaagaaagtaaataagcatgacttgagactgaagacctccaatatagagtgagataaaatataaagagcatcttcccttaaaaatagaaaaatataaagtaacctgggaaagaaaaattattttcctctttttcggttcttctccaaataaaacacacaacataaagcatagcataacc

SEQ ID NO: 152562 - DNA, 473 bp, Homo sapiens
agccaccgcatctagccaagagttttttcaaaataatatttttctggatttttctggttacatctggggttttatgacttctgacagataagggtggaggaggtaatttacgaaaagaaacatctctcttgatccatatttacattccataagggagtgagtttggcttttggattctcctcccaggcctatcagggggatagaattcttgctcctatttgatgagatttatggggcaatgaggtctgtgaggctgatgctacaccacctgcttcacgaatacggcccctccatttgcaaagtgctgacttggaacatttgtatttttcccttacaaatcaatcaatctatctatcggtctgtctgtctgtctgtctatctatctatctatccgtctgtccacccatccgtctgtccgtccatccgtccatctcactctgttgcccaggctgtcacacagtggcacgatcaca

SEQ ID NO: 152563 - DNA, 389 bp, Homo sapiens
atcccacttaaatgtgaaatctaaaaaagttgaactcttagaaacaaaatataatggtggttaccagaagcttacgtggatggggttcaaggagatattggtcagaggacatgatattttagttagactggagaaataagttcaagagatatgctatacaatatcatgattacagttaataaccatgtattatatgcttgaaaattgccttgggtgtacattttcagtgttctccccacacacacaaaaaatatgtgaagtaatgcatatgttaattagcataatttagccattccacaatgtatacatatttcaaaacattatgttgtacaccataggcaatttttacctgtcattaatgataactcacacacacacacacacacacg

SEQ ID NO: 152564 - DNA, 955 bp, Homo sapiens
gaggaacggggctggggccggcagggtggacttgggtttgaaggacactgcctctctctgcccataactggggtttccagtttccctctcagtcctgtctcttcctggccccagctaaaggatctcatacgttgatggacatgtggggattaggccttccccaacccagagctttcccccggcagccgacactccctgtccagtgggcaccgccccccatcgcctcatccctcccatgggcagtctcatccctgtccccagctgccactccctgtccactgggcacccccacctccccatcacctctcatccttcccatgggcagcctcatccctgtccccagctcagctgcctccatcgcggttgctcccttgcagcccaagtgcatgtgaagtttctgaccctcaaaccccctgaacttgcctctcccctacttctccatgtattgctgtctccccccttcacagccagttttccccaaaaagtcacctctactgtccatcttgtctcccgtcccccaccggctcctcagcctgcggcagacttcctctctccatacccaaattgaaactgctcccaccagggtcaccggcggcctccagggccttcctccccatggatgcatggccagcactcctgctgacctcagctggcatttggtttctttgctccttcttccgtgaaacgctcctccccaaagctttaggacaacacttactggttttcccctcctttctcagatggcacctatttcaaccctgccgccccagcctcccaaatatgggaccttttcaaggctgtgtcttcagcctccttcccctctgtgcctcaccactccccagccaccatcacactccacactcaccgtctcctttcctgacccagatggggacatgtaacaagccctgcccactgtgcatccctccagacatccactctcccgtcccctgcccac

SEQ ID NO: 152565 - DNA, 491 bp, Homo sapiens
cccaggctgcctaggctgcctctagctgctctgtcctcctgtcttatctggagattaaagaattcctttgttgacctctgcagggaacactctttgccttttaagagagaacttatgggacaaggcaatgcttatttaaggataatggctcataaatgatggggttttaggtacagtgcaagctgtcaaagggaaggcgtgaccttctcagctctcttcaaatgaccatccattctgtgtctatgcaggactcaccccgagaggaacgtggggctttaggaagctcagggaaggatctttccaaatgagggtttggggaggcttccagagtccttccctcagtataggacctcctggggcgctcctctgctcaccctcagatcccaagggccaggtctttaatcctagtgatgctggggtcagaaaagtgcagagacaatcaggactctcccagaaacacacatattctgtcacacacacacactttgacc

SEQ ID NO: 152566 - DNA, 386 bp, Homo sapiens
ccttcctcctccacatctcttggttggccaccttccggcctttctggctgtggctcagctcctccgtcacccctcactgcactgatctcagtggtcttttgattaccctgtcccttggcctctttcatgccagtatgagctcaccactctcctacttaagaaccacttagggccatcctcctttgtgtaacaaattcaggtggctaaagaggggagtcgcaggggagaaggtatgcaagaaggcttcaaatgttactgtttctcaaaatgatttaatggtgaaggtaggggtgtccctcaaagagaaagaggccagagggagcaagacatgacactaggggtaaactgaagaaattgcccctagaactgcccctcagcctgggtcc

SEQ ID NO: 152567 - DNA, 494 bp, Homo sapiens
ccacctagaattctgtgacctgtgaaatttcccagagatacaataataatcataaatatgagagcaaaactaaatcaaccttgactatcttaaaaataatgttttttaaatacgcatgtattcagcgtgtaaaactgtttcatatatcttggcagtggcagacagtttttaacatccttgcattgtctgggaagaggataaaagtaccagttaatattaggctgtgagcatatgtttattgcagcactattcacaatagcaaagacttggaaccaacccgaatgtccatcagtgatagactggattaagaaaatgtggcacatatacaccgtggaatattatgcagccataaaaaatgatgagttcatgtcctttgcagggacatggatgaagctggaaaccatcattctcagcaaactatcacaaggacagaaaaccaaacactgcatgttctcactcataggtgggaattgaagaacgagaacacttggaca

SEQ ID NO: 152568 - DNA, 191 bp, Homo sapiens
acaacaacaacaacaaatgtatcatgaacatttctctgtatcatgaaatattcttcaatctaactttttaggccaggcgcaggggctcacacatgtaatcccatcactttgggaggctgagctgggaggactgcttgggcataggagttgggagaccagcctgggcaacacagcaagaccctgtctctacc

SEQ ID NO: 152569 - DNA, 427 bp, Homo sapiens
gtcacctattaggatttctgcttcccgagggaaggtgcatgcctcacttggatgcatggcccatccccttctgtgtgcagttggttcgaccagcctttgaagatggtctcacatgaaagtcttattgggctcccattttggataacacgttcgcgagctaccgaaggtgttataatatgaaggttctgtcagtcacgtttattagagtatgacttttgagttatttgcagaatgactttcatctagcctgtcttattggtatgtatttatgattgtagtagttatccatcgttatgtaacaaatttaccccaaattttaacagcttaaaataacaaacatgcagtatgattttatacaatttgtaagggtcaggaatttaggagcaacttagctgagtggttctggggttctggttcaaggactttc

SEQ ID NO: 152570 - DNA, 716 bp, Homo sapiens
ggagttaatttattttttcctgggagatattcttttcaattaggatgtataatcctaacttttattcagtatgcaaggataagtgacttaatttttacagctgatcactgtgcattctgttagtgcagttaaaaattacagttctctcagaactttaaagcaaatgctacatcagtcaagattgggtgtctttgtttatctttggtatcaaagacccagagaatttggagaaacatcacacagcttgaaaagttatttagacaagctataatatcacatgactgccccctgagtggtaagacattgcccagtggatctgaaaacacttttaagtacttaatcatcatcgtatcttttttaaattttttatttcttatttatttatttttgagacagagtctcgctgtgttgcccaggctggagtgcagtggcacaatctcggctcactgcaacctccgcctcctgggttcgagtgattctcctgcctcagcctcccaagtagctgggactacaggagtacaccaccacacccggctaatttttgtaattttagtagagacagagtttcaccatattggtcaggctggtctcgaactcctaacctcaggtgatccacctgcctcagcctcccaaagtgctgggattacgcatgagccaccacgcccggtcccatcatcgtatcttcatgagatagtcaggaatggaatttgaatact

SEQ ID NO: 152571 - DNA, 124 bp, Homo sapiens
cactgtgcctggcctaaacttattttttttatagagacagtgtcttgctctgttgcccaggctggtcttgaacttctggccttaagcagtcctcctgtctcggtctccaaaagtgctggattac

SEQ ID NO: 152572 - DNA, 644 bp, Homo sapiens
ggacacacttggttgatagcgagcttttcatatatggattttgctgctgaaagaatatgaggtgatgctaagttaaccaaaagatgcataagactgtcagtagtttatagcttagaatctcacatttgaaaactttaagttatacatttgctcacaaacatactgaagtatgtgtgtgtgtgtttgtgtgtttacaagtttgatacctggaaaatacagtagagggaaaatgtgattctaaagaacacattatcagagaatttgatggattatttctcttggctagtctataccatttctaaaacatactgtaaaaattcaaagactaaatatcttacataattttagtagtattatcataaggtcagttgtcagtaggtaagcaaaggaaacacaattcttgtgtactgctctaatttgaatgtagatcctaataaggacctttttcttggagcactatatctctgaagtcttaaatgccacaaataaaaaacattgaagaagtagaataaagagtttcattttttctcttcctttgacaaagtcagttaaactgggatgcaactctcagtgctaaatttaaactaatatagactatcactgagtgttttcatttgtagcatttttgagacaaatgtggtttt

SEQ ID NO: 152573 - DNA, 130 bp, Homo sapiens
cactctgggccctcttcctctgtgtagccagagtaccaagtctgaaccacgtaatctgatgcctcactttcttctttccacccagagtttcacgcgtaagtctcacctctcctgctagattttaagctcc

SEQ ID NO: 152574 - DNA, 385 bp, Homo sapiens
attaagccatgtctcaaaacacataaacataccaagataatctcaatttgaaattaagaggaccctaattagacctcttaggactatttcattaccagctaaccttgacttgtatctatattctccatgtctagattggataaaagcacttgtgtgaatggaaaagataaggctaaggaagtctgtggtaggtatctcataaagtctcttcaatatttgacttctcagctttttggtccctacaccatctgtattgataaagctattaacaatagggcaaatatatctgctagccactaaattcttaaggaagttttaaaagaaaggaaaatagtatttactatctatgtgtcaggtactaaactaagcaatgctaggtactttg

SEQ ID NO: 152575 - DNA, 541 bp, Homo sapiens
tgagaagtcatttagaaatccttatacattctgaaaagtggctatttgtagatgccagtaatatggaacatcttgattttgaaccagagcaagacttttaggaagagtatcattgaaattcaaagaggagccttagttcaagaattcttagaaaaataatttccttaacattgccaacctcattgtgatagacagggcaacacaaagccaaagttaacgaggctctgacatttttaaagaacatattctaactttagctgacatttaaattagaaagcccagcagtgtagcggggagctgattgatttggaaagcatggatccaagataatgagggctctgccatgctcttcctagtgatgggtaataaatgagctcttcctggccaaaagcaaaggagatgaggcagttcctgcatttgaactgcaggcatttgcactgcattgagacgaaaagtcattcagatactgcttttcttctgctcactatagcaatattttcatattagccttcataatgagcaggaaaaagaccctggtaga

SEQ ID NO: 152576 - DNA, 375 bp, Homo sapiens
actaatgaccctagccttccagcagtcgtccctggaacctctgtaccacataccgtctcccatttcatcctctcagagctgtcctcggtgctttgcctttgtaattcttgcctctatctaaaaaacaaagtcttggccaggcgcggtggctcacgcctagaccttcttcttataatacatattaaaggatcaaagtagttctactataaaggaactcatttaactttgcttaacccaacagctcccaatgtaaaacagatctattaatattctgaggaaccacgttgtatgggtcaccagactaggaaacaatagtgttacaggaaaaagttgtgcttcttcactctctgatgattacacagcagcaaagcatga

SEQ ID NO: 152577 - DNA, 122 bp, Homo sapiens
gagcatgggggcagctggttgcctaaggagaaggcacctcagggaaggggactgtattcatttgttttcacactgatgtaaagaaatacctgagattgggtaatttataaaggaaacaggct

SEQ ID NO: 152578 - DNA, 701 bp, Homo sapiens
gtgccttctgccaggaaagaagtatctaagcacatgactgcagtatgaaaagaaccaagaatttacaactgtgtgaaaacacagcagacctgtaagtcagctggaaagaagttttggggtaccttgggggtcttcagagcatgacagattgagagtacttgggtgtaccaactgggtagctgagcaagtggctgatgggcaggcagtgactccagcttagagtgatgccagctctcactgcacagggcaccattgtctcctgtgcgggagcacacttgtccctgtggaatgtcaatggacagcccctggccagcatcaccacagcctggggcccagaaggagccataacctgctgctgcctgatggagggcccagcatgggacacaagccagatcatcatcaccgggagtcaagacggcatggtccgggtaggtgtgtcttgggcagaatgaggacatgacacaagaaacgtgttcatctccattcttctcacttcctccagggggccaaacctgcaggttgcatttgagaccattccagaacgggtacctcctccagctcagtcttcagaaaagattctggccgagaactgggacatctttactgggacccacaatcaaacatgttttcatgaagttagaattctatcatcctgagtgcttccattagctccctgtttgctctgcatcccagaacctgtg

SEQ ID NO: 152579 - DNA, 4200 bp, Homo sapiens
agcgagacttccagtccgaggtcctgctttctgctatggaactattccacatgacaagtggaggtgatgcagcgatgttcagagacggcaaagagcctcagccaagtgcagaagctgctgctgccccttctcttgccaacatctcctgcttcacccagaagctggtggagaagctgtacagtgggatgttctcggcagaccccaggcatatcctcctcttcatcctggagcacatcatggtggtcattgagactgcctcttctcaaagggacactgtcctcagcactttatacagcagtttaaataaagtcattctttattgcctatccaagccccagcagtccctctccgaatgcctcggccttctcagcatcctgggctttctgcaggagcactgggatgttgtctttgccacctacaattccaacatcagcttcctcctgtgtctcatgcattgccttttgctactcaatgagagaagttacccagaaggatttggattggagcccaagcctagaatgtctacttatcatcaagtcttcctttccccaaatgaagacgtgaaagaaaaaagagaagacttaccaagtttgagtgatgtccaacacaacatccagaagacagtgcagactctctggcagcagctggtggcacaaaggcagcagaccctggaggatgccttcaagatcgatctctctgtgaaacctggagagagggaagtgaagattgaagaggtcacaccgctctgggaggagacgatgctcaaggcctggcagcattacttagcatctgagaagaagtcactggcaagtcgttcaaatgttgcacaccacagcaaagtcactttgtggagtggaagcctgtcctcagccatgaagctgatgcccgggcggcaggccaaggaccctgagtgcaagacagaggattttgtgtcatgtatagagaactacagaagaagaggacaagagctatatgcatctttatacaaagaccatgtgcaaaggcgaaaatgtggcaacatcaaggcagccaacgcctgggccaggatccaggagcagctttttggggagctgggcttgtggagccagggggaagaaaccaagccctgttccccatgggaactcgactggagagaaggaccagctcgaatgaggaaacgcatcaaacgcttgtctcctttggaggccctgagctcaggaaggcacaaggaaagccaagacaaaaatgatcatatttctcaaacaaatgctgaaaaccaagatgaactgacactgagggaggctgagggcgagccggacgaggtgggggtggactgcacccagctgaccttcttcccagccttacacgaaagtctgcactcagaagacttcttggaactgtgtcgggaaagacaagttattttacaagagcttcttgataaagaaaaggtgacgcagaagttctccctggtgattgtgcagggccacctggtgtcagaaggggtcctgctttttggccaccaacacttctacatctgcgagaacttcacactgtctcccacgggtgatgtctactgtacccgtcactgcttatccaacatcagcgatccgttcattttcaacctgtgcagcaaagacaggtccactgaccattactcgtgccagtgccacagctacgctgacatgcgggagctacggcaggctcgcttcctcctgcaggacatcgccctggagatcttcttccacaatggatattccaagtttcttgtcttctacaacaatgatcggagtaaggcctttaaaagcttctgctctttccaacccagcctgaaggggaaagccacctcggaggacaccctcaatctaaggagataccccggctctgacaggatcatgctgcagaagtggcagaaaagggacatcagcaattttgagtatctcatgtacctcaacaccgcggctgggagaacctgcaatgactacatgcagtacccagtgttcccctgggtcctcgcagactacacctcagagacattgaacttggcaaatccgaagattttccgggatctttcaaagcccatgggggctcagaccaaggaaaggaagctgaaatttatccagaggtttaaagaagttgagaaaactgaaggagacatgactgtccagtgccactactacacccactactcctcggccatcatcgtggcctcctacctggtccggatgccacccttcacccaggccttctgcgctctgcagggcggaagcttcgacgtggcagacagaatgttccacagtgtgaagagcacgtgggagtcggcctccagagagaacatgagtgacgtcagggagctgaccccagagttcttctacctgcctgagttcttaaccaactgcaacggggtagagttcggctgcatgcaggacgggactgtgctaggagacgtgcagctccctccctgggctgatggggaccctcggaaattcatcagcctgcacagaaaggccctggaaagtgactttgtcagtgccaacctccaccattggatagaccttatttttgggtacaagcagcaggggccagccgcagtggatgctgttaatatcttccacccctacttctacggtgacagaatggacctcagcagcatcactgaccccctcatcaaaagcaccatcctggggtttgtcagcaactttggacaggtgcccaaacagctctttaccaaacctcacccagccaggactgcagcagggaagcctctgcctggaaaggatgtctccacccccgtgagcctgcctggccacccacagccctttttctacagcctgcagtcgctgaggccctcccaggtcacggtcaaagatatgtacctcttttctctaggctcagagtcccccaaaggggccattggccacattgtctctactgagaagaccattctggctgtagagaggaacaaagtgctgctgcctcctctctggaacaggaccttcagctggggctttgatgacttcagctgctgcttggggagctacggctccgacaaggtcctgatgacattcgagaacctggctgcctggggccgctgtctgtgcgccgtgtgcccatccccaacaacgattgtcacctctgggaccagcactgtggtgtgtgtgtgggagctcagcatgaccaaaggccgcccgaggggcttgcgcctccggcaggccttgtatggacacacacaggctgtcacgtgcctggcagcgtcagtcaccttcagcctcctggtgagcggctcccaggactgcacctgtatcctgtgggatctggaccacctcacccacgtgacccgcctgcccgcccatcgggaaggcatctcagccatcaccatcagtgacgtctcaggcaccattgtctcctgtgcgggagcacacttgtccctgtggaatgtcaatggacagcccctggccagcatcaccacagcctggggcccagaaggagccataacctgctgctgcctgatggagggcccagcatgggacacaagccagatcatcatcaccgggagtcaagacggcatggtccgggtttggaagactgaggatgtgaagatgtctgttcctggacggccagcaggagaggagcccccggctcagcctccaagcccaagaggccacaagtgggagaagaacctggccttgagtcgagagctggacgttagcattgctttgacagggaagcccagcaaaaccagccccgcagtgactgctctggccgtgtccagaaaccacaccaaactcctggttggtgatgagagggggagaatattctgctggtctgcagatgggtaggaagagagaggcagcagaggctctggcacaacagtgccaggctgagggtggcagaggtgactggggcctgagctctgcctacagaagaaacccccagggcctccttccccacagttctcaaggaagggcctctggcaatcacagctctgcagcccaaccctctccatggccgatgggacttctatgaaaaggatgagcacacacactcggagggctgagcagcacgctggaaactgtgacttggtgatgcccagctgcacacgaaattacacatgactcaccttattaagggctattgcactgaaaaaaaaaaaagatgggtcgcttactggaaattattgtattgtctttattttattaaagcaactatgttttaaatgcaaaa

SEQ ID NO: 152580 - DNA, 5899 bp, Homo sapiens
agcgagacttccagtccgaggtcctgctttctgctatggaactattccacatgacaagtggaggtgatgcagcgatgttcagagacggcaaagagcctcagccaagtgcagaagctgctgctgccccttctcttgccaacatctcctgcttcacccagaagctggtggagaagctgtacagtgggatgttctcggcagaccccaggcatatcctcctcttcatcctggagcacatcatggtggtcattgagactgcctcttctcaaagggacactgtcctcagcactttatacagcagtttaaataaagtcattctttattgcctatccaagccccagcagtccctctccgaatgcctcggccttctcagcatcctgggctttctgcaggagcactgggatgttgtctttgccacctacaattccaacatcagcttcctcctgtgtctcatgcattgccttttgctactcaatgagagaagttacccagaaggatttggattggagcccaagcctagaatgtctacttatcatcaagtcttcctttccccaaatgaagacgtgaaagaaaaaagagaagacttaccaagtttgagtgatgtccaacacaacatccagaagacagtgcagactctctggcagcagctggtggcacaaaggcagcagaccctggaggatgccttcaagatcgatctctctgtgaaacctggagagagggaagtgaagattgaagaggtcacaccgctctgggaggagacgatgctcaaggcctggcagcattacttagcatctgagaagaagtcactggcaagtcgttcaaatgttgcacaccacagcaaagtcactttgtggagtggaagcctgtcctcagccatgaagctgatgcccgggcggcaggccaaggaccctgagtgcaagacagaggattttgtgtcatgtatagagaactacagaagaagaggacaagagctatatgcatctttatacaaagaccatgtgcaaaggcgaaaatgtggcaacatcaaggcagccaacgcctgggccaggatccaggagcagctttttggggagctgggcttgtggagccagggggaagaaaccaagccctgttccccatgggaactcgactggagagaaggaccagctcgaatgaggaaacgcatcaaacgcttgtctcctttggaggccctgagctcaggaaggcacaaggaaagccaagacaaaaatgatcatatttctcaaacaaatgctgaaaaccaagatgaactgacactgagggaggctgagggcgagccggacgaggtgggggtggactgcacccagctgaccttcttcccagccttacacgaaagtctgcactcagaagacttcttggaactgtgtcgggaaagacaagttattttacaagagcttcttgataaagaaaaggtgacgcagaagttctccctggtgattgtgcagggccacctggtgtcagaaggggtcctgctttttggccaccaacacttctacatctgcgagaacttcacactgtctcccacgggtgatgtctactgtacccgtcactgcttatccaacatcagcgatccgttcattttcaacctgtgcagcaaagacaggtccactgaccattactcgtgccagtgccacagctacgctgacatgcgggagctacggcaggctcgcttcctcctgcaggacatcgccctggagatcttcttccacaatggatattccaagtttcttgtcttctacaacaatgatcggagtaaggcctttaaaagcttctgctctttccaacccagcctgaaggggaaagccacctcggaggacaccctcaatctaaggagataccccggctctgacaggatcatgctgcagaagtggcagaaaagggacatcagcaattttgagtatctcatgtacctcaacaccgcggctgggagaacctgcaatgactacatgcagtacccagtgttcccctgggtcctcgcagactacacctcagagacattgaacttggcaaatccgaagattttccgggatctttcaaagcccatgggggctcagaccaaggaaaggaagctgaaatttatccagaggtttaaagaagttgagaaaactgaaggagacatgactgtccagtgccactactacacccactactcctcggccatcatcgtggcctcctacctggtccggatgccacccttcacccaggccttctgcgctctgcagggcggaagcttcgacgtggcagacagaatgttccacagtgtgaagagcacgtgggagtcggcctccagagagaacatgagtgacgtcagggagctgaccccagagttcttctacctgcctgagttcttaaccaactgcaacggggtagagttcggctgcatgcaggacgggactgtgctaggagacgtgcagctccctccctgggctgatggggaccctcggaaattcatcagcctgcacagaaaggccctggaaagtgactttgtcagtgccaacctccaccattggatagaccttatttttgggtacaagcagcaggggccagccgcagtggatgctgttaatatcttccacccctacttctacggtgacagaatggacctcagcagcatcactgaccccctcatcaaaagcaccatcctggggtttgtcagcaactttggacaggtgcccaaacagctctttaccaaacctcacccagccaggactgcagcagggaagcctctgcctggaaaggatgtctccacccccgtgagcctgcctggccacccacagccctttttctacagcctgcagtcgctgaggccctcccaggtcacggtcaaaggtgattccctggccatgcattgtttggtgtcctgtcccagggttgtcccttcagtggctgggttcctctggaggtccagcaccacatacctgggcaaagtattggggactgactttgaatggctgcatctccagtcacagccagattctaggggggtgtcatctctgggaagtgtctaggagctcctctgttagaccctaacttctgaagacccacgtctctctgtctttctgtctgtctctctcacacacatacacacacagacacctctttcaggcacacacacacatctctcttcctcttcctctcttttatacatgcacacacacatgtacacacacataccttctctcctcaagagaccagtggagagtcccaagtttcacaaggaaggattacagcctctgtgctttggccactggtcctcctaagcagggcaggggactaagctaagcactctaagcaggcagccagtagctaagaacatgtgctctggggcagatggcccaggagtgcattccagtcctactgcttcctgactgtgtgaccttgggcaagccattgaacctccttgttcccacggggattggaatagcattgaatggatgctactacagatttgtattgatgcttagataaatgagcctgcagagagttggtgaggaaaagatgaaaaacatgagaaataggttgagccagtgaagggagccatgtgatttagggagggaagagggtcactctggccctattattgagaaacagttcttccagggaccaggggctcctcaacaaggccagtcagcaagagcgcaatgagatgggccaccttcggtgcccagcacatagtggtgattattagtccatctcttctgaccataattcagtggcttccttggctgccaccaaggctcagagaggctctatagaagcaggagtccactggggtgggggtggttccactggggtgggggtggtcccaaccagcccaggagggaggatctcccagatggaagcagaagagagggtgaggctgggttcctagggccatgtatgtatgaagtcgggtgccagtgtcatctgaggacatgcactgccttggggaaatcccactacactgaacaacatgcaggtcccaaggagtatgaagttaagttttcaatggttttagtggtgtccttttttatccttgaagtccaagaacagtgtcattggcacaccccaccctggtagataaggtgctactgctcttggctctggggaccatgcctccatttgccccaggactggggatccgctgctgcattgaagtccctgggcagtcaggcacagcccctgccctcatggaaagggacatgaggtgcaaaccacatcaacagtaacaagggagctcaaatctcccatgtgggctccaggagactgatgcagatcttaccagccacgggtcctggggatccttcctgaggctcagtttcttcatgtgtaaggtatggaagacaatggccctgccctcaggcttgtgacagtgccatgaagtggtgtctgtcacacaggcaggcaacaagccagcgctgaggcaggagtcctggcagatgctggtgccactccgagcacacacactgggccttgctttaaggggcctggctttactctctccctttgatctgagcagccccagaaggtaagggccattgatgccacagtcccttccctatggggagagacatctcacagtcttatcctggagcctttcctgaatcctgctccctctcttcctcctgggtggtagggtcaggaagagggtggttctcccacttcacccagcacagggcaaggaagggagtggcccccaccaggaggaaggaaaggcccctacgtggtgggtatggtgtgcacagtcttagaaactaggctggcctcagtgttttgagtcaacaagctgcaccaggctctgtgccaggggacacacattgaaaggggcatggttttctctactccatgggaagaggctagggtctgaagagatggaatgacttcaccagcataaccagacttggaatgaggtctgggcagctccaaatcccgtgctgtgagccatattccagctggggctgggggtggctcccagagtggagctgagggaggatgggaattgtgcctccctgtgactcctgccccggggcccggctacagtgggtgctgtccttctgtgcataagttcaagtccagtgtgtctgcctgtcactcctgcccagggcccagctgcagtgggtgctgtccttccatgcttaagttcaagtccagtgtgtctgcctgtgactcctgcctgggggcccagctgtagtgggtgctgttcttccatgcataagttcgccatactaactggggtgtagatatgtacctcttttctctaggctcagagtcccccaaaggggccattggccacattgtctctactgagaagaccattctggctgtagagaggaacaaagtgctgctgcctcctctctggaacaggaccttcagctggggctttgatgacttcagctgctgcttggggagctacggctccgacaaggtcctgatgacattcgagaacctggctgcctggggccgctgtctgtgcgccgtgtgcccatccccaacaacgattgtcacctcacccacgtgacccgcctgcccgcccatcgggaaggcatctcagccatcaccatcagtgacgtctcaggcaccattgtctcctgtgcgggagcacacttgtccctgtggaatgtcaatggacagcccctggccagcatcaccacagcctggggcccagaaggagccataaccctctccatggccgatgggacttctatgaaaaggatgagcacacacactcggagggctgagcagcacgctggaaactgtgacttggtgatgcccagctgcacacgaaattacacatgactcaccttattaagggctattgcactgaaaaaaaaaaaagatgggtcgcttactggaaattattgtattgtctttattttattaaagcaactatgttttaaatgcaaaa

SEQ ID NO: 152581 - DNA, 6590 bp, Homo sapiens
agcgagacttccagtccgaggtcctgctttctgctatggaactattccacatgacaagtggaggtgatgcagcgatgttcagagacggcaaagagcctcagccaagtgcagaagctgctgctgccccttctcttgccaacatctcctgcttcacccagaagctggtggagaagctgtacagtgggatgttctcggcagaccccaggcatatcctcctcttcatcctggagcacatcatggtggtcattgagactgcctcttctcaaagggacactgtcctcagcactttatacagcagtttaaataaagtcattctttattgcctatccaagccccagcagtccctctccgaatgcctcggccttctcagcatcctgggctttctgcaggagcactgggatgttgtctttgccacctacaattccaacatcagcttcctcctgtgtctcatgcattgccttttgctactcaatgagagaagttacccagaaggatttggattggagcccaagcctagaatgtctacttatcatcaagtcttcctttccccaaatgaagacgtgaaagaaaaaagagaagacttaccaagtttgagtgatgtccaacacaacatccagaagacagtgcagactctctggcagcagctggtggcacaaaggcagcagaccctggaggatgccttcaagatcgatctctctgtgaaacctggagagagggaagtgaagattgaagaggtcacaccgctctgggaggagacgatgctcaaggcctggcagcattacttagcatctgagaagaagtcactggcaagtcgttcaaatgttgcacaccacagcaaagtcactttgtggagtggaagcctgtcctcagccatgaagctgatgcccgggcggcaggccaaggaccctgagtgcaagacagaggattttgtgtcatgtatagagaactacagaagaagaggacaagagctatatgcatctttatacaaagaccatgtgcaaaggcgaaaatgtggcaacatcaaggcagccaacgcctgggccaggatccaggagcagctttttggggagctgggcttgtggagccagggggaagaaaccaagccctgttccccatgggaactcgactggagagaaggaccagctcgaatgaggaaacgcatcaaacgcttgtctcctttggaggccctgagctcaggaaggcacaaggaaagccaagacaaaaatgatcatatttctcaaacaaatgctgaaaaccaagatgaactgacactgagggaggctgagggcgagccggacgaggtgggggtggactgcacccagctgaccttcttcccagccttacacgaaagtctgcactcagaagacttcttggaactgtgtcgggaaagacaagttattttacaagagcttcttgataaagaaaaggtgacgcagaagttctccctggtgattgtgcagggccacctggtgtcagaaggggtcctgctttttggccaccaacacttctacatctgcgagaacttcacactgtctcccacgggtgatgtctactgtacccgtcactgcttatccaacatcagcgatccgttcattttcaacctgtgcagcaaagacaggtccactgaccattactcgtgccagtgccacagctacgctgacatgcgggagctacggcaggctcgcttcctcctgcaggacatcgccctggagatcttcttccacaatggatattccaagtttcttgtcttctacaacaatgatcggagtaaggcctttaaaagcttctgctctttccaacccagcctgaaggggaaagccacctcggaggacaccctcaatctaaggagataccccggctctgacaggatcatgctgcagaagtggcagaaaagggacatcagcaattttgagtatctcatgtacctcaacaccgcggctgggagaacctgcaatgactacatgcagtacccagtgttcccctgggtcctcgcagactacacctcagagacattgaacttggcaaatccgaagattttccgggatctttcaaagcccatgggggctcagaccaaggaaaggaagctgaaatttatccagaggtttaaagaagttgagaaaactgaaggagacatgactgtccagtgccactactacacccactactcctcggccatcatcgtggcctcctacctggtccggatgccacccttcacccaggccttctgcgctctgcagggcggaagcttcgacgtggcagacagaatgttccacagtgtgaagagcacgtgggagtcggcctccagagagaacatgagtgacgtcagggagctgaccccagagttcttctacctgcctgagttcttaaccaactgcaacggggtagagttcggctgcatgcaggacgggactgtgctaggagacgtgcagctccctccctgggctgatggggaccctcggaaattcatcagcctgcacagaaaggccctggaaagtgactttgtcagtgccaacctccaccattggatagaccttatttttgggtacaagcagcaggggccagccgcagtggatgctgttaatatcttccacccctacttctacggtgacagaatggacctcagcagcatcactgaccccctcatcaaaagcaccatcctggggtttgtcagcaactttggacaggtgcccaaacagctctttaccaaacctcacccagccaggactgcagcagggaagcctctgcctggaaaggatgtctccacccccgtgagcctgcctggccacccacagccctttttctacagcctgcagtcgctgaggccctcccaggtcacggtcaaaggtgattccctggccatgcattgtttggtgtcctgtcccagggttgtcccttcagtggctgggttcctctggaggtccagcaccacatacctgggcaaagtattggggactgactttgaatggctgcatctccagtcacagccagattctaggggggtgtcatctctgggaagtgtctaggagctcctctgttagaccctaacttctgaagacccacgtctctctgtctttctgtctgtctctctcacacacatacacacacagacacctctttcaggcacacacacacatctctcttcctcttcctctcttttatacatgcacacacacatgtacacacacataccttctctcctcaagagaccagtggagagtcccaagtttcacaaggaaggattacagcctctgtgctttggccactggtcctcctaagcagggcaggggactaagctaagcactctaagcaggcagccagtagctaagaacatgtgctctggggcagatggcccaggagtgcattccagtcctactgcttcctgactgtgtgaccttgggcaagccattgaacctccttgttcccacggggattggaatagcattgaatggatgctactacagatttgtattgatgcttagataaatgagcctgcagagagttggtgaggaaaagatgaaaaacatgagaaataggttgagccagtgaagggagccatgtgatttagggagggaagagggtcactctggccctattattgagaaacagttcttccagggaccaggggctcctcaacaaggccagtcagcaagagcgcaatgagatgggccaccttcggtgcccagcacatagtggtgattattagtccatctcttctgaccataattcagtggcttccttggctgccaccaaggctcagagaggctctatagaagcaggagtccactggggtgggggtggttccactggggtgggggtggtcccaaccagcccaggagggaggatctcccagatggaagcagaagagagggtgaggctgggttcctagggccatgtatgtatgaagtcgggtgccagtgtcatctgaggacatgcactgccttggggaaatcccactacactgaacaacatgcaggtcccaaggagtatgaagttaagttttcaatggttttagtggtgtccttttttatccttgaagtccaagaacagtgtcattggcacaccccaccctggtagataaggtgctactgctcttggctctggggaccatgcctccatttgccccaggactggggatccgctgctgcattgaagtccctgggcagtcaggcacagcccctgccctcatggaaagggacatgaggtgcaaaccacatcaacagtaacaagggagctcaaatctcccatgtgggctccaggagactgatgcagatcttaccagccacgggtcctggggatccttcctgaggctcagtttcttcatgtgtaaggtatggaagacaatggccctgccctcaggcttgtgacagtgccatgaagtggtgtctgtcacacaggcaggcaacaagccagcgctgaggcaggagtcctggcagatgctggtgccactccgagcacacacactgggccttgctttaaggggcctggctttactctctccctttgatctgagcagccccagaaggtaagggccattgatgccacagtcccttccctatggggagagacatctcacagtcttatcctggagcctttcctgaatcctgctccctctcttcctcctgggtggtagggtcaggaagagggtggttctcccacttcacccagcacagggcaaggaagggagtggcccccaccaggaggaaggaaaggcccctacgtggtgggtatggtgtgcacagtcttagaaactaggctggcctcagtgttttgagtcaacaagctgcaccaggctctgtgccaggggacacacattgaaaggggcatggttttctctactccatgggaagaggctagggtctgaagagatggaatgacttcaccagcataaccagacttggaatgaggtctgggcagctccaaatcccgtgctgtgagccatattccagctggggctgggggtggctcccagagtggagctgagggaggatgggaattgtgcctccctgtgactcctgccccggggcccggctacagtgggtgctgtccttctgtgcataagttcaagtccagtgtgtctgcctgtcactcctgcccagggcccagctgcagtgggtgctgtccttccatgcttaagttcaagtccagtgtgtctgcctgtgactcctgcctgggggcccagctgtagtgggtgctgttcttccatgcataagttcgccatactaactggggtgtagatatgtacctcttttctctaggctcagagtcccccaaaggggccattggccacattgtctctactgagaagaccattctggctgtagagaggaacaaagtgctgctgcctcctctctggaacaggaccttcagctggggctttgatgacttcagctgctgcttggggagctacggctccgacaaggtcctgatgacattcgagaacctggctgcctggggccgctgtctgtgcgccgtgtgcccatccccaacaacgattgtcacctctgggaccagcactgtggtgtgtgtgtgggagctcagcatgaccaaaggccgcccgaggggcttgcgcctccggcaggccttgtatggacacacacaggctgtcacgtgcctggcagcgtcagtcaccttcagcctcctggtgagcggctcccaggactgcacctgtatcctgtgggatctggaccacctcacccacgtgacccgcctgcccgcccatcgggaaggcatctcagccatcaccatcagtgacgtctcaggcaccattgtctcctgtgcgggagcacacttgtccctgtggaatgtcaatggacagcccctggccagcatcaccacagcctggggcccagaaggagccataacctgctgctgcctgatggagggcccagcatgggacacaagccagatcatcatcaccgggagtcaagacggcatggtccgggtttggaagactgaggatgtgaagatgtctgttcctggacggccagcaggagaggagcccccggctcagcctccaagcccaagaggccacaagtgggagaagaacctggccttgagtcgagagctggacgttagcattgctttgacagggaagcccagcaaaaccagccccgcagtgactgctctggccgtgtccagaaaccacaccaaactcctggttggtgatgagagggggagaatattctgctggtctgcagatgggtaggaagagagaggcagcagaggctctggcacaacagtgccaggctgagggtggcagaggtgactggggcctgagctctgcctacagaagaaacccccagggcctccttccccacagttctcaaggaagggcctctggcaatcacagctctgcagcccaaccctctccatggccgatgggacttctatgaaaaggatgagcacacacactcggagggctgagcagcacgctggaaactgtgacttggtgatgcccagctgcacacgaaattacacatgactcaccttattaagggctattgcactgaaaaaaaaaaaagatgggtcgcttactggaaattattgtattgtctttattttattaaagcaactatgttttaaatgcaaaa

SEQ ID NO: 152582 - DNA, 440 bp, Homo sapiens
cactactacacccactactcctcggccatcatcgtggcctcctacctggtccggatgccacccttcacccaggccttctgcgctctgcaggtgagctgctgccactctctgtacacacacacacacacacacacacacacatacgcctgtatcacaagactaagacctgtgcttgaacaaagacaggatgcctctgctaaaaactcagtcattagccagtgattcccagttgacattggctccaggattctggctcaccagccaaggcaggctgttcttcctcagttacacctgcacatctgcccaacaaagtcttgcaaaatgattctaaaaaataagaaatgagacatgaaaaaaatgatttaacataaataagatttagtggaaaaagaaaaagcaggaaacttggagactagaaaggcaggcggtcaaggattaga

SEQ ID NO: 152583 - DNA, 434 bp, Homo sapiens
tcaaccaggcatggtgacactcatggacatctggacaaccacagcatactacatttacacagacggtgtcagtcacaaagacactgttaagagactcaatgtttgtctcctaccaaattcctatgttgaacccctaatccccagtgggatggcacttggacttctccaagtgcctttgggaggtaattagggttagaggaggtcatggagggagggccatcatgatgcgattagcgcgcttattggaggaggaagaagctgggtgcagtggtccacgcctgtaatcccagcactttaggaggctgaggcaggaggatcacctgaggccaggagtttgagaccagcctgggcaccatagagagaccttgtctctactaaaaataaaaaataaattagcgaggcatggtggcgtgtgcctgtagtcccagctatta

SEQ ID NO: 152584 - DNA, 593 bp, Homo sapiens
aagggctctcacgaagagcttcctgcagacactgggccaaggggagggaacagccagtgagaaaccatgccaccaaagggctgtccagggccaccaattattcctcacattccagttggagtgtgctgggggcctaagagtaaatgaggctgcagccaggccaggagcttcctcacacgttcaggaagagtccagactttgctcctgatgccctgagaactactgatggagttttcaacagagagcattttaatatgcttgtcattttcacatgattttctacagtctgagacaaggaaagcagtcagaactttgctgcagataagtaataatttgcaagtgccctgcatattttttgtagcatatgtatttgctgaaagcttatcagataatgtatgagggagtggactataaaccaccaagcctcccagaagcatgcagagttgttctcacattgaagctgagcagcgtccccggatgccactagattagaacagggtatcccaacatcagacctgagattaacagtaagccaagcaaacaaaaatctcggtctaagatccaagagaccagattctagacccaactcaaat

SEQ ID NO: 152585 - DNA, 428 bp, Homo sapiens
gcgttgatgatgctaagtttgatcacttgatgaaggtggcatccaccagctatttccattttaatgactagtatcttttcaagaatgtgtggccttttgattggtcctgggtgcccctgatactttgtttatggtagcctttcagctagctgtttgacaaagctggcaaaggagaagtaacttttgatcagaaagaggatggtaccagcagtctacaggtgtcatcccagtcactgttccctggtcccaatggtaacaactgacatttatcaccatcaattggtttttcctgtttttaaacttaattggaactatacagaatgtactctttcagtctggcttcttttgttcaacatttgtgagatttatccatgctgtattttttatttttcttcactgtatagaattccgttgtgtgacagcatatc

SEQ ID NO: 152586 - DNA, 133 bp, Homo sapiens
attctgctggtttggctgtttgtctgcttctctgcaaacccaggctctgaccttgaccaggcctccagcacagctggccatgtggccttacagtgtcatcagcctggaatttaatcttgatagtgaggaccca

SEQ ID NO: 152587 - DNA, 594 bp, Homo sapiens
tatgtcatctcagctgggtctcatcctctaaggcaggcacacccacgaatgctccatttgacagatgcgtaaaccaaggcttagtagggaatggacagtcaaaggtcatgtgactaagagtgacagtgtgagaggaccaggatccttgaagaccttcaaacactacaatttttctttcattccagtaacttctagagcacagcctgaagaactacttagaagtctgaggcagaggctccctagaatcgtactcacagaatcttggaagttagaccttgaaggccaggattcctagaggatactacttttggtcctagcacccacaggaattgtttcttcctcctcccctcattcttcaccatcatgaccattgctagcattgattcagtcccatggaccagacacaatgattactcctccccctgctctcatttcacgctcatgaccatgctataagataattaccattatacccattttatagatgggtaaaccaaggctccaggaggcttgaacaacctgcccaacatcaaacaactagttaagagatggagataaggccgggcgcagtggctcacacctgtaatcccggca

SEQ ID NO: 152588 - DNA, 587 bp, Homo sapiens
caaacaagtataaatattgacaacaataagaacaacatttaagctattcattctataatataaagttaatgcaacaaggcgttcttgtatttttaacttttatttaatttctaaatggcagaccaaagaattcccacaacgaaatgatttcatgttgctgtttttctttgtaaattagacttactaaaactgaagagaaatcatcatctttggcattttttttaatcaaggtagcaaatcagagttccaattgactttagagtttatctgtccaatttcctcattgcagaaatgagcagaggccttgagaatttactgaatgccttttcctgggtcatacatacaaaattggaattccagtcacctttgttcttttaacaaaacacactgcctcttaatgcctccatgttatgtcaattacttcatttgaacttgactagtgtgtggagcaacctctagagacaggcagatttaaaaatcatttaggtgatattctaataacttacatataaattccctgatactagtagtttatacatatttttgcgaagtttgtataaaaataatgaaatcattaacaaaaatac

SEQ ID NO: 152589 - DNA, 391 bp, Homo sapiens
tatgtatcccagtggtctcaaactcttggctcaagtgaacctcctgcctcggcctcctaaagtgctgagtttataggtatgagccactgagactggccgctctaaccatctttccttctgcctatacgctgcatacttagggtggtggaggggaagggtaggtgcacgcacacggacacacacctcggctatcctgcgtgtttatcacctcagctttccaccctccaggcttgtcacaaatggaaaaggagcgaagatgctcagaatgctgagaaaccaggacgccaccaaccacccccagcattcacagccctacagcagtttacagcttatgctgcggaggccctgctttctcttggtcatttcttgctccgacccttcagaataggta

SEQ ID NO: 152590 - DNA, 283 bp, Homo sapiens
tattcaggattgacacagttccttagggtactgaggcaacagagggtcataataggatcttgaattcagttaccattgaggcctgatctagctttgccacaaaaaaaaagaaaaaaacatattatctgacaaaggacggacatccagatacataaagaagttctggccaggtgcaggtgctcatgcctgtaatcttagcactttgggaggccgaggcaggtggactgcctgagctcaggagttcgggatcagcctgggcaacacaggaaaccccatctctact

SEQ ID NO: 152591 - DNA, 167 bp, Homo sapiens
tacgccggtcgcaagtcccgggatcacagataagagccaccgcgtccggcctccagttcccttttcaaagcaaggaaccagaaatccagagagccagctagaattccaaattccatccttcctttatgttatacatttgaccaagttgagagtttcagagtatcttc

SEQ ID NO: 152592 - DNA, 469 bp, Homo sapiens
cagtgggtgctggctcctcaccactcagcctggcacacactgtctctgagcagacctgggagaaggcatgtgaaacccacctagccctggctggaagagaagtgggggagtggaaatgaaaagtggggactgggaggagctgcccacgtgccctccatggttccaggatggcactttcatgctgggagtgagcttgccctgtgccaggctgtcattgagacgttttccattcaacaactgtttctcagacaaggcacaggcaggttagctctcccaggccactcaagtagtaaggaaacagatttaaacccagacaatttggctccacggctaaggcccagagaggggtggtgacaagcctagggtcacacagccacagccccagagctaggaactgctggctagggcaagcagacagctgaatcctagccaactggaggtggagcagaggtggagccagggagaccca

SEQ ID NO: 152593 - DNA, 191 bp, Homo sapiens
tcaggtactgtcagcttctggaagcctcccagttacactctcttccctacctgaaccacctcaggattttgttggtgtccccttgatggcattgtttgtactctgaatgatattgtagttcattgtaagctcttctcacctctttgcttttccctgctagagggttatctccctgcaggcatggacttgtg

SEQ ID NO: 152594 - DNA, 424 bp, Homo sapiens
cagcctctgcctcctgggttcaagcgattctctcaaaggagaatctttttatgttatttatttattttgagccacggtttcactctgttgcccaggctggagtacagtggcacgatcatagctaacctgcagcctcgatctcttgggctcaaaccattctcttgcatcaccctcccaaatagctgggactacaggtgtgcaccatcatgcctggctaaagttttgattttttggtagagatggggtcttgctacactgtccaggctggggaatccttttatttaaaaataatggtatttcttcaaagaatagcttcagcttggaccaaaccaattttccaagactgaacagagacaaggaggagtggcagccaatgtagggaatatctggagctggaaaaagagcaatgttttaagtaagggct

SEQ ID NO: 152595 - DNA, 207 bp, Homo sapiens
gtagaggggagcagatgatgtggaaaggaaactagcttgtgatcaaaggttttaggatggaggggagaagaggacaagacaaggaaaaaaggatagctgggaaaaatgacaaagaaacagaaagagatggagggagagacagtgtcacaagaattattcagagaaaagaaaacagatcttctaggccaggcacagtggctcccgctt

SEQ ID NO: 152596 - DNA, 251 bp, Homo sapiens
gagtctaggaggatccccatcgcggtgagccatctgatgagcttatgaaaacaatttttgaaactgagtagtctaagccaaaagtgttcaggagtaccaaatctctcacaaaaagtgtcaatcttagaaaccttagaagtattctgagatgcaggaggtaagaattaacggacaagaagcagaaatattaaaacactaacactcttggtttgagtttgagctgttaaacttcttgcaggcctggcacggtg

SEQ ID NO: 152597 - DNA, 399 bp, Homo sapiens
ctgtgcctgggcactggagggtatggagaggaaagacaacacgtgaggcggccatgctgctgtccccatgccgatgatgcccctgccaggaaggccctctgccctgctgggagcctcactttcctctggtctgtccactgcagcctttaaaactatctgttctcctcattcatccctcgtcctcactcatagctgacgactttgcttccaatttcagaaaacagaatgaaatggaagagaactttccccagttccctccacaactcacctgccagcctctgtgcacagggactcaaggctgttccagcttctgtccgggctgactcccaccatccccatccttcagtatttccccccaccccacagttgggcccttcctctccctctcgatcagcgttc

SEQ ID NO: 152598 - DNA, 337 bp, Homo sapiens
tatattcttaatgtattagtctcgtgtgaacactaagagtgtattaaatctggccagtataaaaaggcctttgttatctggcagaaaaatgtttttaaaatttagtatgatatattaaagacatataacaaagcatagtaaataataagataaattcctgtgtatctaaccagtactgagaaaggctttctgcattctgccaccaaggtaatcaccatccagtattggtctgtatcattcctgtctatttagttatattttttctttatgtataggtatcccttaacgcatgctattgcagtttcaaatattttatgtagatggtgttctgttgttt

SEQ ID NO: 152599 - DNA, 616 bp, Homo sapiens
actgtctgtcttctctaataccgttatcaaaaggaagaatcactatcagcatattgtcatacgatctgttaagttgctacagaagtacctggaagaacatgtaaagactatcagaaataatctaaaaaaagatttgttacttcttggataatcatgaaagtaaataaaattttaaatacctcagcgtcatctctttccaaagtacttcgttgttgaggtattttcatggagtgttgtttggtgcattgtgtatcatgcctttcctaactcaccattaattttcccttaaattcaaggtatcatggagctttttttttttgagacgaagtctcgctctgtcatccaggctggagtgcagtggtgcgatctcagctcactgcaactgccaccttccgggttcaagtgattctcctgactcagcctcccgaatagctgggattataggcatccgccaccgtgcccggccaatttttgcatttttagtagagatggggtttcgccaggttggccagactgatcttgaactcctaagctcaagtaatccacccaccttagcctcccaaagtgctgggattacaggcgtgagccaccgcgcccagcctggagcttttacttc

SEQ ID NO: 152600 - DNA, 1103 bp, Homo sapiens
gaaaaggtcataattgacaggtggttcctggggtcctgagatccagcccaagggatgggacgacatgctaggaaggggaaagtgacagaaggttcatatgcatcacacaccactttgacaaacccatacatagcattcactatagtgaatagaaaaactcacgaagcaccatagttccagcactttgcaaatatcccccacccaatacctttgaggtgagagttaccatcattgcctagttactggtgagaaaacagaggttccatgacgtgcctgaggcactgagggggatgatgtcagcacttgtggccgcacgtgcaggcacacgccctccatgtcacaccagtgcactcactttgcagatgaggagcgatgcctgagcactgggatggcatcattggcttgtgttggacagtgcctatataggagtccagcttctacccacttgttccagtctatccacattttccaccaacagaacgagtttactagaaacctctcctcaaattggtacaaggactacatgacatggcatgtgatgacacacacacagaggagatcctttttccagcatgcaggaagaggagatcccatacatgggcttgggggtggcttccctcactgcagtgtccggtcccccagcagctctgggagcaggagtgactatctccgttttgcagatgaggaagcagaaccataaaggtgaccttttttctttttcttttttacatttaaagttaaattggtctcccctcaaaaaatgcttagacttaattattttaattatcctcacatatactcctccggcttctttactgaagtgtaatttacacaccataaaacttaccatttgaaaacgtgcaattcggtaatctttagtatattcataaggttgtgcaaccaaccaacaccattatctaattttagaacattttcatcaccccgaaacgaaacccatacccatcagcagtcactcttcgttacctggtagtaattacctacccctaccctcagcccttggaaaccactaatgtactttctgtttcttcagttatgcctattttggatatttagtataaatgggatcatacaataaatggcct

SEQ ID NO: 152601 - DNA, 598 bp, Homo sapiens
tctgcagccaacctgaaagaataacaaggaggtggctggaaacttgttttaaggaaccgcctgtccttcccccgctggaaaccttgcacctcggacgctcctgctcctgcccccacctgacccccgccctcgttgacatccaggcgcgatgatctctgctgccagtagagggcacacttactttactttcgcaaacctgaacgcgggtgctgcccagagagggggcggagggaaagacgctttgcagcaaaatccagcatagcgattggttgctccccgcgtttgcggcaaaggcctggaggcaggagtaatttgcaatccttaaagctgaattgtgcagtgcatcggatttggaagctactatattcacttaacacttgaacgctgagctgcaaactcaacgggtaataacccatcttgaacagcgtacatgctatacacgcacccctttcccccgaattgttttctcttttggaggtggtggagggagagaaaagtttacttaaaatgcctttgggtgagggaccaaggatgagaagaatgttttttgtttttcatgccgtggaataacacaaaataaaaaatcccgagggaatat

SEQ ID NO: 152602 - DNA, 167 bp, Homo sapiens
ttctatgctggggtcttctgtcataaaagactgaactccaggccaacttccccttcggccttgcatctgggcaggtcaacagaagactaagaaagcctgagtgctccctcctatggcccagggtggggttcaaacctcacaaggcccagcccagcacaagaaccaca

SEQ ID NO: 152603 - DNA, 331 bp, Homo sapiens
tctcctccaccttctccattgaagaatctgtctcaaattcaactataagccaattcacattacgattagcacttcagaaatttctgtacaataaaaatattgccaaaggcagctaatgtatttgcttattccaaaacaagcaaactattaaacaatctgaactttattacaactttcatttcatttaccggttttcatcattccacaagcatctacagaacgctaagcttagtatatgccgatcattgggaatacatgaataaattagggctgctgccctggaaaaatttatataagcggagaaaactgacattttaaggatttcaaaatc

SEQ ID NO: 152604 - DNA, 484 bp, Homo sapiens
agctacataagcgaattcacgtgttttagttatctaggtttgttttttccttgttatataggatgtttgcagttttcccatttgtatcaactcatacatctttgaagttttgtaattcagtatagctttggttatagattaaagttcactggaaaatcactgactaatccttttagcatgttccactgttccatagtataaagatacacagaacttgatggcttccaagtgtggttcaaacatccaaagcactcgagattagcaccatgtgaagaaattttaaaatattgtactgcaattaattttaaataacttagcactgcatatgtcagggagaaagccatggtagaattcaaacagaagctcctataagtgaaatgattcacttacatcatttaaataattttatctctcataaagacatagaagcaaaatatatgcctatttccacttaggaaaggcttgggtgaattcgcgaagaatc

SEQ ID NO: 152605 - DNA, 315 bp, Homo sapiens
tagtgtccagaattatcactaaccaggcttggcaaggttatgacttgaggtgctctgacttgtagctgatcatatcacgtgtttaacagacgaatgtatctgagtcgtgggttttctactctagcatttccagaacatgaatcagccatcacagctcacgagatctgttagtgactgggcatctgtgtagcaactgcatccagcttaattctagttactcctctagcttgtactccacagcattcagctgttcagctgcacagcattcttttgtctcagttaacatcatgttttgtaattattccaatacttgtt

SEQ ID NO: 152606 - DNA, 269 bp, Homo sapiens
gtatgtgtgcaatatgtatgtgtgtgtgtatgtatatgtataggtgtataaaggtgtgtgtgtgtatgtatgtgtataaaggtgtatgtgtttgtatgtgcgtgtgtatgtatgtgtataggtgtataaaggtgtgtgtgtgtatgtatgtgtataaaggtgtatgtgtttgtatgtgcgtgtgtatgtatgtgtataggtgtataaaggtgtgtgtgtgtatgtatgtgtataaaggtgtatgtgtttgtatgtgcgtgtgtatgtat

SEQ ID NO: 152607 - DNA, 648 bp, Homo sapiens
ggttctgtgcagtcccatgtgtttgagctttctggcgatctggctctagaaaactgaagtgtcattgcaaaatagattgggatacttggtgtcaaaagcagtatttcttattctttttaaacctatacccctttgatagatatgaaaatctcataccatagctgtagtaatattgaatatgattttttcaaactacatatggtttatattcccctacccccacctacggattctcataggctcctctacatagttatgcccttaaggaagagagtcattactttaaagaaagtagcaaaatacacctgaaatgttgatttcttcatcatttctatatgggaatgtaggctactagagagaacttttacctatttattcattcagcaaacatggattgagtatactgtatgcaagctctttatggtacaaagataatgatgataggccacgcaaaaacttgtatgagagtgttaacagcagcattatttacatagtttaaaaaactagaaacaattcaaatgtctgcagactgaagatatttaaacaaaatataatcgcttctcggccttttggctaagatcaagtgtaaacaaaatatatatccacagaatgaaatactatttggcaataaaaggaactcagtataac

SEQ ID NO: 152608 - DNA, 578 bp, Homo sapiens
cctctttagcacctgcaactcttaccaatagataataaataaatgccattatcctgctcatttctgcctctactggcaaataaaagtgtccagcaggaccatatgaaatgctgaaacccatgatcctaaccggtcaccctaacccacctggacacacacactattgatgaacccctgtccctgtggctgtatctgatttttgttaacccattgaaaatatgtggctttcttcctctccatactaatctgaatccattctgtaagatttcatgagacacgctaactgctttctaatatctatgtggtattgcctcctggacccaattctgtaaggtgtttgcaaatgctattatacttgtccgacatggtttgttctcaataatctcagagctttttaatttatttattggaatgccatggcccttgtttgttttcttattctttgcttgtttatcaagtgcacaaagtatctttttcccccacagccccagagtgctgtgcagttgatctccaggttagggaagagcagaggacagagccgaaaagcaaggaaggctgcacacgggagagtgtaggaa

SEQ ID NO: 152609 - DNA, 194 bp, Homo sapiens
taggagctgcatgttctcacaagactaagttgctcagagttaagattaggtttagagcgcattaactccagcaccgaggaacactccattgtggactgagtagacactaccatgagctcaagcgcccaagtggaagaaagcgtgtgtggatgccatgtgtgcatgaacatgtcacaccttacatgatgacttgc

SEQ ID NO: 152610 - DNA, 407 bp, Homo sapiens
cggtgtatatcgatgcacccattccagccaacctgtgactagtacctccaaatttagaaaatgaataaaatgaaacattcacaagaaaaaaaagtaatatcaccgcttctctgaccacaatagaaccaagagctcataagaaagagaaatttggaaaccaatggggaatcctcaagatccaacctgtagagttgtaagttggggagtggcctcggttgaaaagcgtcgtggtgtgcactacagctttatcactaagaatttttgcaatgaataaataaaaaatggttcttcagcttctctagggaaagacaaataagtctgggtcctactgaacaatacatcaaagaactatccagatgtccagatcaaaagaaaaaataattagaaaattgtataaagatgtgtag

SEQ ID NO: 152611 - DNA, 468 bp, Homo sapiens
tatctgaaaaatgaatagaatggtgtgtgaatatatgcagctcacccttctagagctgaaatcctgcttgcttattcaagaatatgggttaggttgctgggcaaatcaaaacaactagtgctgggccagattctgaagaccaaagcacttaaaaaaaatcagagagcctataagctcttcattttttattctgtgatagagaatctagcgatcatattcctattcaagactgttagggcctctttcaggtagttgtcagtgccaaagggtggagaagcataaggtttcctaaattagagaagaaacttaaatgtactcaacacatttagatcctgcctggattttcactagcctctgatttaattccacaccaaatgctactgcataactggacagagcaaagcctctagtatttacactggaggctaaggtctgacattctgtctaaatgaaatttcccagttgtcc

SEQ ID NO: 152612 - DNA, 399 bp, Homo sapiens
  misc_feature (1)..(1): n is a, c, g, or t
nttccgcccgcagagctccaccgctgaggccaacgaggccaggtgtttatttccagatcattttatttccgtcattcctattatgtctttgactcaacaaaccctagaatttgtttcagaattaatctcagactgatattacatgtctgaaggctttgtaacaagaggttcgtgtgctttcctaagccacaacatactctgaaactttaggaattcaaggccggaaggtcatttttctctctcctttccctttcagtgcttctggttgcttcccgagaattctgatgcagagtggtattagcccacccccagttaagaggagtgctctgaggggttcagttcttccaaattatatctaggcctttcacttctcttttttatctccttttcatctgaaaa

SEQ ID NO: 152613 - DNA, 1089 bp, Homo sapiens
gagctaacctctgctcctagagccgctctcatacttctgtactcctcaggacctttgctgttctgaattcctccaccttgaacatcctcccttctaccctgatcctgtcaaaacccaacgtccctcaggacctaatatcattccccatcccccgggtgaaaccctttccaggctctcccatgtataccttccgacagcacttttttttttttttagagacagagtctcactctgtcgcccaggctggagtgcagtggcgcgatctcagctcactgcaacctttgcctcccaggttgaagcaattcttctgcctcagcctcccaagtaactgggactacaggcacacgcttccatgcccggctaattttttgtattttagtacagagagggtttcaccgtgttgcccaggctggtctcgaacccctgagctcaggtaatccacccaaagtgctgggattacaggtatgagccaccgcgcccagcccctttgtaactttcattaacactgatgaggcacaagccataggatagaattgaatccattgagagctgtgagccaattgagggatgattggttaatagattgtggcttgaagctgtggaaggtaaggggtgacacttgactcctattagccttgtagaaacacctcagagattcacaggaagcaaactttgaccataaaaatataagactcacagcgcaccgagttctcttagcagctaccttagagttgagaaagttttgggcctctttaataaacaagcacaaagcagttcttgccaaatacggcctgctctggggccacagggttagcttaggagacaactttcttgcctaaaaataaatgcatgttcctatcagacattccaagcatagtttaaacatgagacttctgagcagcagctcaagctctgtgggttcaattatgtcagagtatgggcagtgagggtctttggggagtgtgcccccttatttgggattgttgtggctaccaaggaaatcagatgatcaaatgcaaaacttcctccatcttatttctatatgatcttttttttttttttttgagttggagtcttgctctgttgccc

SEQ ID NO: 152614 - DNA, 724 bp, Homo sapiens
gcagattcgtatcgtttgccctaaaatgtgtttcccgtataaaaaaaataaaaaaaaaaaaaagacttgctatccacccaaagtgctgggattacaggtatgagccaccgcgcccagcccctttgtaactttcattaacactgatgaggcacaagccataggatagaattgaatccattgagagctgtgagccaattgagggatgattggttaatagattgtggcttgaagctgtggaaggtaaggggtgacacttgactcctattagccttgtagaaacacctcagagattcacaggaagcaaactttgaccataaaaatataagactcacagcgcaccgagttctcttagcagctaccttagagttgagaaagttttgggcctctttaataaacaagcacaaagcagttcttgccaaatacggcctgctctggggccacagggttagcttaggagacaactttcttgcctaaaaataaatgcatgttcctatcagacattccaagcatagtttaaacatgagacttctgagcagcagctcaagctctgtgggttcaattatgtcagagtatgggcagtgagggtctttggggagtgtgcccccttatttgggattgttgtggctaccaaggaaatcagatgatcaaatgcaaaacttcctccatcttatttctatatgatcttttttttttttttttgagttggagtcttgctctgttgccc

SEQ ID NO: 152615 - DNA, 669 bp, Homo sapiens
ggagagacggagtttcaccatgttggccaggctggtcttgaacccttgacctcgtaatgcccacctaggcccacccaaagtgctgggattacaggtatgagccaccgcgcccagcccctttgtaactttcattaacactgatgaggcacaagccataggatagaattgaatccattgagagctgtgagccaattgagggatgattggttaatagattgtggcttgaagctgtggaaggtaaggggtgacacttgactcctattagccttgtagaaacacctcagagattcacaggaagcaaactttgaccataaaaatataagactcacagcgcaccgagttctcttagcagctaccttagagttgagaaagttttgggcctctttaataaacaagcacaaagcagttcttgccaaatacggcctgctctggggccacagggttagcttaggagacaactttcttgcctaaaaataaatgcatgttcctatcagacattccaagcatagtttaaacatgagacttctgagcagcagctcaagctctgtgggttcaattatgtcagagtatgggcagtgagggtctttggggagtgtgcccccttatttgggattgttgtggctaccaaggaaatcagatgatcaaatgcaaaacttcctccatcttatt

SEQ ID NO: 152616 - DNA, 439 bp, Homo sapiens
tgcggtactctacaggatcctcacgtaatatgtaaccactattacatataaagtaacaagggaatgtaattttaagcagtagacaagctgaattaaagcgtgaatacatgactcctatactttaaagttacatcattgctttgctctacaattctcaattacattcaaatctatgttcactgtttttgaaagctaaagttagaaaaatatcttaacatagtatgagagagaaagaatgtcttccaataatctttattctaagacataaaacacgaaaaccctaaaataatgtcaaactgttaccctttacaatgaatggcttgtgaccatttcaatttagaggggattgtggaaaaccttttttttttttttttttagagaaatggattttgcgctcttgtggtggagatacattgtcaggatgtcgcaggtttggtac

SEQ ID NO: 152617 - DNA, 142 bp, Homo sapiens
taggatttgagaccagcctgggcaatattgtgagaccctgtctccacaaaaatacaaaatacaaaataaatcatcattccctagggcctctggcacctctataggcatagtctccggcaggatttcagaggtgctctccagt

SEQ ID NO: 152618 - DNA, 830 bp, Homo sapiens
atactgcatgatcgtcatttatttgagggatctaaaaaagtcaaactcatagaagcatagtgtggttgccaggagccaaggtgggggtggggcaatgaggagatgttggtgaaagggtacaaagtttcagttagacagggtaaataagagtgtactcttatacagcatggtgactacatttaataacaatatattgtatactttaaagttgctaagagattagatcttacatgttcttacaacaaccaaagtatgtgaggtcttggatatatcaattagcttgatttaactatttcacaatgtatattatatcaaaacatcacgttatataccatatatgtacaatttttatttgtcatttatatgttaataaaaaataataataagtaatctgagtctttaagaaaaaaagaaaattatctttacaggataagttttcagtttatcaacaaaaagaaagatttaagcagaacttttacttatctctggaatatctttttatcaagataaggagatgaaaaataaattcttcatggaaaccaatttcaaaaggctataccactcttttacaggaaatactgtttcacaccattacatgtaataagaattgattgtgaccagctcagtttggtaatacaggtgcaatatagttgcaataattacttctgacactgtcacaagcatcaaaatgtttaacaaatatttcacaaatgtgaaaataattctaataagtgatttttcacgatatttctttgttatttggtaactgtagcaaaatgccagatgattctcattaccatagaagtcaattggcaggtgacaaataattt

SEQ ID NO: 152619 - DNA, 206 bp, Homo sapiens
caaaaccagatttctttaagtagacagaaaaatcaataatgatacagaagacttaaaccacactatattaaccaatttgacataactgacatatacagaaatctccatctaacagcaacagaatacataccattttcaagtgcagactgagtatgtatcaagagaaaacataagggtcgtaaaagaagtttcaacacatttaacag

SEQ ID NO: 152620 - DNA, 458 bp, Homo sapiens
aagaattccaggaagaaagaatgctgaaaaacaacatttggagaaataatggctaagaatttttctgaattgatgactttttttttcagatacaaggaagtttataaaactttcccatgtattaggcaataaagtaaaaactaataccaaatgtctgatactatacagaccacaatatctggctgtcgtatagtcaaagtagaaaagaatgatagcaacaaaaaaatcttatatatttggagatttaaaaccatacaaataatacattctttaaaagaaagagcacactattaaactgtaaacagtttaatactggcacaattgagaattttttttaagatactagtatgaagtgctttatgtcattaaagttgaaggcatcagtggccaattttatagaaatgcataatctattaaaacggactcaaaaagtaattgaaaacctgaagagatctgta

SEQ ID NO: 152621 - DNA, 416 bp, Homo sapiens
tgaaacttctgcaaatttaacactttaatatcaactttagctgaactttctaaatatcaagacccagacaaaaaagatcaaatgctgtgaatgttcaatttgcttacattgtttagctggtccaaataattcatagatatcaaagtacaaatatgggttgaatgaaaagagcagatcattaattatgctggaatattagaaatggtataaaaaactagaatgtttgtttttggaggaaacaaaccatataatgaaattaaaaagaatgaaatctatgctactgctgtcagaatgaataaagtagtttatatgtatgatataaatggacaaaaattaaggaaaggtggcaaactacagaaggtgagttgaaatatattttcagatagtaataaatacattatttcacgtgtgttccg

SEQ ID NO: 152622 - DNA, 391 bp, Homo sapiens
ctatagatgaagtgaaaagaaagtagtgggagggcacatgagctggcaggaggtctcttgtgagccgtttcctttcttctctaataataggaatgctggcttacaggcagttttaccccctgggatggcaaagccctctctgtagttattcttagagatgctggttatattggccgagggaagcttgctgatcggaaaacacagggctgagaaacctctggaaactcgttgcagctcggatctgaaggttgagtgctaagagtccacagagatcaagctacatgcaatgattgtgcttgcaggaaaggcagggtactgtggaattggtgtcagaggattcgaaatcagcttctaactagctctctgggtttgaacaagccactccccacct

SEQ ID NO: 152623 - DNA, 283 bp, Homo sapiens
  misc_feature (1)..(1): n is a, c, g, or t
nctagagctactccttgctgctcctagtgaagaaacaggggcgcgtttgcttccccttccaccatgattataagtttcctgaggcctccccagcaatgctgaactggtcagcccttttaaaccttcaactgaatacaaaacatctgagaagtttttccacgtatgactggagaggcattctttgctagcggtcaaagacaaggacaaagaactacccccaaaacagtttgaatgaactatgaccagaagctggttttgaataaagctgattttctatacctct

SEQ ID NO: 152624 - DNA, 189 bp, Homo sapiens
tacaacactcctaattcatctcaaagatctcacactctgagctttccttcttgaacccaatccatttctgctccatcctgtactgaagggcacgccatctccaccatgatgactcctgacttcctggcctggctacagcagcctggcttctgccccaccaatgccccagcctctctccaagggcaccag

SEQ ID NO: 152625 - DNA, 516 bp, Homo sapiens
tctgttgctccaccagccacccagccccacggtgggccttgcctcgtctgttaggtggtattttcatctttggtcagatgacagcccccatgctccaaaaattctcctgcagccagggcttggagaatcccgacccctctctggcatgaacctctcctcatccagggtggcttgtgtggtagagccaggggaatggagaagatgacctctgaagcctgaaggctctttgggaagcaggacacaaacatcctgaagagccagccttgagctggctgcacaagagactcatagactttgcgtcaacatccacctctccaggctgcagtgggtgtacctgttcaccaccacctccagcagcactgtcgcagcggagcagttcttacagccaatgagcttccacaccacctccctgcagttctctgcaaccgaggctccatcctgcactgatgggctgcctgacacgtcggcctcaacaagcatttccagcacattctcagctttcctgctctgctgggc

SEQ ID NO: 152626 - DNA, 576 bp, Homo sapiens
gcccctgctactgccaaaaaaagacaaaaaccatatgatcatcttattagatggagaaaatgcatgtgacaaaattcagcatcctttcatgataaaaatgctcacacaattaggtatagaaggaatgtacctcaacacaataaaggccatatttaagaaggccacagctaacattgtactcaatggtgaaaaattgaaagcttttcctctaaaatccagaacaagactctccccacttctattcaacatagtattgtagtattggcagtccttactagagcaattaaaaggcagccaaacagaaaagaaagaagtacaaatgtcagttagctgataacataacttttttttggcaagatggagtcttgctctgtcatccaggatggagtgcagtggcacaatcatggcttgcggtagcctcaactccggggctcaagtgatcctccttcctcagcctcccaagtagctgaaactacaggtatgtgccaccacatctggctaattttttcatttcttttggtagaaatggggtctcgctatgttatccaggctggtctcaactcctgagctccagtg

SEQ ID NO: 152627 - DNA, 256 bp, Homo sapiens
tgacacagtacagatggtgagggggcactgcagatgggtgtgttgggaagggagtttgcagtgacacagtacagatggtgagggggcactgcagacgggtgtgttgggaagggagttctttggagaagaggcccgctcagctgagaagccagccatgcagaggtgccaacactctgtggtgtcggactgtctcccctacaccagatggtcagcatctctggaccccaggacatgagatgcagtgtccccctcctca

SEQ ID NO: 152628 - DNA, 439 bp, Homo sapiens
agaagcctgtgggcacgttcgttcactgtgcaaaagccagagggcttgcctgggttttcatctgtgggctagctcttgttccccctacatgaagtccccggcaactcacttgtaatgggactggagacttcgcaaaaagaatggcctccccaggaggaggatctgacgatctgacactgcagagaccttggcttcctttaggccagagatatatatgattccagcttgcttatgacatttttttaaatcctgctttgactttttgttggtgtgtctttgggattgacctaagaagggagacagagggaacagctctatggattttgtcttctaagatgagcttcctagtagtatgtgctttcaccatcagtttttaggggaagttttcaatcatcagtttgtagttctctatctggctgtgttgctaaccacctggatg

SEQ ID NO: 152629 - DNA, 584 bp, Homo sapiens
tggcctagtatgaggagcgtgatggagtggaagtgaaatcacatggctaggccggaggtcattaggagggctgagagggcccctgttaggggtcatgggctgggttttactatatgataggcatgtgattggtgggtcattatgtgttgtcgtgcaggtagaggcttcatagagaaggagaaagcacagggacaggctgccagatttctgcagttgtgtcttcaatgggcttcgttattttgtttcaattatcatgacttcccaaaataccagagaaactcatatttagaagtttaaaaacctatcctatacatactaaaatatttccagattaaatcatacaacatcaaggatttactgcaaaataatgcgaaggggagtaggtatgggtatagatgaatcaagattggtcatggtttgagaactgtttaagttggtgatgtgcacacagggaggtacagtttactctttcatttacttttgtgtatacttaaatttttccataatgaagtttttttaaaaaaaatctcaaagctaaaataaatgacttaaatatcattctattaagtcttgtacacatttcc

SEQ ID NO: 152630 - DNA, 240 bp, Homo sapiens
gaggtaggggggtggtggtgcggagtggtgtggatggtgatgacgtgtgtctgctagcctgtctttgtacgcgaagactggtcaggcagcattcagagaaggctcgggcggggacctgcaggtaacccactgacacctggcacagcaacctgagcaggtatgttgcgtctgggctcgggcggaagggaggtatggccagcagagacgctgatgtcttgtgagttctcagaactctgttag

SEQ ID NO: 152631 - DNA, 450 bp, Homo sapiens
aacacaggcgtcacacaggcagacttcttggtgtgtttccatctcttcctgccctgggagctggaaggtggagctcacatttcagctcaagggatatggcgtccacagggcccatgtgggaggccctgaggtttcttaatcaccaaatctagaaggcgtaaaaccaatcttcacaaactacagcactggaaagaaggttcccttccctgattttctcagaaatcatcctgacaagaggatccctttagtcctcacgcacaagaaaattccctctcctgccccaccttatcatccatgaataattctcactgtcctgaaatacacagaatagaccatccacatagggccaccaacaacctgcacaacttcgaatgttgagaatgacagtggatgggtgagattctaccacctacttggcagcagttttggtctcagtccctgaaggcaggt

SEQ ID NO: 152632 - DNA, 431 bp, Homo sapiens
acacatttcaaggtggctgttcagaatggttggaaatagaataaccaaaaagctgtctttttgtggagagatttgcatctgtagaggaaatctgcattgatgtagccaggctttctccgaggctctcccttgtctaactctaggaaagattaactgagaggctgacacctttacagatctgaaagaaacatttaccctcagttctttctgagggctgctacctgtgaggtgtcatctacctaacaagactccctttgccaaccaggcctcctcttccctcccttccataacctgtcttgccactatctgagcccccatatttgtataaactcaagatggtggataagcttctgtatcccactgaggggttggggtaatcactttgtggttctctctcatgtatgttaataaatatttcctgttaaagccga

SEQ ID NO: 152633 - DNA, 303 bp, Homo sapiens
atgttagcggcccctcctctgccttcacagagtttaaagtgtgctctctccaccagtcaggactgttgccctcctttcacagccatgtgattgatgttaccagtccttacagcagtcacttcacccttttccagtcctttccttgtcttacctacaccttgctcctaaattgtgtattagtccatttttgcattgctataaaggaatacctgagggtgggtaatttataaagaggtttaaatggctcacagttctgcaggctgtacagaaaacatggcatcagcatctgcatctgatgaaggc

SEQ ID NO: 152634 - DNA, 546 bp, Homo sapiens
gactcgcagctctactcccactaactatgactgggcaagtcccttcacctctttagccttagtcatatcatctgcaagatgggctagtgatacctatgtcacaggatggttatgaggacccaataagagaccccaggtgaagcctcctggaacaggtccctctcactgtggatgtggagtcaaggcttactgggcatgaacaccaaggacgagacctcctccttggcttagacaatcgaatccatccagctggaggttcttcttcactccttccctccctgcctcagagaatgagacctgccaccttcttcaaggcccatccccacctgcacccatgagcccttgcatgcctgcttgttagaaaccattcacctgcatgcactcctcccctttccagcctctccacacctgctaggttctatgtggcccacctccctgctcatggaagccttcccaaggggtgcgtgtgaggggtttctcgacaagcagccaacacattctctccactgttccccctgccaccaacagcagtatgccccctgcacc

SEQ ID NO: 152635 - DNA, 401 bp, Homo sapiens
ctgaggtcaaccaagtgcacagaaagaggctgcagctgcacctgccctcctgcagacgactgtcacgcctgcacacactcactctctttggactcactctgccagacaagggtgacagctggcctagactacagtcagaatctacatctttcttacaagcacagaaatcacaggaactggaacacctgcctggggacagggatctggaaggatcacccaggcctcacttcctcaggcctcccttgtaccaggaaaggcctgataacagcatcatcctgtccttcttggaggcaaatgtccttctcctgcattttccagaggggcctgccctaacctctgagccccttctgggagctcagcctccacttttcccaccccaggaggaagctgggggctggtag

SEQ ID NO: 152636 - DNA, 144 bp, Homo sapiens
catagtttgattgtgtgaagtggatgatcttcttgggggtctattaaactattgggtccagggttgatgctgctaatctcacagttaaatggatgttctcctcctccttcacaagatgaccttcccaaagttgctcatctatag

SEQ ID NO: 152637 - DNA, 261 bp, Homo sapiens
aaaataaaaaaatctggtaagagctgtagtggaaagccacattagcccaccttttaatggtatatatatatacacacacacacacacatatatatataaaatcattatgccatcagtttgagggagagcatgtatgccaacattgtagagactaagtgcccatttatccataattaagataagcagacttttccccattgtactataaagttagagtttggggctgggtatggtagcttccgcctgtaatcccagcagttt

SEQ ID NO: 152638 - DNA, 146 bp, Homo sapiens
gatggtctagtttagaaaacaaaagtaattcatcaagttaagcatatacaagagccaaataattgtaatctggattttaattgctgtattaatatatcaagttcagttggtgagaatgggattgcttttggggggaggagggacat

SEQ ID NO: 152639 - DNA, 352 bp, Homo sapiens
  misc_feature (48)..(48): n is a, c, g, or t
ggtgatctagaggatccctaaaggtggagggtggagtgttgctgcagnacagctgagtggagggatatgaagcaccgcaggtctttgagttttaagctgtggctcgtaatgttctggcgagcagtttgttgatttaactgttgaggtttagggctaagcctcccagagtgctgggattacaggcatgagtcaccatgccaggctgaggtctcttcttttatgtgtagcaaggagctcagttctttggagagagtgggcatgaaggtcagcctccctcatcctacagggagaggacccctttacgatgataatagggggttggaagaggcagctgtgcctggtcctgcatctt

SEQ ID NO: 152640 - DNA, 262 bp, Homo sapiens
cgaacaggacacgcgcgtagaaatgaaactcaatccatacaaaaccattttgtattatgaactacacttattattctaattatttatattcatagttttgtttgggagagttgtgtgcctaacatctaatccatacagaaagcaccctggagcctttgtactatagaaatggcagtcagaaaactaagtttaacctctgggcatatcaagttccttgataacacacatctctttgaaaaaaataagacttatattgttcaaa

SEQ ID NO: 152641 - DNA, 499 bp, Homo sapiens
atcctggcacttggaataagcaaaaccaaacaggacaaagtactaaactacaattagtaaggttctaatacagctctaaaaaggaatgcttcctatattgatgataattagttgatgatagattactgagctgaaaacttgacatttgattgctacttttaagtgttaggcaaattaagaggtatggaaaattggacatatcatagtgtaaatgaatttattttctccatggcaggatttggttgcttgtgaacatatagcagattctctaatactcataaggctccctctttcctttaatacgaaggatgtaggagaagttcagcaagcacttatttgttaggttgaattctaaatatggacacagtgcagtcttaaattatgttagaaaaaggacatttggcttagtgagacacattaatcatagtgcagtcttaaatagatctgaggacttacaacagtgcatagatatgtctttaaatcagcagaaattcagaag

SEQ ID NO: 152642 - DNA, 583 bp, Homo sapiens
cagtgtttgattttctgttcctgtgttagtttgctgagaatgaaggtttccagcttcgtccatgtccctgcaaaagacatgaacttagatgaggtttctttggtgggaaaagctgaatggaagagctggaactcgcggaagaggaagaaccataagccggcttagagaaaatggacttctgatgtcataggtacctattccaattgctttctatcatgatccattagtgagttagcgccataatattgctgtgccacaaaccatcccaacccaaaactcagtggcttaaaacaacaatcatttactctcactcatgtgtgtggggaagcagatctaggctgggcttggcaggcttgactccaggctacacactgggtccatgccttcacattcctctattttccctggctaccgggactaccaggggacgttcttctcacagccatgacaaacgcgtagaagggcaagttcaatcgggcacattttatgcctccacctttcttctgctaacatgtcattggccaaaacaaatcacataacccagccaaagtcaagggacaaggaagtccatttcacctctagt

SEQ ID NO: 152643 - DNA, 382 bp, Homo sapiens
aacgggtgatgcggttgcagaagaaaaaaaagaaaatccatccctgccactcacaagctgctacctacagcagattactatcctaagcctcaattttgccatctgaaaaaaacagaaaaaacagttaataatacctcaccaggttcttgctaattctttagtaacacagaggaatcttttagcccttctttttttgtcttatagcttaaaccatgctgcaggaaatgtatcaatccaagataaaagagctgaaatccaagaacctccccctcacattttgtttgtttgtttgttttgtttttttttgtttagacacaggatcttgctctgtcacccaggctggagtgcagtggtgccatcacagctcactgcagcctcaaac

SEQ ID NO: 152644 - DNA, 268 bp, Homo sapiens
agcaaattttaaaataagtatattcagaatctaaccctctctaatactcctcaggttcctgtctagatttttacggtttctttcctttttttttaaatagagaaagagtgtttttgtttgtttgtttgtttgtttgtttggacatagggtcttgctctgttgcccacgctggagtgcagcagtgtgatcctagttcactgcagccttgaattcctgggctcaaacagtcttcctgccttagccttgcgagtaacggggactacaggtg

SEQ ID NO: 152645 - DNA, 257 bp, Homo sapiens
catcaggaacagataccacatgttctgagaaggggacagaataatctcttcagggaagctgggaccgagacctgtgaggcaggaagtgggggttcaagcctagccaaggttcctaaggccagcgacccacaccgggctctcctgggtcactttcagcagggggggagagccttcgatgacctctaagggcccttccatgtgctcacctaaaaacggatctggttaacctcccccgtcaccacccctcactattgctc

SEQ ID NO: 152646 - DNA, 404 bp, Homo sapiens
aaggagacagagccaagattaaagcccccagttcgtcccaccttcctggccagggctttttcagaaaggagatgtccaatggggagtgggggttggttctttggtatctaaggtttccagctcagcaggagttagggaggttggggcctgcaggttggcagagggtgcaagggcagatggaggccacaggaaagggtcaggtctagggtaggtaggaaagagctggatctgatttcagatgtatacctctgtggggccttaggcagcactcatttcttcttttccttttcttctctcttcctcctctttcttcttcccttcctccctccctcccttcctcctttcttcttccttctactcttcatttcttcctcctcctcctcttttttttttgagatagggtc

SEQ ID NO: 152647 - DNA, 379 bp, Homo sapiens
tggacttctggcatacctggacttctggcatcctggaccttctggcatacctggacttcggtggcggggacaggggatgagggcagaggacaccctagaaatggatcagagaacagcacacaggaaggggtagcagggagctgggagggcaaaaggactcagcgggccctgagatgggcagggaggaggtgagagggaatctggtgtccttagatcactggtcattagtaggggtgggatgagagagaggagaggaccaatgaagtagaagaaaaaccaggaaagggtagcttccaggaagatagaaaggaaatgatcagctatgtagagttaattggtggtactaacaagatcagtgtcagtgaggttttatgggcaa

SEQ ID NO: 152648 - DNA, 451 bp, Homo sapiens
tttccgctctccaatgaggccttgactttgcattccctcagcttcccatgatctgtttatatgatgtgaaagggcactttctggaaggctctgtaagtgttctcaggttattaccagtgtcccccagtacttctggacagactgtagagctcctttggctaaagtgctagaggcagcattctgcatgggggaccaacatgtatcatcacctcaccatgctgaaaatctacagcctggcccctgatccaaatcagcaatatactaatattaaggaaaaagtaacagaaaccaaaatcacccacctaatgaagatatatgatctagcaaaagaaaacgaggctgagaacatccacaggtaagccaggctatgaggaacatagctctgaactcagcaggaacaaaatgaggaaccggggagagtacagagaagtgttaactcacactggtagga

SEQ ID NO: 152649 - DNA, 220 bp, Homo sapiens
aagagttaggatgcatcctgatggtttgttagggaagtctagtcactgtattatctctcttcaaaactgacaaagcatttcacacacattatttcatttggtcctcagtgagacagtcattctcattctaaagataaaattaaattgactttcattccttttagatttattattgtttattctgtcttattccttcctccgtgtaagttttttttttttt

SEQ ID NO: 152650 - DNA, 414 bp, Homo sapiens
gtcatgccattgcactccagcctgggcaacaagagcaaaaccctgtctcaaaaaaaaaagaaagaaaccaccaaactgttttctaggaagtctgtacagtcttacattcacatcaacaatgtatccaaaaatgtttttagatatttagataattaatttaaaccaaattttgtattctaccttcccataccccatttttactgtatctggatttaggatcatcatccaggagtgtgcagtgggcttactacttcccctttctaaatcatgaatcacttcatcttccttttgtgaatcatgaagttaaggattattgtaccgcctaatgcagatttgttgtgagaccctaaggaagaaatggaccagaaaaaaatgacttaagaattataaggtcaggcatggtgactcacacct

SEQ ID NO: 152651 - DNA, 181 bp, Homo sapiens
ggaacaaagagactactatttgtatcctttcatggatatctcacttgacacttcacaaaacaatcctgtgaaatataagattatctccttttttttttttacccggttctccattaaccgggccggcatataaacctgggttttttggcccttggatggtctcgggcccgttgggaaccgg

SEQ ID NO: 152652 - DNA, 200 bp, Homo sapiens
tgcgtgcgtgtgtgtgtgtttgagtgcgtgtgtgtgtgtttgagtgcgtgtgtgagtgtatgtgtgagtgagtgtgcgcctgtgtgtagcagtgtagtagcggaggaacaaagaggtacaaagaggaatggaatcagtgaagctcagatccttaaagtcactttaagttgggttttcaggggggattttacaggcttctg

SEQ ID NO: 152653 - DNA, 376 bp, Homo sapiens
aagaagcagatagaaggtcaaatcatacatggatctggaatacatttttctgttaaatttgaaacaaaatatttgctattatttgagttcagcacaaaaatctagtagtatcactgaaaatccccaaaatattctggttttggcagaatttcaatttctcacttagactttcaactcatgtttgagcagaaagaattacatttgataaaatctgtaaatgaggaaggcatactttctcatccaaataattttacaagtcataccttccttatttggaatttgagataaatgcataaactattgctagtaacttagaaaaatatattgtaaacctacttcctatttaaaaaaaaatataagacacacacaaaaaacc

SEQ ID NO: 152654 - DNA, 862 bp, Homo sapiens
cttccacacagggatgctgtgatattgtgatataatacagactattcagtttggtggccaaaagtgttgtgagaccatagaagaggaaaaacagtgttttttttccatattcaggtgtgcacccagggccaggcggctgaccatggttgggaatgcatgccccactgcactctggtcccacccagtctcacactgtcacccccagggctcaatgcggaaccgtgtgcaaggctagcccttatccaaagcacaactcccagcctgggtagcacagggagaccccgtctctacaaataattttaaaacactggctcagtgtggtggcatacacttgtggtcctagctactcaggaggctgaggcgggaggactgcctgaccctcagagtttgaggctgcagtgagctgagaccgcaccactgcatcccggcctgggcaacagagcaagacctaacctcaaaacaaacaaacaaacaaaaaaaacagaaaaccccacacagcacaactgtaccaccaccgctcctcctgaggcgagagcacccccaccccgctctccagcacccactctgcgggtaggcttcgagcaggctgacagcctctgcagccattcagctgagtcactgggcctcggacatgccgagcactagagctcccctgccatttccctaaagcagagggacaacacctgtgccgcccgcatgtgcaagctcggatcctggccctctgcctctttctcattcccagtgcaaaaaccaccccagaaaagcaagagctgccaaggccaacagccttgcgcactggagagccgtcctgaccaatccctggagggagctccatgcaagctaccagggtaaacgcataacg

SEQ ID NO: 152655 - DNA, 493 bp, Homo sapiens
agcagacccagatgggacccagctggggcctgaaacagcggccctctgaaacccccgcctcctcctgacaaggccaggtaaagggtgatgcagcccaaactcaggggtgcagctcagagcacccccaaccccgccagggcagaggctcagcccaggacagcgagtgcccccaccttgggccctggcctccgccctcatcatccaggtgagagctcccacaggccctcccaggagtgggcttctccccagagtcctgggtgggggatggggatcagagagcagaccccgtctcatgaccgctccccaccaccgtctcagccaccaaagagaaatcgcttcaaaaggtcagctaggaggtcacctcatccaggacccccaccccagggctgccctggacagcagccctccacagcccagcacaagaaaatggagcagacgggccggctgcccatcaatcagctattaatagtagcgtgtgccctggcagggccct

SEQ ID NO: 152656 - DNA, 185 bp, Homo sapiens
cctggcagcccccgggctgatagcatttgccctgtggggtgcagtgttacccccatctgatcaagaccaagggcccacccaccgtgttcccagctctgccacgctgggctctgtgaatgcagacatgcagcatggccagcctccgggcagaccacccacccccagaacaggcagagacagggcac

SEQ ID NO: 152657 - DNA, 334 bp, Homo sapiens
cagagggagctcccccacttctcagtctccaaatgtcggtggcccaaggactcaggcctcaatcttcactttttctctatctactgaagtgatctcaccctgttgcatggttcaaatgccacatgcatgccaacaatgtccaaatttctatctcagaactccgatctcaaatatccaactaccttgggaggccaaggtgagtggatcacttgaggtcaggagttcaagatcagcctgaccaacacagtgaaaccccatctctactaaaaatacaaaattagctgggcgtggtggtgcatgcctgtaatcccagttacttgggaggctgaggcag

SEQ ID NO: 152658 - DNA, 283 bp, Homo sapiens
gatccaccactgttcatggtgtgatgctctaggccagttttcttttcctctgtaattagctagttctcctcagtttggggaaagcctcttctttccccattatggaattttaattgtcacaataggaattggcatctttatattataacaatgtcatcccatctagcacaacagggactctccttttagtcagatcttgctttatgtcttttaataaaggcttaaaattttccccatgaaggtcttatacagtctttattaacttcatagatcctttatcctt

SEQ ID NO: 152659 - DNA, 372 bp, Homo sapiens
ggatgaaggcagcaagagggcagcttgaggggagtgagtatgggggattgagaggaggggcagatgcagttgggggaggagtgaaggtgctaaagatgggtgccttgatttctctgaggaccaacatgactcccttccatctagaagggccaggcagctgtccctcggtgcttattaggtatgcatctctccacagcctcttctctggctctggagcttcagatgtgtgtgaaataaaagcagtgagctgagaacatcttgtcatgttgatctgcagctgtctcaggtaccctttacagggacattctgcagaaagcaagccaagactgcattcaggggtattttagttcacagtggccttaaagacatgca

SEQ ID NO: 152660 - DNA, 284 bp, Homo sapiens
tctaggtcagcgttgcttccactgcacctctgaaagtactcagctctgccccaaacctggagagtgccgcatttctccagactgcaagaaacagtgtggatgactcagtggagatcataatggcatctgagtgatcaacgacagcctccagttgccacttggtgagagaacaaaggaaccggggcatgctcagctatggctgcaagcccttcaagtgaagctgggcacttacccccttcattccattctcctcaggataacagattaaaattccagaagtgtgc

SEQ ID NO: 152661 - DNA, 343 bp, Homo sapiens
ttggaatttaagatgttgtcttaaagtagtgctgatttgaagtgcttttactttcagaaaaatttcaataaattactttgtatagcttgcaccagccacactttaagacgttggtaatgaacagttaaaatttgtccatctgtcaaactgtgtttgatgacagtatatgttgtaagagttgtgtaatgtatcagcatttgaacaagaataatgaacaaaaaaaggtagttttctttgaatcattacttaaatatctatcttgcctacagctcagaaacttgacagaaatatgtcttttttcatgaaacttaaaatcacctttcctgtctttaatatctaatca

SEQ ID NO: 152662 - DNA, 296 bp, Homo sapiens
tgtggtttcttacagagtagggaggagttataaactagggatggagaactctatcatatcacacatttttttcatatttaccatttctataactgaggtacatcttaatatcgttagcttgtcaaagtttagcagcagtattttgtcttggtggcacgtaaaataatggttgctattacaaatgatagcatcttatagttgatgaaatatttgagcagctctgtgagctattccctccgtatcacaagaaagtaaaattaacagacagggaggagggaaagaattttgcagggaga

SEQ ID NO: 152663 - DNA, 409 bp, Homo sapiens
aatacctcacaaccatgaagcaagagttaacttttctcatgtaacacagtgtggagtatggaggctggtttcttcactggatgtctgcaaagacccaggccactttggtctctcctttggcatccctcatgcattggcttgccaccatagcgtcacaaggcctgcaggcctcatagctgtggtctaagcagaaagaaaggtgaaggggctggagccttttctcaagaaatagaagcttctcctaaagcttcccttcctctgattctttccccccattatttgacctaggtcacatgaccattcttggctgcagaggaggccaggaaagttgggttgggccaattgagattggcttatcaatcaggattcaatagctgtgtcctcaagagtacatgattctagtaacaag

SEQ ID NO: 152664 - DNA, 483 bp, Homo sapiens
tcctcatccggtttaaatcctaaagtggaagaaaataattcaagacaaatagccctagtcttctgggagatcctcctgggtctccctataagcagctttagaaaattaaatgctcttttaaaaaagcaagagaaaaacgttctaaataaataaatgtgagccattttaagtataaggtattcctcctacagatattttcctctatacaagtgcttaggtagaaattcgaaattatcttatatcattcattatcagtattcattctgctgatctcttatatcaagattaatcttgtatgttgatattctgtccttacattgattttgattaagatttggtgtcatgaagtaaaaaagatataaacaattaagtgacaccttctcaaggatgggcaactagagaaatgcactgcctcttgagaaaattgctcatcagatcttcaagaattaaatagaagatgtttaaaattattgttaaggggaa

SEQ ID NO: 152665 - DNA, 504 bp, Homo sapiens
ggagtgtttgctgtgtagcaggtgttgctctaagcagttttcttatatcaaacacacttaattctccccagcaacctatgagagaggtaatattcccattttacagatgaacaacagagaggttaagtaacttgccaaggccaaacagctcgtgaatagcaaacctgggctagaacccaggtaatgtggctccagaacccctgcttttggtcgttctgctattctatgaggtagtcattatgatccccctcatcagaaagcagaaagcatgagattcagaggggtgcaattacttgtccaaggtcacacagctcatcagggaaggagctggtacccaggcccagatgtgtgggtcacacacccagactccaggccacctcccagatctgaggccgctcctctggagtcaagtctgtgcctgggagaagcaggaaggaccactggacctgctgtcagtggggcaggcacaggctttttccagtcccaggctgccccctactggca

SEQ ID NO: 152666 - DNA, 361 bp, Homo sapiens
gattttttaaaaaattgaggtaaaattgacatacagtgaaatgcataggtcttaagttctgtatacagtttgagtattaacaaaagcgtacactggtgtaattcacatacctattgagaatatactacatgttttaacatagaagtagcatttgaaattattttccatcaagaaaatggatgtcttaggaatattttctctttttcattttgtggcttctacttgatataccactctgtattcttcagggatgatggcagtggacaatggcatgattattccattttgagaagtgtggccttcatcaccaagatagctgtgcaaaatgattagacatcataatggactttcgttagctaaa

SEQ ID NO: 152667 - DNA, 138 bp, Homo sapiens
tacactgcacaaattatcctatttagattactttggttcttgctcaccaacaatcttttctttcttacacttcgctggttttctccaaattccatctcacaaaggggtcactttttctagcaactgatgtaattccat

SEQ ID NO: 152668 - DNA, 379 bp, Homo sapiens
ctggatgaattcagacacccttgtgtgactgagcaatgcgtgaggaactgttttcttgcagaactatggctccttggaggaaacacggagatggcacgccccgttccctcgatgtgtagaatattgcagtgaaacctctgtcattaagaactgatgaccacctagtccaaagcagggaaaaggggcactcacagaggttaaatgtaggcatcgaggcagaagaaaacctatcttaggttcagcccccactcatgcatatctgcggttttagaaaacactcttaacgaacaaaaaaacctatggtcagttgctttagccacataatgtaaaccacaaaggctcacactggcctacttcggggagtgagaacaaaggaggg

SEQ ID NO: 152669 - DNA, 342 bp, Homo sapiens
catgttgggcaggatggtctcaatctcttgacctcgtgacccgcctgcctcggccccccaaagtgctgggattacaggcgtgagccaccgcacccggtcagagccccactgttcttaatctttgtgttcttccttttacttcatgctctcttttgtgaaggtgaaaagcagttttacaaactagaaggtgctacataagatgtggtatatttatctgacttggtccctgtactccagagattacagtccatgaggaatgtgtcttctccaggctaaacctactcatttattgccactgttactcgctggatattgctgtcactattttggccacttttcttt

SEQ ID NO: 152670 - DNA, 301 bp, Homo sapiens
acaacaggcctggcttggactgtgtgcccatcattgccaaggagagggggtaaggtattataattggcccaatctgagtcatatgtgaatccctgaggctctgggtgggactggggtctgttttgagtggaaggaggaaaatggtaaaaggaagacagaacgtatactctgattagcttcttctgagtgaggtggcaattcatggctctttgtaggctcacgtgatacacgtctctggaatctaggtctcaaattaatttgcttgcaaatagggaagatagaacacatgctcctgtgaata

SEQ ID NO: 152671 - DNA, 251 bp, Homo sapiens
tcggccgacgggattcctgctcaagaactttcagtggctccccagtgccaaagaatcaaagaccagactccttcacgccatttacccccaacctgaggggtttgggaaaacaagtagggaggcttcccagggtgccttcctaagcctctcaagaggctcccgcctctctctactggctgagtgggaggagggggcagggtcgctcccttgggctcaggacacaggtagctggaggacaggaaagacgggga

SEQ ID NO: 152672 - DNA, 341 bp, Homo sapiens
ctcccgggttcacgccattctcctgcctcagcctcccgagtagctgggactacaggcgcctgccaccgcgcccggctaattttttgtatttttagtagagacggagtttcaccatgttagccaggatggtcttgatctcctgaccttgtgatccacccgccttggcctcccaaagtgctgggattacaggcatgagccaccgtgcccggcccttggtgggcttcttaaacccacttgatttaacaaatcacagtgtgctagtcccactcccagagtttctgattcagcagggctagggtagtctgggtttctaataagttccagttgaggctgactgctgt

SEQ ID NO: 152673 - DNA, 346 bp, Homo sapiens
tttaaacattgcttaggcttaagcatatatctgcaactgtcaggattgttctggacatttatatatgttctcccaaattccaggcatatagtggtccaataatatagtatttttatatttaaggtattagaaaagtcttgttatttggtaggaacacaatgctaggacacctgacttgcaatctgcatttgtatggcagcagatgtatttatttgaagtactggtggagagcaaccattattctttggctaggaaagtttgtttttcgtttaatcagtacctcataaatgctgagctttgaggacaaaggaatgataattagacacatcctgagctttgtaactgg

SEQ ID NO: 152674 - DNA, 222 bp, Homo sapiens
ggcaggggagggctcgggggtacagccgtgtacatgattagttagcgagacagtgaggagtgtatgcggagtggacacagctgtgggtgccgcccgcgcaaggctgggggtcgctgtgccagccctgctcccatgtgggctcccagctccccaggtagggacgctgaccccgggaggtgcctttgcctgcatccactggagcctcaggagcatgcgttccgt

SEQ ID NO: 152675 - DNA, 469 bp, Homo sapiens
tattttcttcaaccaaaaaaaatggttaagcacacaggaaaccatctgaggtgtagtgctgatccagttttcagaaaaccacaaaggaattcacttcagatctttatttttggcagctaaacagatatcacaaatgctaaagtccttgaaataataaaagtaagagatatcatttattcagtgtctgatgaccttgtgctaaatccttttttttttttttttttttttttttgagatagagtctcgctctgtcacccaagctggagtgcaatggcatgatcttggctcacagcaagttccgcctcctgggttcacgccattctcctgcctcagctactcaggagcctgaggtgggaggataatttgaatctgggatgtcaaggctatcatagtgagctatgatggcaccactgcactccagcctggatgacagagcgagaccctttctcaaaaccaaaacaaccaccac

SEQ ID NO: 152676 - DNA, 593 bp, Homo sapiens
agagacgctcctcacttcctagatgtgatggcggccgggaagaggtgttcctcacttcctaggtgggatggcagccgggtggagacgctcctcactttccagactgggcagccaggcagaggggctcctcacatcccagatgatgggcggccaggcagagacgctcctcacttcccagacggggtggcggccgggcagaggctgcaatctcggcactttgggaggccaaggcaggcggctgggaggtggaggttgtagcgagccgagatcacgccactgcactccagcctgggcaccattgagcactgagtgaacgagactccgtctgcaatcccggcacctcgggaggccgaggctggcggatcacttgcggttaggggctggagaccggcctggccaacacagcgaaaccccgtctccaccaaaaccagtcaggcgtggcggcgcgagctttcaatcgcaggcactgggcaggctgagtcaggagaatcaggcagggaggctgcagcgagccgagatggcagcagcacagtccagcctcggctcagcatgagagggagaccgtggaaagagagggagagggagagggagag

SEQ ID NO: 152677 - DNA, 420 bp, Homo sapiens
ggttaaggtcagctagattcaggtataaacttaggggaggtataaacttatggccaggacaatgttcagggttggcttcagattcagattcagggccatgaaaagcaccagtgtactggattcaaaatcaatcaaagtcagtttcaaggacaagtttaaaatgagggcaaaacatggtcagggtgatggttagggtgaggacaagggtcagaattagggctagattcaaattcaaggtcaagttcatgcttatttcagcttaaggtcaggatgactgcatatgagattcaagatcaggatcaatacgcctgtaatcccagcactttggaaggccaaagtgagcgaatcatttgaggtcgcgagtttgagaccagcccagctcacatggtgaaaccgcctactaaaaaatacaaaatttag

SEQ ID NO: 152678 - DNA, 442 bp, Homo sapiens
aagagaggttggttaattagtacaaacgtatagttagatggaaggtataaacttaggggaggtataaacttatggccaggacaatgttcagggttggcttcagattcagattcagggccatgaaaagcaccagtgtactggattcaaaatcaatcaaagtcagtttcaaggacaagtttaaaatgagggcaaaacatggtcagggtgatggttagggtgaggacaagggtcagaattagggctagattcaaattcaaggtcaagttcatgcttatttcagcttaaggtcaggatgactgcatatgagattcaagatcaggatcaatacgcctgtaatcccagcactttggaaggccaaagtgagcgaatcatttgaggtcgcgagtttgagaccagcccagctcacatggtgaaaccgcctactaaaaaatacaaaatttag

SEQ ID NO: 152679 - DNA, 615 bp, Homo sapiens
caacctcaatcctgtcccaacaggacaccctgcctccggctccagcccccaactgcatcctaggcactgagccaaaggaactcttctaccacacaactgagagcccaccactcccccggggcgtccttcaacaggggtgaaagggttcggggagcacacaaggggcaaagggcaagttgaatcccggattccaaaaggaggcacagcgcaccaggcctcagaaggcaggaagacaccgccaggccaagtgggaaggctatttagacaaaagaagccgcctgcacagggtcttgtggaaaaggtcaaaacagcttcgtttggctggcgttaggggtacactgtggtctattctaaacaagctgaactgagtggtcacgggcagcatctgttcttctgattcagtgacacccttccacaaagcttgctaaataggccgggcgcggtggctcacgcctgtaatcccagcgttttgggaggctgaggcgggcggatcacgaggtcaggagatcgagaccatcctggttaacacgatgaaaccccgtctttactaaaaatacaaaaaaattagccaggcatggtggcgggtgcctgaagtcccagctactcgggaggctg

SEQ ID NO: 152680 - DNA, 655 bp, Homo sapiens
atggcacaatctcagctcaccgcaacctccacctctcgggttcaagcgattctgctgcctcagcctccctagtagctgggattacaggcatgtgccaccacgcatgtctaattttgtgtttttagtagagacggggtttctccatgttggtcaggctggtctggaactcccgacctcaggtgatccgcccgccttggcctcccaaagtgctgggattacaggcgtgagccaccgcgcccggcccaagagggctctttcttccttcatgggccagggacctgcccagaccattcctgtcccctcctacaactcaggatccacagggtagccaaacctcttggagataaactccccctatatgccccagtccagggggctttgggtttcttgagctgggatcgaagaccccatgtccccaggccagactccccaagggctgtcacaatttgccaagcagcaggagcaacccttcaaggcagggagtgccatggctggaccagcatcaccttcactgctgagccccagtgctggggtacagccaaatcaggtggcacacaggctggactgggtttacaggcttcatagttttgtttcttttgttttgtgtggggattttttgcttcttaatttttgggggagacagggtcttgctatg

SEQ ID NO: 152681 - DNA, 776 bp, Homo sapiens
ttgaatccagtagaaatgacccaaaggatgatctcaacaacttatgtacacctaattcagggccagtctttcttcctctgcctcttaccccggtcagaagtcacatgagaaagaagagctccagggggcagttcataggaagagaactttcttttctacctctccattctacacaagataatacgggcatcccaaagaagactcatcattgagagatactcctggcctaacatattttcctttagcaaagagaaatgtctttatacccaagcactgggtattcccccatccccccactctgtagaagaatccagccctccaatgagcctattttggaagattctgaaccacagcaacattttattgtttcttttctaaagaaattttgtgtttttcttttagtttcattactattaagtgattagaccattattcagatatagcttgatagaattccaattcaaatattttacaaatgcaggatatttaaatgtgagccttaagagtaaattgcttccattttaaatttattttgtctgtcttttgaaataatcttggaaattttcccttttaattttactgctgttaggtgaatactcaatttcttatgctgaagcctgatagaattataattttttttttttgagacagagtctcagtctgtcactcaggctggagtgcagtggcaaaatgtcagctcactgcaacctccacctcctgagttcaagtgacttagctccccgagtagctgggattacaggcacataccgccacac

SEQ ID NO: 152682 - DNA, 396 bp, Homo sapiens
tcatgtctgttcaatattaccatatcagagaggccttcctcgctgtctcatctaaaatattaccctagccccctactctgccctaaatatctgctgtcattattataaatatatactaacccatttaaaatgacccctatcactttgtctttctgcctatttgtattttcttcatagtacacattactgcttctactaggcatcatatttgattattcggtatttcctcccactagattgtaaactccggaaggacaggaacataggttgtttactggtatatccctgtattctagaagaatgcttagccatgtaggcactcaatacttattgaatgaattaatgaaaggtatagcctcatcccttgatcttttgttactaggatttctagcttta

SEQ ID NO: 152683 - DNA, 260 bp, Homo sapiens
ggatggcagcagtttcaaatctccctgagatcaccctagagctgcagtcttacaagaaatctcaaaggggtactatatatggaaagtctctcgagtgctgggacaacaggcgcgcaccaccacaccaagctaattttttgtatttttagtacagacaaggtttcaccatattggccaggctggtctcgaactccccacctcaggtgatccacctgcctcggcctcccaaagcaatgggattataggcatgagccaccagt

SEQ ID NO: 152684 - DNA, 751 bp, Homo sapiens
tggtttctggaggtatgttttaataacaaaatcaagtctggtcaatgaaagctttcagaaaatggttttataaaaaaaccttgcattctttttagatcaagagcagttttcccccaaaccttaatgtcagtcgtacgattttcttcttcttattttctgttctccatttttgcttatttgttgaaaacattttttagctatgtggagacttgcctgaatgctgtctcctatttaggtagaggccaataagatgatagctggaaaagcttcgattgtctatcatgaagaccaggatggaataaaagaaaaataagtaatgcagttgtgatattctgcagtatacttcggctctcttaataagatcatgctgtaagcagtgtcttttaactgaagcttgcaacctgttggtgggtcatgaagtagattttaaacattgcaattagcattttatttaatgaatagacatagaatagcatggaaatttaagagtgactatagacttaagagaattgtaaataggacaagtaaaatagaaaaattaatgtatcacacataaaaaggggattttcatgaaactttagtattagttccacagacacacagatacatcaaatagcgtgtgagtcaggatttagtccaggaaacaaaaattacatttatttaaaacaggaagatatttaatacaagagaatttgatgcttataaaatagttggaagatctaagatatgagttctaggctgttcttgctgg

SEQ ID NO: 152685 - DNA, 242 bp, Homo sapiens
ccatcttggcctcccaaagtgctgggattacaggcctgagccactgcgtctggtcttgtgctgatgttttagcaaggtttgagggtgacacatctcatgcctgagcatgaaaactcaatcatcacacttataaactataaaagaataacccccatttgatatgtaaggaaactaaagcccagagaggttaagtaacttacccaaggtcacacagctcatatatggctgagctgggatttgaa

SEQ ID NO: 152686 - DNA, 301 bp, Homo sapiens
ggcagccttgaaaagcctacggacccttctcagaaggaaagacacgtgcaggacaaaggaatccaactctgattgtaatacagtgatcaaaatattttttcacactgtgacatagcaattcatgtgcttcttcatgaatgcattaagtaaaaaatcacctgtggcagctttaataaccactgtgacttagaagcagagatgagcataaatgacatttcaaggtgcctgctggaagataacgtgataggaaatgcctgtgatttcttttggtaacagtcacaagttctgctaacactgctgt

SEQ ID NO: 152687 - DNA, 123 bp, Homo sapiens
tctcctgcttcagtctttcatgttgctgagaccacaggcatgtgccaccacacccagctaatttaaaaaatttttgtgtagagatgggatctcactttgttgtccaggcttatcttatactcc

SEQ ID NO: 152688 - DNA, 482 bp, Homo sapiens
gattgtaggtgtgagccaccgcacatggccagtatttctgtttttaagtgacctcttggggatttgccacagtggctgtttaaacatccctcattgtcctacatttcctttccttttgcttcccttcacttaatcttgcctcttaatttatagaaaccctcagattggagctcctttaccttcgtgccaccaaatttgagtgccacttttcgtcctttctgtagtgagttctacttggatttttcccaagattttaaatctgcccttctatatctttttttcatcaactttaaacaaaataaataaataaaatctagcacatttagttatctttaccctccatctgcttttcactctcctcccttctacaagccaccttcttaaaatagttgtctgtgccctttgagcccattgcagttctggttttctctttaaccacaacattgaaactcttttctccaaaatcaccattaacccccttg

SEQ ID NO: 152689 - DNA, 124 bp, Homo sapiens
tgggactgggaatctgtggcttacagagattatgcaaaaataggaggggaaatttggcacccctgccagaaagaaagcgtgtggccttgtactgtctgattcacaaaggctcggcaggtcacaa

SEQ ID NO: 152690 - DNA, 288 bp, Homo sapiens
cccacattcagcctattttggagatcccagctaagagcgtctttgtggtttccgctcgccacctccatgtcacccccaggaccttcctcttgctcctgggaaagtgtgttagtctctcctctcctcaaaccttccctgccgtggtatagatgctcagtcacctccttctggtgagtgctggagcttcctggagggtcttttttcagggttacctcctgcttgtctacccttcgtcccatccccgggatcccccaaactactgagggtgtatcatcccctccttggcag

SEQ ID NO: 152691 - DNA, 324 bp, Homo sapiens
gggatgttccatgtgatgggtgaagggatgttccatgtgacgggtgagatgtgatgggtgatgggatgttccgtgtgatgggtgaagggatgttctgtgtgacgggtgagatgtgatggctgacgggatgttccgtgtcatgggtgagatgtgacaagtgatgggatgttctgtgtgatgggatgttccgtgtgacgggtgatcggatgttccgtgtcagcaggtgacaggatgttccgtgtgaggggtgaagggatgttctgtgtgacaggtgagatgttccgtgtgacgggatgttctgtgtgacgggtgatggtcagctgt

SEQ ID NO: 152692 - DNA, 833 bp, Homo sapiens
cttgaagatgaaacacagataattttaatacaatgtgaaaaagtgtatgggtgtgtagaagaggggttcttagagtttctggagagaatgattctgagctcggttttgacaaaagaggagctactgaggctaaaagtggatgaaaagggccttctaattaaaagaaacaagacaggactcagaggtgtgaaacaaatattatgcatggtgaattacaatgagttgggggtattctgtagccctaaagtacaaggtataaagagacagaaaatgatcctggaatatagacagaggatacttcatctctcatgagcaatgaaatgaaaatattaaaaagctcttatcaaacacaaaaaaaaaaaaaaaaaaaaaaaaaaaaaaaaaaaaaaaaaaaaaaaaaaaaaaaaaaaaaaaaaaaaacaaaaaaaacaaacaaaaaaaaaaaaaaggcagggcgaccaactataattactcacccagaggaagcgacacccatatagcgaaccccgccccctatctgaatacaacgagcccacacacaggaggagccgacatcaaccacggagcgcactcggcgcttattctaaccacccctctctgtcgcacggctgcaaaagcccgctcttaccgagcacatcttcgtgcaacaacgacccaccctcctctctgaggggcggcaaaccgactatgcgaccacacaccctcccacgacgagttatctacccccacctgaggacgaccatcacaccctagccgctctctacggctggaccccccctctgttcctgtgtcagccaccaacctcctgccgcccatatgatgccaacatctag

SEQ ID NO: 152693 - DNA, 498 bp, Homo sapiens
cagcctcctgagcagctgggactacagccgtacgccaccatgcctggctgattttttaaatttgttttgtagaaacagggtctcatgatgttgctcaggctagtcttgaactcctgggctcaagcagtcctcctgcctcggcctcccaaagtgctggaattacagtcatgagccacctctcccagccaacacagtctttctcttactgtgtgccacagtagtaatatctcttaatatgaaatgggctttctttaaaggcattttttcagagtggcaattgtatggaaaagttgactaattaaataatcaacagactgttaactcatctggagtaggggcattcttatattcacctgtgggtgcagattcctcagcatgtgctggctttcctgtacataccaattcacattattggttttttgtttttaaaataagactatggtcttgctgtgttgcctaagctggtctggaactcttgggctcacgcagtcttcccac

SEQ ID NO: 152694 - DNA, 273 bp, Homo sapiens
gcatttaggctgattccatgtctttgctattgtgaatagtgctacaatgaacatacacatacatgtgtctttatggtagaacaacttatattcctttgggtatatacccagttatagtactcctgggttgaatggtagttctctttttggtgagagaatattatacttaaatgagaatatgtcacaaaaaatttcccacagtagacctctgcctatgaaaaaatcatgtagtagaattagactctagaatcacctcctaggatcaaatttcag

SEQ ID NO: 152695 - DNA, 270 bp, Homo sapiens
acaattagcatctctggactcagtttaccatctgtaaccatctggtaggggaaagagctattaaaaaaaaaaaaatcaagggttccccaaactgactgcccatccaaaagtcaccttgagagagctcagtaaaagcctagatgaaagctctcctctgggtgactcctatgcacagcaaggctagaacatttctgtaccaggtggtctcaaaggcctcagccaactgaaggatatgggctcctactgtggttaaaaaatgttaccaaattt

SEQ ID NO: 152696 - DNA, 175 bp, Homo sapiens
atcacagagccccaaatattagaaaaaaaaggtagttgctatataatagaaagaccacaggctttgagatcaggcagaactgcattcaactttctcactgattatgatagtgtaactttagacaagtgcctaaacttcttttgtttttttttctttgagacagagtctcactctg

SEQ ID NO: 152697 - DNA, 455 bp, Homo sapiens
agtgtgaagctagatccagaggttggggccatctcctgatggggcattatctaggcaatctcgaatacggatctttatgatagtttctgctctgccacctttcaagttgtaggtggccccaataaggagaggaatcgtcccagaataatccataaaaggtctggttactctgacagacgtgccgtaaccgaacctcaaaccccgtctccaattcggatgttcaggaggactcacaaaaggaaatggctcggctgggcgcggtggctcaacccggtaatcccagcatttagggaggccgaggcgggcggatctcctgaggtcaggagttcgataccagcctagccaacatggtgaaaccccgtctctactaaaaatacaaaaatgagccgggcgtggtggcgggcgcctgtaatctcagctacttgggaggctgcggagcgagagtcgcttgaacc

SEQ ID NO: 152698 - DNA, 248 bp, Homo sapiens
tgccgccgcaagacccgctggacaccagagtgttatacgctatcctctgccatgcacagagctctccagcctcttctcttctcattgactgggtcctcttctcccatctccatctgcttcatccgccgtctaatatttcatactacatccaaacatcactttggctacgaaactcgccgcctgatactggcatcttgacgatgtgggacgactattactgtatgacaccatctatagacgcgggcctt

SEQ ID NO: 152699 - DNA, 320 bp, Homo sapiens
ctctgttgcccagtctggagtgcagtggcataatcatggctcactacagcctcaacctcccaggttcaaacaatcctcccgcctcaacctctcaagtatctggaacttacaggtacacaccacaatgcccagctattttttgatttttaaaaaattttgtagagacagagtctcgctatattgctcaggctagtctcgaactcctgggctcaagtgatcttctcaccttggcctcccaaagtgctgggattacaggatgagccaccacacctggcctaacggtgataagactccaccttcagattcctttgaatttctca

SEQ ID NO: 152700 - DNA, 93 bp, Homo sapiens
gaggattgtttgagcctggttgtagtgaagtatgattgggccaccgtagtccaacctgggcaacagagcatgaacctgatgaacctgtttcca

SEQ ID NO: 152701 - DNA, 418 bp, Homo sapiens
tatatgtcacagctgttagcgtataaattcaattaataacatttcatagagtggaatttcattctaccattcttactttaaacacattatctctataagcagcaaaaagcacacaaaagtgatgattcattcattcaaacattttatctcatctgcctcataaagttcttgtgacaattaagttaaaagatgaatttggaatatctggcatcagcaagtggtagtgttatcaaatatttaatgcctaccatgtggcaaatgggcaagtgagacagagcaatgaacaagaccgacaaagcccctgtcctcatggagcttttattttaacgaatgagacagacaataaaccatactatataatgtcagtgctctgacaaaaagtgggtgaagaaaaaaaaagagtgtaacaggccaggcg

SEQ ID NO: 152702 - DNA, 358 bp, Homo sapiens
gtgaccctggcattttgtccaaagcatttatttagacatgaaaatctggcagagtttagactgtcagaaaattctatcttactggactactaaagtagccacttactgtattaatctctctgtccttccatctcttcttgcttcagttagcgtcttaaggcacagatatgacagtataactctgctcatgggttcttaatgcttatccacagaaggatgaagtcaattcatattatttagattaaactgcatctatcttatgctctcataaagcagaactaatttttaaaaattgtctttttcttaattacaagataggatatagaaaaataattgtttttaagggatactgtattag

SEQ ID NO: 152703 - DNA, 718 bp, Homo sapiens
cgtcgaaatattcttttattcttgtcacaatttcattaactgcctatgccttattatcgacgtttccctgcgatgttttacaatttgcatactcctttagaattgcatctacattttgcttagcagggagttaaaacagctgcttctgcttggtaactaagttccagtccccagcaagccatggtttcgattcttcaggcatcttcactttaacttccattctgttcttaaatgcgtcctcgctttcaacagtgaggtctgcccaggctctttccttccctggggtctgaggtgctttgctggtactgcccccatatctgtttccaggagtcctctgtttgttctttctggtcttcctcacggatcctgaagctaagaagttctctgcagagcgaccccacatcttcctgagagaggtggttcaagatttttctgctgtggaccagctgccttctttcctgaggaggcccctctcatctctgcatgttgcttctagttggttttttgaagttgtcttcttctgcagattgttgtccatgagattgagaacccggctttctggaactcattcaaccctttttattccaaccaacaatctttcttctttccaagaactcctagggatttcccaaaaggactcttatagatcttgcaggatggtctaggaggatacagtgggagatacaatccaagattctgtaatcagaggtttctacaa

SEQ ID NO: 152704 - DNA, 557 bp, Homo sapiens
ggggaagcaaggtccgtcttacatggtggcaggagagagagcaaaggggaagaaacacacacttatcaaacaaccagatctcatgagaattctgtaatgagaacagcaagcggggggttggggcagggagtctgcccccatgattcagtcaccttccaccaggccactctcccaacacatggagattacaattcaagtttagatttgggtgaggacacagagtcaaaccgtattaatatctttaagatgaggagacttaacaagatggtctctaaggatttttcttcagctgtaagatctatacttttctcttttagtgcctacaaaggggccagggcagctgtgtatactttcctagggtgtgtactgcacaattccaggggtgcatgtcacatgattacacagatgtgaatggttccacctggctggtaggcaacacagcattcctgagaaggagcagttcttaaatttttttgagagctagggttctctcatctctcccctgccttattaggatctgtacttacctctctagttctgattcttgcttacaacat

SEQ ID NO: 152705 - DNA, 537 bp, Homo sapiens
taggtgccagtgccattgtgtttctgttttgccatctgagacagcaggctttcctagaggtttgtgtacccatcttcccatccaggctgagaggaacacagttgagcatttctcagtgactccgggtcaccccgggaatagtcacctttgtactttggacaatttggctgcacagtctttttggttttgctttttctcttttccttcctcttgggctgtggaccatcacttatctgttgttcttgggcttcctctcagcgtcttagaggcagtgccacgtggggagtggagaatatgctgtctggttcaaatcctgactttggtgtgtagcatttacaggtccttttgccagggactcagcccctctgagactccgtgtattcatcggcaaagtggggataatcaaacctgccttataagaggaacatgaggattgactgatgtcacttcagccagttcctctggagagaagtagccccccagccctgaagtgacaccctcactttcttcttgcccactctgccatgcctcagacac

SEQ ID NO: 152706 - DNA, 349 bp, Homo sapiens
aataaaacctattgatttggaactttaaaaaaaaaaacaacaaaaaaatactttcagggttttgtaatttcaagtggttttttaaggggagcaatagtttgccatttaccaaaggcttctccagataatttcttaaatgtttctacttaaaaataaaagctattaataataagctgtcatgggatccatttgaagacagggaaaatagaaaatttttattgtaaagggaagaacttatccttttaattttatggactaacagagtctgcaggtcttaactcatttcagcctgtcaaatgtgcaattaaaaatgaattttctaattgtattcaaatgaggctctatagtg

SEQ ID NO: 152707 - DNA, 407 bp, Homo sapiens
taatttcttagttgtttggaatccttaacgtgcaaaagctttgaacagaagagttcacaaaggaaccagggttgtcttatggcatcagttacgccagagcctctgggtcatccacatcaggagcagaagcacttgttggtcctgctgccacggtttgggcgcccaacacgcccacgtccacctcgtcctcccctgccaccatgttctgggcggccaaggtctccaaaattgatctccagctgagatgttatatcatctgctggcttctggaaatgatggtccataaccgattcttcagcatgagccgcttcactttttgatttatgaagaacaaatcccttcttccactgcccatcagcaccttcatttggttttcagatattaaattttacttttgcccagtcctt

SEQ ID NO: 152708 - DNA, 281 bp, Homo sapiens
acatcttttcccctgctgagacctcatcagcctccgatcttggctgagatatcatgtcctcccacaaaccctcctgagccaggaaccctcttcccagtgggactcactacagagaggacccagcctgtggtgatgatgatgaagaagtggatggctacggcctttctaattttcccaccaaactgtgagcttccagacagctggcatagaagtacccaaaacatgtttgtagaatgaatgaatggccttcacaagctaaggaacccatggcttcttcactg

SEQ ID NO: 152709 - DNA, 449 bp, Homo sapiens
ttgatctcttcaactctcttcattgcgtcaatagttttattccatagctcttgctagtatttgataggttcatttctatgtttttaaaattcaaatgaattatccactgtaagctctttaccagctgctttccggaatgctttggtccacctaactttgcgaggattgcgcttctttttaaagtttctatgacacttagatttacaaaatctgaacaccttgcagtcgttgcggacaaacatcatgtcatggctggggtagatgggcctcgaagagaaataacacttcttgatacgcatgttgaacctgtgttggtcccctttgctttcttaaccatgccaaacatactcctccctttgcattggtccttctgcctggaatgtcttctctcagatatctgtaaggctaacccactcactttctttatgtctttgctcaaatgtaccttc

SEQ ID NO: 152710 - DNA, 347 bp, Homo sapiens
ttttagtagaggcggggttttgctgtgttgcccaggctgatcttgaactcctgagctcaagtgatccaccctccttggcctcccaaagtgctgggaggctgagccagaagtccctttcttttaataaagtttaaataaagtcccaagaagaaactcttggcacaaaaggatatactgtattcttggacccaactttataagaatcttccagcttgcagcacaaaggcagcccagtcctcaatgaaaatttaaagggagcctgacagatttatgtgagagcaatgtccatttaaaccatttaaacaacaatatgaatgttgtgcaaagtgtagctcccatttcattga

SEQ ID NO: 152711 - DNA, 105 bp, Homo sapiens
ttccttgtagatggcaccttctagctgtgttctcacatggtgggtggaaggagtgagtgagttccctcaggcctcttttagaagggaactaatcccattcatgag

SEQ ID NO: 152712 - DNA, 629 bp, Homo sapiens
atcatttgagaacccatgaaaatctttagtaaatttaataatcctagaatcttcctttttttctagtctctatgaaattgctctcaaaagttaacaaatttcagtaatatagcaatcagatgacatttctatatttatatggcggttgggctcagagatagcctttacaagtgatgacaagattcaggctttagtaactatagtctcacagcaaagttttcaacgcagtcatacagtgacatttcagtcaatgaccaactgcaaatatgatggtagtcccataagattttaatggaacaaaaattttctatcacctactgatttgtgttatgttattccctaccatattcagtacagtagcttgctgtacaggttggtagcctaggagcaataggctatactatatagcctagattgttaagcgacacatgattgtacattgtaatttgttaggtcttttgttatttaaaatatcctcacaaaattccagtgggcaatacttggaagtaaagctctcctcagcaaatgtaaaagaacagacattataacaaactatctctcagaccacagtgcaatcaaactagaactcaggattaagaatctcactcaaaaccgctcaactacatgga

SEQ ID NO: 152713 - DNA, 158 bp, Homo sapiens
caagggaatgttgacttttgtcactgctttcctctgatttgtatgctcatttctggtccttgtgcaaagtcacggaggcacagtcacatacactgacccagattttgtgctcaagttgactgtctctctctttgagatgtacaactggttccatgtag

SEQ ID NO: 152714 - DNA, 469 bp, Homo sapiens
cgtctctactaaaaatacaaaaaattagccaggcgtgatggtgggtgcctatagtcccagctactcgggaggctgaggcaggagaatggtgtgaacccgggaggtggagcttgcagtgagctgagatggcgccactgcactccagcctgggtgacagagcgagactccatctcaaaaaaaaagaaaaagaaaaaagaaatgctttgccaatgtatctagtgttttaaatcatagcctactaaatattacttttttcatttctttataaatgtgtaagtgacagaattattagcattttgacagaaatttgtaaatgctgtggacaatcgtaatttttcctgttgatgattaaggttgtttggcacagtttcggctttcatagtcgtttctatggtcctgcactatttttcaaagtgagaactgtatttcaagtgacccttttttttttccaagtgacatttttttttct

SEQ ID NO: 152715 - DNA, 379 bp, Homo sapiens
agcgggaaacaatcacttgatcctgggacggaggtgcagtgagccaagatcgtacctacagtgacaggtcgagactccatctcaaaaaaaaagaaaaagaaaaaagaaatgctttgccaatgtatctagtgttttaaatcatagcctactaaatattacttttttcatttctttataaatgtgtaagtgacagaattattagcattttgacagaaatttgtaaatgctgtggacaatcgtaatttttcctgttgatgattaaggttgtttggcacagtttcggctttcatagtcgtttctatggtcctgcactatttttcaaagtgagaactgtatttcaagtgacccttttttttttccaagtgacatttttttttct

SEQ ID NO: 152716 - DNA, 219 bp, Homo sapiens
cctgcagtccgatggatgggacgaagctaccgtccctcctggagccagcagcagaggggtgagaataggaagattaggtggaagcttgagggagaagatatccctgcttgccacctggctgtgcgagttgggcaggttgcttgacctctctgagcctgcatggtgatgctcccgtcttcctccatagcctaacaagtgccccctcctgtcccactccat

SEQ ID NO: 152717 - DNA, 405 bp, Homo sapiens
cttttacaggggggtcgcagggaggaaggaagcctcacatttcccacccctgctgaccctgcttcttcaccaaggggctggaaagacattcccaaactgacctttctccactgtccccaaaggcgagggtgttctgtgcaggaagctctgcaggaagcaggatgatggagtgtccccaaatggtcacttcccctgcctgggccccaggttccctggctctaaaaccctcacagctcctgctatgtgtggggttacctccaccagccatttcatcctccctgtaacccctacagatgaggaatccaagtcacagagaggttaagagatttgcctgaggtcacacaggcaggaaacagcagagctgggatctgaacccaggcctgactgactgctgcaacgccgcat

SEQ ID NO: 152718 - DNA, 510 bp, Homo sapiens
ttcttgtgacagtctgttactacttcaagtgtttatttatcattgtctgtcttccctgctaaactggcctaacaggattctcgccaaaggcaggtcagaccctcaaccaccagtggtgggggtgaggagcatgatcagataacaaacggtgctcagacagcaagcggggaggaccctccctaaactgatttggggagattcttgctgagccaaggtggtgcaagtccagaaagcagtgggtgagtgtggaaggccaaggtcggcgcctagtggagaagaagctctgaagagcccagctggagttggtcaaggagaaagtccttctttctcaacccatgccttagtgtccagagtatctgctggggctggatcacaagctgccctcatggctagagtctccagcccttccctgagatctcacacctttagtccccaagtcctctggaagtcaggaaagacaccaaatagccccaaaccctatcatccatcacatcgctatactgtcccgtg

SEQ ID NO: 152719 - DNA, 248 bp, Homo sapiens
tccatgaaggcttttgttgtatctgtgctgtcgatgaattctaggtcttttcagtctagtggtagaaggcccaatttcagtctgacctgtttcaaggtaaggaataaatgttattcacgaatgaaatatacaggcacacaaaatgagatgtgaaaagtatatgtttcaccaactaattcagggaaaaagaaatgtttgcgttatcaaagctgtttctcatctactaaaagttaaaattaaggagagtg

SEQ ID NO: 152720 - DNA, 495 bp, Homo sapiens
tgtccagtctctgtactttctggggcctctcctgttgaatggctaggcacctgcaggtgtaggggctcagggtcacctccggcctgcaggtcaatgtcttgctgctcctgtcctggggagggcagctctctcctagcccaacccaaaagcccccagaagcctccacacagccagctccggagtctgtccttggcttaggtggcttcaggactgggccaggcacctccctcacaggacaatcagacatgaagggtacctttcaatcacacaatcctacacagtcctagacattaggtgggtcctctgccctctgcaggtgacctcatcagagagcccagcagcatctgcccatttcctgtctacattctcctccctagtgcactgggagtgggaggagagcccaaagctcccccagatctttaggaagccccactgtcaggctgagtggagggccttagtgacaagtgataacttcagggaagtccagagtgggag

SEQ ID NO: 152721 - DNA, 179 bp, Homo sapiens
ggcccaggctaacttttaaatgaccaaactgcattgtaaattctagataagccagttttccaggtgtttaatcaaacgcacacgaaaggagatgctctgatgagatgagatgctgcgtgctcaaggcctctcccaaggggtctgtgcggactttcagcttgagcacctgctgtgtgcta

SEQ ID NO: 152722 - DNA, 381 bp, Homo sapiens
gggagactatagaatatcctctaagagtgtgggaggctcagatgactcactgtttttgtcctagcaactagaaggatggaattgtcattagctgacatgagaaataatgtgggtagagcaggattgggaggaaagaggaagagttctgttttgggccacgctgagtttgagttaggcattggagtgtagcttctgagtagactgctggttattgctggcaagggagaggtcaaagctggaaatataaatatggtatttatcaaaatagagatgatatttgaaggtgtgaaactaaggcaagatcaccaaaggagtgagtcctgataaagtagagaggctgaagggccaagtcctgggaagtgccaatattaagaatttaga

SEQ ID NO: 152723 - DNA, 508 bp, Homo sapiens
ttacttttatcatgtgacaaaatataataccacatgtctctttcagctggctacatagcttagatgacaaaacagtatcttgcaggcaacctgagctctttgagaaaacgtggaaagtaaacataaaaaattatcaaagttatttatttttaagaataagctcttttgaagaaaagtgaagggcttaaaaggttgtattatgatgagatggcaatgaatatgtgcataagataaacacgtttattaaatcacgcttgccaatgaaggttgtgaatagcttctatcgaaatagcataaggttgctcttatgaaaggtaatgaggtgtagtcttttgaaaatatatcctacttctaaatgcctgtaaaatggaaaccacactaactctgctgagttatgttaataactggtgaaaagcgtcttattctgaagtacttcaaaaaccaattattccaagtggctaccaggtgttgtggaaggaagttagtttggttttgggtttttttccaa

SEQ ID NO: 152724 - DNA, 222 bp, Homo sapiens
gggccaccgccagcttcccagggccaggactgtgcactgcacgatatggctcactcccagaggacagtgtcctaaccagagtcagatgtttcagctacaggagagaggccagtctctatatgtttgggaaaacttgaaagaattctggaagagccataaatcttgaactggagccttttatcaacctctaatttatcatggtctctgaattactttgactgg

SEQ ID NO: 152725 - DNA, 633 bp, Homo sapiens
atgccatttccaccctcaccatgcacccccacccaccccacaagttagtttgtgacctggtggaggctataaaagtgtcttaccttgtgggtttttttcttttcaaaaaatgtctttattttgccagcaccttgatcgtatattttctggtttttcagaatgtttttcgttctctatttctgtgtattcattagaaatacattttttttgcaatctgagtcaagttctcaaaaatgattttcgcaagtgttctttctcccaaactgtttgctccttgaatagagaactgtcttactgtgtttgttttgtcttgctctctattgcccaggctggaatgcagtggtgtgaacacagctccctgtagccttgacttcctgggcttgggtgatcatccttccttagcctcccaaagtgctgggattaaaggcgtgagctactacccctggcccttactctgttttgattacactgtgactagacatgcatattgtgggcattaaaaacttacttctatggttatctcacctttctaattcagacaaagagtaatttgtcctgacgtattcttcctcatctcttctcttcccttctgtccaggtctgtcaggtacatatttaatttctagaggataca

SEQ ID NO: 152726 - DNA, 743 bp, Homo sapiens
aaactagttaattaaatgaacataatttttcaagttaataaattaagaaaatatctaaatgaaagagagaataaaatcagcatatgtgacagcccatatagtaaggacagtttcgcaatcaacgtaaccaaggaaaacagctttgttatcatttcaaacatgcaggcacacacaggcagaggcaaagctggaaccaaaccaaacaaaaagaagattttgaatattaaaaaactgggcctctagacactttgccttttagaaccagcttcctacatgttcaagtaaattccactgatagatcttgactatctacaatgtgctaggtattatgttaggtgatgaggacactaaagtgaataagacataacccttgttctcaaagagctcacaatgaaattaaggaaacagagcgagatgacttatcatcatctaatccagcaagtctttcctaatcctcccatccctagttcaagctagggaccttctctatgctaaacctgtgccttgtatataccttttattgtcacactaccccaatgtgtgatttatttgtttatgtttccatctccatttctagactgtgagctccttgagggcaggatttgtatctaattgatctctgtccccagtgtctagcatgatgcctggcacaaagagggagcccaataaatcactgttgaaaagaaccaagttacgatatgacaattgccaaatacaagctcacaataagagcggtatggatc

SEQ ID NO: 152727 - DNA, 174 bp, Homo sapiens
aggaactgctcggatcttaaggtttttcacactcttttcttctttgcatcatacctgcatgcatgattcctagtttattgagtctctgctcaaatgtcattttcttcatgtggccttccttgacactctatttaaaatcgtagtcctactgccccacattcatgatccaacccc

SEQ ID NO: 152728 - DNA, 225 bp, Homo sapiens
tggctatggagatggcagaggccggaacttcctccagtggcgtggctgctcggcggacagacagaagcacacacagtgggtgggggtgagtcgagggagctcactgggtcttagggaggccaaaggtgcctgtccagaagagagattagggtagaaatcacagaccaacacatctgctgagaaaaaggggccagagaaagaagcaagagtctctaagtaggggag

SEQ ID NO: 152729 - DNA, 799 bp, Homo sapiens
ctcagtacaaccgctgactgtgctggaaccctgatcttagacttcagcctccagagctctgggaaataaatttctgttatttataagtgactcagtctatgatatttcgttatagcaacatgaacggactaaaacatcccctaatttcttgtgagagtgtggcatacagagtaaattctttgagcagccattcctagtattgctttccctaagcgctctctgctttgcttggaataagaggtaggagggtttggagaacactcccctgggtgttattctagtgcttcactgctttccctcttaaagggcggcctagcctagctcctggcacatgtttgccagtgatgtagaaattctgtttctaaggattaaagaggtagggatgaaaataattaggcaacttgcagcctctgccacactcatatttcaagattcttctttgattttttcattttagtcacttaatgattcttccttcttgttttattcttccttgatctccagggactgtaaaacaatccagaaacttagtaatattatgaacaagcatttatcagctggccacaatgtgcttattaatgttcaaatactatgaggaatgtcagctttgctccccaaaccttgttagactcaaaccctcatgagacttgataccatgactactaatgtccttttattccccaaatcgatttccctttcctttcttactgggttttagatgcagatgacacagtccagggaagatcggagggcctgtctgagtatggagaagtacgagctggtattttatatagcctat

SEQ ID NO: 152730 - DNA, 385 bp, Homo sapiens
ccttgagagagcaagtgtgaactcatcatacccattctacagaaaagggatcaatgagaaactccaggagaggcaaagctctgataatgcctgcatcaagctacagctggagagtagaggatctggctctcctgtgaagctctatccacagccccaacacaaacactgggctgcctaagcaaagcccctgaatcaccaacccagaacagattctgattttatcagttgagttgttgcagccggggttaccatcgtgacaatgtcccataggtgccacagacaaaaaacaaaaataaacactgctgacaggcaaccgtgacaggtagacttagggaataactggccaggccagaaagaaagtacagctctgaagaaaaacacttag

SEQ ID NO: 152731 - DNA, 406 bp, Homo sapiens
tatttgctgaaactcactcgatctgctttatctagaatcttcagtgaacttaggaacaagatttttcttttgttgtctctttctctacaggactacctattattcacgtgtcttttggcaggttcttggttttatagctctcatgtgggacctctgtaaagtgcacatggccctcaccttgaacttgtttgttaagtttgccctggaacgagagccagctctgtcggccccagaaccaggggattccacattggaaacaaacaatcaccgaattgtcagtacttagacccagtgagacacaaagcgagtgctgttctgtacatgtggctggtgacccactgctgagcaatgcacctacaggcttggccactgctgcacaactgctcaactgaagtgaggggacagg

SEQ ID NO: 152732 - DNA, 589 bp, Homo sapiens
gctgaggcaagaggatcacttgagcccaggaagttgaggctgcaggaagctgtgattgcaccactgaactccatcctgggtaacagagcaagaccctgttacatatatatagttttacatctgcatatttatttaaagagctttctgtgggctgggcatggtggctcacgcctgtaatcctagcactttgggaggccgaggcaggcggatcacctgaggtcgggagttcaagaccagcctgaccaacatggagaaactccatctctactaaaaatacaaaattagccaggcgtggtgcctcatgcctgtaatcctagctattcgggaggctgaggcaggagaattgcttgaacctgggagatggaggttgcggtgagctgagattgtgccattgcactctagcctgggcaacaagagtgaaactccatctcaaagaaaaaaaaaaaagagctttctgtgaatatcatataaaaagcaaaacatttgacccgaggagagtagttattttaaagaagtgagcaaaaatgcttgctcagcactcatttagttaactccccagctgaagattagttgtttggattaagtagct

SEQ ID NO: 152733 - DNA, 285 bp, Homo sapiens
gtatcatcacaatgtcattaatacctcaggctaatattgtgaacgtaactgttttataaaaaagtaaaaaatcaaggctactatatatggcaaacagaaacaaacgtaaatgtttccttttgtttacagcactgattttagctagactttaaatgaaggtcatcaactctcctgaaataacctcaacctctggccataaatctacagtataaatatgatgaataaagttaaactatatactaatcaattataacaactaatacggctcttgaaaaccaatcttat

SEQ ID NO: 152734 - DNA, 148 bp, Homo sapiens
gacagttcactgtaaactgtaaagtgctaaacaaatatattgttgtcgctgctgctgttggtattattataaacgcatttgagccttttactgccatcaaggtgagaccatctctgatactggactttgcctctgcacatctcataca

SEQ ID NO: 152735 - DNA, 298 bp, Homo sapiens
tcaccttgtcgataaccctattttcaaacctatcatttgacaaattttagctatccacacagaacttccaatcagtattttagtgctccactcttttttttttttccttgagacagagactcactctgcaccccacaggctgtagtgcagtggcctgatctcggcttactacaacctccacctcccaggttcaagcgattcttatgcctcagcctcccaagtagctgggattacaggcgtacaccaccatgcctgcctaatttttgtatttttagtagagacggggtttcaccatgtt

SEQ ID NO: 152736 - DNA, 1743 bp, Homo sapiens
  misc_feature (417)..(417): n is a, c, g, or t
  misc_feature (1052)..(1052): n is a, c, g, or t
  misc_feature (1109)..(1109): n is a, c, g, or t
  misc_feature (1728)..(1728): n is a, c, g, or t
gtaccccctgacaaagtataataataaaagaaaaaaaagaaaaaaaaaaaaagcaattgcttgagactacttcactgtgagctccttttttttttaaataaatgcagattttatgatattcctgatcattctctttgcacttagatttaaaatgttatttgcagttgattagagcgtggtgataagtaagccaggatttctggaatgccagggcactgtccccatgcatggaaaactgcacaagagcttgtgtgtcttgacattcccacatgtcaggatgccttcatttgctaatgacagaatacccaactcagactggattaaataaaaggggattttcttgcttatttaactctagattcagtggtaaatgggtttctgggttgattggtttggggcctaacaatgtcttcgagnacttggtttcttttcaacagtcagcttttgccttcctgtgagctagcattgtttcccatgggattgcaaggcagctgcatacaactcctgcagttcttccttttccatatccagagaggggacgtcctttcagacgctgattattttaggtgtaaattccatgtcccatcccaaaacaaacaaacaaacaaaaaaacatctagggcatgtcttatttgaggcgcttaacaaatgactggatcatctcccttgtatataacccagaaaacactgtgaagtagagcaaaattggaaagcccaagtcaaagaccatttgcaaatttcaagtagattccagtctgttgctcaaatcacaaaacataaaacggaggggtctcccttggagaccataaagtctgtgacatggtggccagttgggtcactggaaaacatggcaaaatattgaaaatgagggattaggtgagagtgtagcaactgaacactaaatgcttgatccaggtgccattccctggatactgacagggagacacattgtccaggtaatactggaaaaatactttctatagtgtaaaccacaaataaaattccaagcccctcaactatttgaatgcacccctcctctcagccagggtcantccaaagttaacctgaaaaactggttcagaccatgatgggaagtaggggtcagatangcctcattataccctccttcctttggaattcaggcacaactgaccagcacatccgaccaggcacaactggcattacaacagagatcttaagactttttgtagcaataagacaccaaattccagcctgactctagtgtagcattacatgacagatagcaggccctgaaagaaataaaaatattttaccctaaaatatatttgttatcatattttgaaatgtccctacaaagttgtctcttgtggggaaagtctacatgctacagggaatccctttccaggtcttttccctaatctaggcacctttttaagtctgataagaaacatttacaatcaattctctctgaagcctgctacctggaggcttcatctgcataataagaacaaccccttaacacagagactgccttctatggattccaggtctttagataaactctttcaaccaattgccaaagtatcagaaaatgatggctggtaactatttaattatgcacatatattagtagaatttggggggtgggcacggtggctcatgcctgtaatcccagcactccttcaggaggctgacagattgcctgagtccaagagtttgagaccagcctgggaaacatggtgaaancccatttctaccaaa

SEQ ID NO: 152737 - DNA, 1585 bp, Homo sapiens
  misc_feature (259)..(259): n is a, c, g, or t
  misc_feature (894)..(894): n is a, c, g, or t
  misc_feature (951)..(951): n is a, c, g, or t
  misc_feature (1570)..(1570): n is a, c, g, or t
aatgtggggcccatgccaataatctttttatactgtggggatgggaccaacgttaagttgtccccatgcatggaaaactgcacaagagcttgtgtgtcttgacattcccacatgtcaggatgccttcatttgctaatgacagaatacccaactcagactggattaaataaaaggggattttcttgcttatttaactctagattcagtggtaaatgggtttctgggttgattggtttggggcctaacaatgtcttcgagnacttggtttcttttcaacagtcagcttttgccttcctgtgagctagcattgtttcccatgggattgcaaggcagctgcatacaactcctgcagttcttccttttccatatccagagaggggacgtcctttcagacgctgattattttaggtgtaaattccatgtcccatcccaaaacaaacaaacaaacaaaaaaacatctagggcatgtcttatttgaggcgcttaacaaatgactggatcatctcccttgtatataacccagaaaacactgtgaagtagagcaaaattggaaagcccaagtcaaagaccatttgcaaatttcaagtagattccagtctgttgctcaaatcacaaaacataaaacggaggggtctcccttggagaccataaagtctgtgacatggtggccagttgggtcactggaaaacatggcaaaatattgaaaatgagggattaggtgagagtgtagcaactgaacactaaatgcttgatccaggtgccattccctggatactgacagggagacacattgtccaggtaatactggaaaaatactttctatagtgtaaaccacaaataaaattccaagcccctcaactatttgaatgcacccctcctctcagccagggtcantccaaagttaacctgaaaaactggttcagaccatgatgggaagtaggggtcagatangcctcattataccctccttcctttggaattcaggcacaactgaccagcacatccgaccaggcacaactggcattacaacagagatcttaagactttttgtagcaataagacaccaaattccagcctgactctagtgtagcattacatgacagatagcaggccctgaaagaaataaaaatattttaccctaaaatatatttgttatcatattttgaaatgtccctacaaagttgtctcttgtggggaaagtctacatgctacagggaatccctttccaggtcttttccctaatctaggcacctttttaagtctgataagaaacatttacaatcaattctctctgaagcctgctacctggaggcttcatctgcataataagaacaaccccttaacacagagactgccttctatggattccaggtctttagataaactctttcaaccaattgccaaagtatcagaaaatgatggctggtaactatttaattatgcacatatattagtagaatttggggggtgggcacggtggctcatgcctgtaatcccagcactccttcaggaggctgacagattgcctgagtccaagagtttgagaccagcctgggaaacatggtgaaancccatttctaccaaa

SEQ ID NO: 152738 - DNA, 410 bp, Homo sapiens
tatttggaaatatcagttagcagttttagtcagtagagtaacatattttctatatttatgatatatcaaagagactttctgaagcagaaccctgattgactcaagagtcttttccaaattctgtattctctcagaaccaggatttaataggaggtgggtggggggtggtccttggtcaaactggggaaaagcctcataatgagattgccaaagcgcttacagcatttgaaggctcagagagatgccgtggtcaggaagcttgtttgagtctgtctggaagccagtaagtcccacagaatacctactgataatcctgtggaataagcagcatatggaatgttgctgagctagaattaaagtccacacacggccaggcgcggtggctcacgcttgtaatcccagcattttgg

SEQ ID NO: 152739 - DNA, 659 bp, Homo sapiens
tatttggaaatatcagttagcagttttagtcagtagagtaacatattttctatatttatgatatatcaaagagactttctgaagcagaaccctgattgactcaagagtcttttccaaattctgtattctctcagaaccaggatttaataggaggtgggtggggggtggtccttggtcaaactggggaaaagcctcataatgagattgccaaagcgcttacagcatttgaaggctcagagagatgccgtggtcaggaagcttgtttgagtctgtctggaagccagtaagtcccacagaatacctactgataatcctgtggaataagcagcatatggaatgttgctgagctagaattaaagtccacaccgcctggccgcttttgccttttcttgacattgccaatgcatcctgtccccgagcgtctctgagttttaagtctcagatttgttttctttggagacaaactgcaggtaggtgttacttctcaccgaagttcccagatagcacaggctttgctaaacaacacagcaccaggaactccatcatagagagcgcaggatgctgtgtgcgcgacatgcgtgtgcacctagtgagatgtaaacatttacctggagtaaaagaaattctttccccagagcccaaatttggctagtctcctt

SEQ ID NO: 152740 - DNA, 648 bp, Homo sapiens
ccacctccctctgttctcccccactgatcctggctggaaaggctgggcttccggaaaagagaggtggatttgcacacctggatcccaagctgatagaaagtggggtgaagacaaaggggactcagactggggtgtctgtcctcttctatgcccacagtaggaggagccaggattggttactccctgctgggtctgctgtgctcagagtgaggtagagaagtgggtagagtaaagaatttgggagaggaaaaaaggcattttcccaacccctcccaccaaagcctagagagaaggtgttgtctggtttaatgtttaattagagctcagagttcagggccagatttggagttgggatggaaagttgtttttaagaccctgtagcaatttttgacccagcctgggtacctcaaccacactcaggagtttgggggaccttctgttgggctggattataggctccaagaagaaacccctttcgccaatactctctctctcttctttttttgagacagggtcttgttctgttgcccaggctggggtgcagtggcatgatcacagctcactgcaacgtcagcctcccgagtagctgggactacaggcacatgccatcacgcccagttaatttttgtatttttagtagagttgggg

SEQ ID NO: 152741 - DNA, 621 bp, Homo sapiens
ccacctccctctgttctcccccactgatcctggctggaaaggctgggcttccggaaaagagaggtggatttgcacacctggatcccaagctgatagaaagtggggtgaagacaaaggggactcagactggggtgtctgtcctcttctatgcccacagtaggaggagccaggattggttactccctgctgggtctgctgtgctcagagtgaggtagagaagtgggtagagtaaagaatttgggagaggaaaaaaggcattttcccaacccctcccaccaaagcctagagagaaggtgttgtctggtttaatgtttaattagagctcagagttcagggccagatttggagttgggatggaaagttgtttttaagaccctgtagcaatttttgacccagcctgggtacctcaaccacactcaggagtttgggggaccttctgttgggctggattataggctccaagaagaaacccctttcgccaatactctctctctcttctttttttgagacagggtcttgttctgttgcccaggctggggtgcagtggcatgatcacagctcactgcaacgtcagcctcacaggctctggtgattctcccacctcagcctcctgagtagctg

SEQ ID NO: 152742 - DNA, 283 bp, Homo sapiens
ggctctggagcatggattgtacctgctgcagctggagttccttcctcttgaggcaagaggaggctgaccagtaccagtcattggtatgggctgcctaggtttaggggtaggcagggcaggattttttttttttttttttttttgagatggagtctcaccctgttgcccaggctggaatgcactggcgcaatctcggctcactgcaagctccgcctcctgggttcatgccattctcctgccttagcctcccgagtacctgggactacaggcgcccgccaccatg

SEQ ID NO: 152743 - DNA, 356 bp, Homo sapiens
agctgaacttctctctatgtctcctccaccaacagtgacaagagattcttacccctaaagattgagttcatgtttacaaaagctcactattaagtcatgcaaagaatgcaggtagccggagaagccagctcagcatcgaatagcttcaaggcactctagaaaataaagccctactctaaataggttattattaggatcataagcagaaactcgctaaacaacaaaacaagtaacatgaaccaaagtaaatatcaaactgagagggtttttacaacagagactcttcttttcatatgctcccccgagacaaacagcccattcttcagccaccctcactcactttccccttgagaatt

SEQ ID NO: 152744 - DNA, 451 bp, Homo sapiens
ttgtttccaagtttgggcaaatataaataaagctgctataaacgtccatgtgcaggtttttgtgtggacagagttttcaactcattttactaaataccaaggagcacaattgctggatcattcagtaagagtatgtttagttttataagaaactgctagattgtcttccaaagtggctgtaccactttgcgtttctactagcaatgaataagagtccctgttgctctacaattctgtttacctttcacatggattgatggtcaattgtgtcatagcacttactacaacatgtggctgatttgacacatagctcccttgtaatggtctcttctactcatttagaaaacatggaatactggtatgagctacaaggcacaatgaatttcccttgataggtcaaaaagagacccagcttagcaggcacaggggctcatgcctgtaattccagcta

SEQ ID NO: 152745 - DNA, 411 bp, Homo sapiens
gcactccattaataaatgccacatattattatctcatccaagtatttcaaatcacttccaaatgacagctcccacttcagaggcaggtagcaggatggaaaagggtggagagtacatcctaaccgaatggtactcagagtgggagaggctgagctgattatcttccaaccttataacccttctcccaaaagggccttgctggacgttctgtaattccagttttgaaagaattcaataaaatgctcattgcagtgctgcgtttccaagggctttgctccttgttagtgggggtctaggcttccaagctctcgggcatgaaatgaggtggtggttaaggtcagggttgcagttccttgacaagcagaaactgcccccggatgaggcctcccgtgggcacactgtactctggaa

SEQ ID NO: 152746 - DNA, 559 bp, Homo sapiens
aggatgaaattgttgacatgaggaaaaggatggggtaaatgtggaacttaacagagatggaacctgtgctcgcaagagggtgcctacctaatataaccataaagattacagtttaaaatcacaggtatatttcaataaaattgttattctcccaattagagaaagcatgccagtatcagcactaaaaatcttaaaataaatcagaaatttttccctaaatcccagtcagccagcagacatcaaataaaaggtaaaaaagtccaatctaataataaggaatactaagacatactcatgcctgaatgcaattacaactgtacttcacacagaactggcagaagaggatggaggagcaagagtgggaatttagtctttctaaaaggtcaccaagtatgaatattttaaatccagagactacacaattctaaaagtgaatgcctacaagtccactaaaaatgttaccatggagcaaacacgccagtgggaaccaaaaaggctggtaataacatttacgggttgaaactggggttggtggtgagggttcctattgcagaaactg

SEQ ID NO: 152747 - DNA, 375 bp, Homo sapiens
agatgcacacaaacctcctcccactgattatccactaccacacactcagctgcaacccgtgctccagaaacggacaggggcctgcaaggataaacagaatggaagtattttattacctgggaaagcactgccaaatgccacgtttcaggaaggttaactcataagtgttcaggaagtgactgaagggcagtggtgggtgaggtgacgggactgcctcagggctgcacatgaggagggctccctcccacacagccttttcctccaggagctgcaccaggaactcacagaggatcaggaaggattctgagaacattcttctgtggcgctgactagaggggcaaaataaattataaaaaataaatcaattctaaatat

SEQ ID NO: 152748 - DNA, 182 bp, Homo sapiens
tccacttctgctgaatataccaatcatcccagtcatacattcatgttagatccttagcagtaagagtccattatgtatctcctatttgtgactgcggcattatgaaacagcatctctgttctccaattatcaatttagaatatctgatacagttttgtcaatttcatgatgcagtgaagtgt

SEQ ID NO: 152749 - DNA, 222 bp, Homo sapiens
gcctttgccccacttcttgaaagatattttcactgaatgtaaaatctgagatatcagttattatctttcagaatcataattgtccctttctctgctgccttttgggctcttgttttacctgggagcttgttctgttgaacaggtcatttttccttcctctggacacttttaagacttttttcccctttatctttggtgtttggatctctcattaccacacag

SEQ ID NO: 152750 - DNA, 217 bp, Homo sapiens
taaaataacaaattacccagaatccaaacaacaacctggatttggttttgtttctcatatttcaggacttctaaactaatctgttcttatattaaacactactcaatgacatctcatggttctctccaatccctaaagttacatggtattaaaatcctgaaaaactaagtgattaggcaattgaactatattttatttcaccttgtaaccaaattct

SEQ ID NO: 152751 - DNA, 467 bp, Homo sapiens
actgtccggcgctctagcgagagaagaaacagactgaaccgtgactacggcttcagtgtgccacagtgtaccactgtctccaaatcacagacctaccaacctctgctcctcctgctgtcaagggacgaggctcccgactcatctggtggaggccatggagctgcccactgcccagcccagccccaccagcctcggccctggcaagcccaccccttccttctccttggcagacactcttctgcggggaccttctgagccctaggccacaatcaccacgcccctgagtttctcagcctgattatctttctgctcagctcattccacagaccacactctcctacccactgcacacaatccgcctcacacgttgatgttgaaggagcgctacatcaaagacagaaaaaacaagtagaatatccacacccgaccccacagacgcaggagaggatccacacccgaccccacag

SEQ ID NO: 152752 - DNA, 393 bp, Homo sapiens
acacacacacacacactaggagtgtcctcaaggcccagtaacttgggaggattggaaaaaataaatacaagagataaggagaaaaataaggagagatgagtcacaattagactaacagtcccatcccctcccctacaccctgcaactttgctttgtgacttgagcagcgtcccaccccaccctggggtgatccctgggcctcctcgaatccctctgaccttacccaggagacccctgccacagcagacagtgctgctaactgctccctcaaacacccacctctgcccctacctgagaactccccaacttctgggcaatgtgcccagtgccagctgccagccaggtgggccaccccatctcaggtccctgtcactgtccctgttgctgctgtgt

SEQ ID NO: 152753 - DNA, 421 bp, Homo sapiens
gaaacccaggggccagggatcagggctccagattgctatgaggaccagagacctgaaatagctctgacccagctgaactgagggactagggcaatgccctgccccactctgactcagtttccccacatgacatgcatcaatgactgtcaagtctgcggttctgtctgactgcatttgcttcctgggaatgttctaggtgtttccatcaccttttctccccagaagaaacccaggaaatattctgtgtgacctgcagtgtggcagggccctcactcacctgccaatccaaacaatttctgtaccaccttagtatcaagcaagggggcacaggtacagtcgagattcaactcgtttgcaaacctcacctgctccccagagtgtcctgggggaacctaaagtgcaaatatctttttcttttttt

SEQ ID NO: 152754 - DNA, 475 bp, Homo sapiens
aactggggacaccaagttttgtctgactagcaaaggagtggagggtaaaggtaaaactgagggttcagtctgagtaagctcacaggtgaaagggaaggcaaactgaggacattagagttatagctggcactgtcaaaggctctaccgcaagacagctgctgtcagctgcagcatagactcaggaagtgattgtggtaagattctatatgacagcaaccacctccatggaactccacactcttctgaccacagaaataaagggttatacatttctgtgaagttacctacaaagaaaagcattccagcatagaaaggacatttaactgttattcaaagagcatagtgttctctggacatttcttgcatggcctagaaaaaggtatcctatgcccctctaagaagcagttgaaataaagggaatcagagattccagggatgccagaggtaaatacctgaagcaaagaggaccaaaagg

SEQ ID NO: 152755 - DNA, 160 bp, Homo sapiens
gaagcacatcatggtgctctatcagaccattctctttgcctgcatcttaccccaggcaagagaaagttgtcattctgaaagctcctttaacaagtatacttctattaattagatttatttctatctcctctacattttggcccagctgaaaaagcatgtg

SEQ ID NO: 152756 - DNA, 422 bp, Homo sapiens
actgtgatttcagcagagtgtgcaaatttctgagatgttcacattaaaaagtgctacaaattttcaaataatgtgactttgttaacaggatgtactatccatccagattttttaaactccactctaattttataatctactttcctgactcaactgtacatgagagaggtacagactcacccaaatgtatgctttctgaatattttctattatagggaaacagggttaaagacaccccagaccagatcccactgttcattctactttccctattctgaactacgaaaatatcacactgacgacaatggcaacttcacttgtttcctctttggtaaaatgggctgcctgggctaaatgatttctcaagctccttccatttctagaattctagccatataattaaggagctgattttcttagat

SEQ ID NO: 152757 - DNA, 275 bp, Homo sapiens
tctcgaagtgagtatgtggtgctgaagaaggatgtggctctagctacatagcaaggtggagttgtggcaaggtggttgcctgaatgatgagatcacttcctcaggacctacatgagacggattgacagagctgcagtcccagatctccgacacatctgtggtgctgtccatggacaacagtcgctccctggacctggactgcatcatcgctgagatcaaggcacagtatgaggagatggccaaatgcagccgggctgaggctgaagcctggtacc

SEQ ID NO: 152758 - DNA, 428 bp, Homo sapiens
cttcctgccctagggggattccacggatcctgagtcaccctgggagattatgaaactcaaaggtctttctcaaagatctttaaaaaccactgattctcaactgccaaattacagctactagtctttcctgatagtgttggctagacctcatggatgaccagaaggccttttcctcctctgcttctgtctaaaatgtcaggacttaggagcgcttgttatacatttcctggtaacagtaaattagaccgctatgactaagcgctagtgacagctgcgtagctaaagcaaaaccaaagccatcttctgtttgggttgcttagtttaatagaatagtgattgttttggctgggcacggtggctcacgcctgtaatcccagcactttgggaggccgaggtgggaggagtacttgagcccaggaggtcgaggc

SEQ ID NO: 152759 - DNA, 278 bp, Homo sapiens
gaagttagaagaatctcaaattaaaaatcaaacattgaaccttagagaaaactagtaaaaaaataacaaaataaccctaaaagtagcagaagaaaagaaataactaaaatcagaggataatagagtaaattgagacccagaaattcacaccaaagatcaataaacccaaattttcttccttaaaaggataaacaagatcaatacagctagattagattaacaccaaaaaagagagagatccaaataagcacagtcagacatgacaaaagtggcattac

SEQ ID NO: 152760 - DNA, 438 bp, Homo sapiens
cctcactccacctcactcacccctctgtcatttgcaggcaagacagtgaactcccttctgctcctcaaaccaaacttactccctcccaccttggctttgtctgagctgctccaggagtccccaccacctccaccctccctcccctgttgaccctcaggtcttggtatgtacacttcatggagcactcccccaacactgccagcctggggcaggccccttgccatgttctactcgacagcgctcacccatctgtgatcctacaaccctcatgtgcccatctgctctgtgtctgtgccctcagctagactctaagtttcacgtgtccagggcattacctagaccggcttactaaagtattcccaaacactaccagcaaagatctgttcaaagaaatgtgaacgaaacctgacccactgatgctggacagtagattcccgc

SEQ ID NO: 152761 - DNA, 409 bp, Homo sapiens
gaggtggaggtaggtggtaattagaaggggacatgagggggcttctgcagtgcccgtaatgatttgtttcttgatctgggtgctgctcacaggaatgtgtctagtttgtgaaaattacttgactggacatttgtgatgtacatatttttctgtatatatgttactattaaatgtttttaaaaacaaaaagtcaaaaactccttattatggtattagagtccccttatgatcaggaccatcacagtttataccacataaaatgttttgactccctccagtaccccaatgtaccctgcactctatccccaactttttcctgatccaattgtagaaggcatccaaagccaagtctgtttctgctaacgggtcttccagtgcaatacgtgctcccacctccccagaggtgcgc

SEQ ID NO: 152762 - DNA, 528 bp, Homo sapiens
gaatttaaaatgccagtattatgattaaatttccttttcagattttttttcttagaatgattggctttcttgtaatttcttcatatattatctttattttaaaagattgtttcattatatcagatacacaatcaagtcctctcttttccagccatccagtctgagcagtggcctggagatgagtgtcatttatacaactgcctttaatgctctcctatgtagaatcccctaaatttccagtgttccatgttttcttctttcctgatttgctcctttcttttcatggagtacatcctaaaataactttctaagaaagaatgaaggagacttaacatattgagcccttgtatgtgtacatctaactttattctgccacccctcctccatcacacgcgcacacacacacacacacacacacgatagttttcctgaatataggttaaaaataaatttatcctgttattgaaagcttttgctatgttttcttctaaatttcagaattgctcttgaaagctgatgtcaacctcc

SEQ ID NO: 152763 - DNA, 410 bp, Homo sapiens
tcagagaagtggtcttgagctgtgccttgaggacaggtggctggtggtatgaagacagcatttacagggcccctaactggtgcaggctctgtgaaggaggctttatagagatagatgtatttttcaccacggtccaatgcattaggtttcattgtcttttgcacatgacaaatctgacaggctaaggacacattcaggtaggtgttggagcttggctttgagcttccagcctgtgctgtggggagaattccatcttatgaggttacggggtgtgagggacaaaggttgttggcactggggaaagccaaatggtggtgacttgggaacagcttgtggtggccccatttttctggagcctggagtagttgtgggggagcagggagcaggaaggctgcagaagaatagggtca

SEQ ID NO: 152764 - DNA, 428 bp, Homo sapiens
tgaaagaggagagaggaataaagaagagaagggcagtaacagggagaaggggtcgtattccctggaaggttgaacgctgttccacatgtacctgtgaaaaccatcttagaagaaagcttccaaaggcacagcagaaaacagagtgacgatcagagcctgcatcgagaggtattacattggggagcccctaaacctccacgttgctggccctgtcagtcctcagtgttcaaacctcatacccatatatcacctgaatttgccatgacaaccataaaggctgagctggcagggtgtaaagactgaagaggagtgggatagatactgtgagaaagaacaaggcatcctgcaccaggatgtacttggtcattcccctgacactgcaggaacaaaagagaggccctaactttggctagtttatcactcctccc

SEQ ID NO: 152765 - DNA, 486 bp, Homo sapiens
caaagggctaagcctgtactgacatatttaattctcacagcaacctcatgaagcaggtagtattattagctccctgttgcaattgaggaaaagaagcacagagaggtacaggaacttgcccatggtcatatagctggggaatggcaagctgcaatttgttcctaggcagcttggctgcagagtctatgctctcgactactttcatttattgttctgctctacccatctcccgagggggctctgccattcaaaagcaatgattcacatctttggagaactgattctctattgttggtctcttgacttttcttctgtcttgttttttttctatctctattccagggctctgtatgacatatttggtgttcttttaacaacccagtaaattaaattcattttgcaagtaaccgggggagcttgtagtagtacaataaaaggactggaagcccctgatttaattctctcctcttccccaatcctaacatc

SEQ ID NO: 152766 - DNA, 702 bp, Homo sapiens
tgaattagagcctggcaatctgctaaaataaaaataaaatagaaaaagatgagattactctggctaaaccattttagatacttgaatctcttaaagcacacttctctctcagtaactatgttaatatgtactaaataagacagtagaactgattagctgttctactgtcttatttgcaattagaattcacttgttggagaagtctgagttacacttactttcacaaatatgaatttagctatgaaaactaagttaaatttgcaaagactcattgaaggcaagtcactaaaaaggtttcacttgaattaagagaggaaatgtaaaaaattagagataataatcttaagaggcagtgcacactacttagcttccatttccaggtggctttagagtcttgctcatcagaaacagttgtaaccatttaaattgtacacaaaaacttgacacagctgaattgcataatgtgaattagctttaagttaagaaaaaaaagaagccacaatgtatgtgtgtgtgcacgcacatgcaaaaaaagacaacctgaaatcccatgagaacctttagtaaaatattggcagtgtcatgttttacagcaagtagaacatgccttggatgatggaaaacacaccatggtatccatgaagtcagcataagaaaaaactatttactgatcaggctgctacttaaattatgctttaagtt

SEQ ID NO: 152767 - DNA, 300 bp, Homo sapiens
aagcgttagacagacagaaagccattctcaagtgaaaagtaatgggcaggaggtaattagggccaggacagtaacaaaaggatagagaggaggaacccattggagtatttgggaaataagactgggaaggatttggtgactcactgatgccacttaaccatcccaggtggtcaacccttgaaaccctgcttcagagcagcatggtaggaaccttgagcccatgtagatcagtgcttttgagttgcccgaggatcttgttaaaatgcagagtatgctttagtgggtctgagattctgtatt

SEQ ID NO: 152768 - DNA, 710 bp, Homo sapiens
tggaattgtcacggatcctatctacatttacccctcaaactcaggtcctaatctgggacagagcagaaaaagaagttgaaaataattggctgggtgcgatggctcacacctgtaatcccagcactttgggaggccaaggcaggcagatcacctgaggtcaggagttcgagaccagcctaggcaacatggagaaaccccgtctgtactaaaaatacaaaattagccaggcgtggggcgcgtgcctgtaatcccagctactcaggaggctgaggcagaagaatcgcttgaacccgggaggcagaggttgtgatgagctgagattgtgccattgcactccagcctgggcaacaagagtgaaactctgtctcaaaaaaaacaaaaaagagtctgggagagggaaaaaagaaaggcagacagcttggtgggtagatgggtgggacaaaagtattgaggagaggaagacaagaagctggtttgggagattcagggtcttattaacattttaggccaagtacctggaaagtttaaaacaccctgtatttctttggacatgtgctaattatcatgacttattctgacatttcttagcctttttggaaatttctcttcttggctgataactatcatttttctctctttacattagggagtaagagctttgaggtacaagaatgagacggttgtggcagacactcatgttgtcacggtag

SEQ ID NO: 152769 - DNA, 181 bp, Homo sapiens
tttgcagagatacctggcacggaaagtgtgtccacaggcagatgtgaccatgagactatctttacctgctgcaatttgcagatgttttaggagcaactggactttgaccaggactctaattgagttatagtccagtggttccttggggaagcaatgggaggagtatttaaacatccaatgt

SEQ ID NO: 152770 - DNA, 222 bp, Homo sapiens
tttgttgtaaccatagtcttaaggaaaggagactggacaacaccaattaactttttttgggtgctctcctggaccagatgccaacagagcttttgcacatatgatcagctcatcaggcactgttggcttccttttctctttcccgcagaggctgggatggttctgagcactgagttaattacatgatgctgcagtacggtgggctccatcctctctgccctg

SEQ ID NO: 152771 - DNA, 747 bp, Homo sapiens
ggagaatgccgattcctcactcttcatcatttctttggtatagaagaaaatatataacgtaacctacatgaattttttcactggccctctaacattataagacagagcaagtggagtaactcatccactggggagggctacactgaggaaaaaaccctaaaaatttgcagaggtgatccttcaagaattcagcagaatcgttttcaatgtatgcatgtaagaaaactatgcatggctgggagatgaggagagttcgagtactggattctcaaccaggggatattcaccaccactctctcccacccccaccagttcttacagtgaacacattttgcaccaactgtgctctctgcctgggattgcctttccctggatatgtgcattgctaccttgatcattgtcttcatgtttttatctttcctcccctgttgcttgattagtgtggatcccaacatttaagaacactggatggattcatcgcctaaatttagccacctctcaggtaaatgagaagcaagtttatgaccaatattagccaactggtaccaggctacatcattggttggactcttgaaaagaaagcttattggtagatgaagctgaaaagatgcgagggtgggaactgctgtgattacctagcaaacataacatgacattctgtggagaacaacggcatctttgagaaccacaggaagatgaaaagggggagcatgtgctgacacagatgtgtaccactctccagtgatc

SEQ ID NO: 152772 - DNA, 656 bp, Homo sapiens
  misc_feature (560)..(560): n is a, c, g, or t
tgtggacacaagcgtgctgtgcctatcacacatggtatatattgaatgtgtcgcttgaatccacaggcgatcgactagaaaagaactaacatgacattgatgtaagtggctggcacccctcttacaacgtattgactcaaacaacctacccgtcgtctctgggataacagagattgttgtgcggtgatataataattttttttcttttttgcctgttcggctacttctggggcccggactgaaaagctaaccatgaccaaccattaaactgtggaatagtctctccacgtgaagaaagcccatcgtttgagaccattaaaactggattcttcatagccctggagcatgactgtagggatgacctctgagctggccagaatggacacattaatgaccaaataggcctttttccatccctgacgtttccttttggattgtgtcgactgcgtatgctgcagggcgtaggccggtgcgcggtgtcgactgcggatgcgcgggcgtcgggtctgtgacagggtgggggggtgggggcaggggtgggttgggctggggggagtggnccccattcgggctctgtgtctctcattttccctgtctccctccagggcctcgtcccagctggcatccggctcatcccccacaccgtgcttggatcg

SEQ ID NO: 152773 - DNA, 569 bp, Homo sapiens
cacccacctcagcttcccaaagtgttgggattataggcgcgagccaccatggctcagcctcatgttcgtttttaaaacttaggatggtggctcttttacattgattggtaggaactcttcatattacgaggcagttagctagttgtctgtgaaataaaatactaatgattgaactttctaggaagtacctattctgctaatagtgtaaatatacacttatccagggtcagaaatactcaagtttacccacttaaaagatctagaaaatacatgaacttgggcttacttgccagttaaaattgtttatctcagaattgtaccatcaccttaattaaagtagatatgctaggattatcctgataactaattaacatagcctttccccttagtgttcttcacctgaatgtagtagtggactcttcaagtctagcagaggcctgtttttaaccttacgcccataatttttttttttttttgagacaggatctcgctctgttgcccaggctggagtacactggcatgatcacagttaactgtagccttgatctcctaggctcaagcatttctcc

SEQ ID NO: 152774 - DNA, 282 bp, Homo sapiens
tacgaatcgagctcggcccgggttactagaaaagagaaagagagcctttgagctccatagaagcggtgaccacatgaatctatctttatactcaaatatctacaagagggtttgggaacaaatgagtacaaacagccatctgctctgtggaaaattcaggccaccataacacgtgtagataaatatacatgcatttataccccatcacaaggtagctttgcttaatttatacaaaaaagtgagaaatctattctggaagatatctgtggccattactactac

SEQ ID NO: 152775 - DNA, 263 bp, Homo sapiens
ctggaatagacttggcttctgggggtgtgctgccccctaggccccttgggtctctttcgctggactttcacatcctggtgtagtgccacttcgtcttgaaaggtagggggcttccacttcctttctgtaagcaaggaagattgggtacaagggaggtaaaaggacaagagggggaatctgtgagcagggggaatctcggacaacttaaaagagaagggatacaaaagactaaaaattttaaaactgtgaataatatatataaa

SEQ ID NO: 152776 - DNA, 618 bp, Homo sapiens
tataatgtaatggtagagataggataaccacataagaaaaatacctaacgttcattataattaaacaatataagcaaaagtaaaccagtaactatagtgaagtaaatatgtcaccactaattggaagcaatttgaagcattatctggctaatatcaaacagccttctgagaagcttttcggtgcttgttcctgctagtttcttctaggaaaaagtacgggtggtgatttttcagcctcttcagggctactggcttctcccttgtaatctataaccatgtttgggtctttcctattttaagatataaaatcttgacagttgcctggattccctactctcttatcatcccatcttccttctccactcccagcaaaacttctcaaaatattggctaaacactctactgtctggctgttttctttctttttcttcatgactctgtttcctctgcctgtcccttaaatatcagtgactattgtcttattgtccttattcataaaattttatatatcgtaatggtgtccaaatcttcatctttagctcatttttctcattcaactccagattgtttccctggatgttccacaggcacttcaaattgaacacgtataaagtggaa

SEQ ID NO: 152777 - DNA, 174 bp, Homo sapiens
aggatttctggtctcggtgctgtaggtcacatagccactctttcctggactgagtcttcctaagaaaggggacgggaagtaaggctggcctactggtgtggacagattccagcaacatacatgacctgggggcacaaggactgcttcctaaacaatgatgagcacacagccacc

SEQ ID NO: 152778 - DNA, 280 bp, Homo sapiens
gcctttagatctcacagtctacaggtaaaatggatctataaagagggctgaaaagtacaaatcatggcaagaaggtggcagagcagggactaggggacagctaaaggagggtcatgatccctttgcctgagggatcaatattgcccagtagtaaccctagagcaggttctttaaggatgagtttcccaggcagtcaggaaatggggagggaaatccctatggttttgtgtattggccccagtgagaagcaagtgtgtccccttcgggaacttgatgagta

SEQ ID NO: 152779 - DNA, 334 bp, Homo sapiens
cttctgagtcttgaaagtttattagatcactctgtatgcctttgtgtactcatagcttagctcctccttacaagtgagaacatacaatatttggttttccactcctgagttacttcagattatgagaaattttaaaggaaaaatcttctataacacaatcattcattctttctcagccttcctcattacttattcttttccaatatcttgtccccattgacctaactccctccattcatactctgtagtgtttcacacacttaagctattactcatcaattctgtaattgcatttataagcaagatctcttaaagagagtgtgagaaaatgtgg

SEQ ID NO: 152780 - DNA, 412 bp, Homo sapiens
cagaattctatagcagaaagttagagatcatgtggttcaatttccttcctttgaagaaaacgaggtcaggagaagctgaccaccttactatggtcacactgctcttctatttagaataaaaacaaaaccagaccagcactttcctaaccttccaactctctctcaccataatgatctgccctttctctttccatatggaacaatggaataaaacatatgaatcataggaacccaacaatgaatgaaacacattatatctgttgacataataaacttgcgtatcagctaaacctagcatttcccatttctcaatcctaattattcttttaccgtgctatttcctgtccacctattcgctttggaaaaaaggatgcctaacaacaaggagggtcactgtggtaatgactgtctt

SEQ ID NO: 152781 - DNA, 169 bp, Homo sapiens
ctgctggaagccgagaggccctgggtgccggccaggagcacagtttcaagagtttggagaaaggacgcccagcctcggttctgccccctcaacttcgtcctatcactctggcaaatcacatgttcatatgcctgggactcagtttcttcctctgtagaacaaaggtaag

SEQ ID NO: 152782 - DNA, 1039 bp, Homo sapiens
gacagctgcttcaggacaagaaagttcttttggtctctcagttggggccactgtcagcatcatgattggagtactggctggagttactgtctttattataccaaactcttatcagagttttaacaacagtcattttacatgttggtgattcacagatagttgttttgattcttcctgaaagcatctgcaatcagctacagtccaaaattgcttctatttcaaaagatttatggaaaagatactgacaagtactcttgcatacaagtttctgagcagttcaagattataccactggactctctatggacttccaaaactttaacaaacaggctgatgccttcatgaaatatgccaacctaggccaagcttaacaaaaataatttcattgaaataaatgataatgtggataatgtttttataatttttatttgaaaatttgctgattctttaaatgattttttccagatttatggaatttttcttcttttaagctagctatatctaaagcaatttggtaaagtatacttttggaaacaataattgaagcccatttatttttgctctttacctaactgtcccaggattgggaaactattcatgagtattcatatgtttatgctaatacagttatttgcacaagtttagtaagaatcttctctctttacaaaaggacacatttcaaaacattggttatattaccaaggctttgactgagatgttatatttgagaatatacatagaatggacccataagtactgcaggcaaagtctgaagatggccttcatttggcttcctcatctcaagaggtttgtaaaagtttaatctgagactccttataaaaacgtctagcgatgcaaactttaggaagagtctctgtggtccaatgctactcttgatgcacttatgtaaagaatcccggcaaagtttgataagactaaacctactttggaaacaaatttatcctactgggattatctttggtaaaaatagatattcttatagagagaaaaataacgttgaaaataaaaagtgtagtat

SEQ ID NO: 152783 - DNA, 783 bp, Homo sapiens
atacgtgactcaagttaccaagttgccatgactgcctactggagatgaaggaaacaaaatcatcattactgaaaaattcttgaagaaaaaaatgttcatcaatttggagatacctgtcttccagaatacttgagattattctttaaaaacaatttttaccacatataaacagaagccaaggctaactcaagataaaaatttaggtcttaaggatctttcatgcctgtaatcccagcactttgggaggccaagatgggcatattacttgagctcaggagttcaagaccagcctgagcagcatggcaaaatcctgtctctacaacaaatataaatattagccaggcatggtggcgagtgcctgtaatcccagctactcaggaggctgaggcaggagaatcacttgaatctgggaggctgcggttgcagcgagccgagattgcacctctgcactacagcctgggtgacagagtgagactgcatctcaaaaaagaaaaaagatatactttgggtgtggatagatgtaatatttctgagagaaaagatcttttttgctcactttaaaaattgttcctccaccgcatctcaccactccacagcctaaaatcacctgatattgatccctgttctatccagagtattagtgatgtgtagtatctattcaaaaagtgctccaatactgtctttgaggtttcctcccaggctaccggcacccattctgtagcttttgctgctctcaaatcttgagtttaccagaaattgtcaataaaagtttattatacaaga

SEQ ID NO: 152784 - DNA, 113 bp, Homo sapiens
tgtagcttggtcctcccaggagtctcggatgtaaggttagcagtcctgctgttaattctgtcacaaattttggacatattttcctttctcatatctggagaaagaatacatag

SEQ ID NO: 152785 - DNA, 232 bp, Homo sapiens
caggctgctgcttctgctgccccatgggctgagccaagtgtgcccacggctgcatctgcaaagggacgtcggagaagtgcagctgctgtgcctgatgtgggaacagctcttctcccagatgttaatagaacaacctgcacaacctggattttttttttatacaatactgagccatttgctgcatttctttttatattaaatatgtgagtgacaataaaacaattttgacttg

SEQ ID NO: 152786 - DNA, 160 bp, Homo sapiens
atctattttgggtgatgagggaatgggttatattttagatagctgcagtagttgtacaggtcttctggtaaatgaaatacagctaaagaacaattttttcctgctaaccaacaattctttccagtctccctcactctgaacttggaataatctcttttct

SEQ ID NO: 152787 - DNA, 393 bp, Homo sapiens
gtttacaataagacttgtgcaaggtttacaataagaaaacataaaaaagttctattactgaacagaaactagtttaaactttactgcaacattttttaaagagtgtattttcatttttatattaattttctattatttgtaattcttaggccactgacataacagtgctttcattagtgctagatatgccaccttgacacaatttaaaaatcaataatttttcttagtgtacttggatatcttccttttcctaaatagtggttatgcatttggatgaagccagtgaataagatggcttttggtttaaatttgcacccagatcagtcctgatagaaggccatgtgtttctctgtaagagacacatgtgcatgtgcatattctctgcctcactca

SEQ ID NO: 152788 - DNA, 500 bp, Homo sapiens
atattgtgtccggaattggtgggctcctggtctcactgacttcaagaatgaagccgcggaccctcacaacttaccacggtggagccctgcaggggctacagtacaaatggctgaaacatcaagagaagcttcctgtcttcctagccagaggaaccaggataacttgccccactaagctgcagagtgtaaggagactcctagaccaaaaacagtcagagaaggggatcctgtaactctgtgatgagcctgcacaattttcaggctctcccctgaactactcttatctggaacaaacctaaatcagcacagcaaaagtactgagagctgaactgagatttgaagcactgcctacatttcaaactgtcctgtgagccatgggagcacagaaagtttccaacaaatgtggcaaataccttaaaaagtggtatgataattgaactgatgcccacaaaaagtgagacaaaacttacagtctgaaactaactggggtaactgcctga

SEQ ID NO: 152789 - DNA, 420 bp, Homo sapiens
cagtgaaggtctcaagctaggacttcaccctcctacgtgagactgcctacttggcctctccctacaggctcaacaaagcttctaaaacctatacccaaagtcaacccttgagttctcctcaagcctgcttttccatctcgctaaatggccaggaaatcattctgcaaagtgctcagcttgacagcctcaaaactatccctggctcccactctcatgtcccactttcaaatcatcagcaaatctcactggccctgccttcaaagcatattcaaaatctgaccatctctcatcacttccactagtctgggttgccatccctctcacctggattactacaaagcctcctacttggtctcgttcctcccctcttgccaagccacccatcccattctttttgccacacagcagccagaggaagcc

SEQ ID NO: 152790 - DNA, 505 bp, Homo sapiens
ctaaaacgattcttgagtagagatatctgatgagatatatgactctgcagctcagaaggactgacctaaacatagagatctagaagcaatgaaagtagatgaaaaaagcattcagattacgaggatcaaataaagatccctggtaatataaacagggtaggtaaagtccaaaatggaggcttgaaaagctacagaagctaagggaagaaaatgttatcagaaagcagcaaatactacagtcgagaaataataaagtaaaaagaaaactagttcaagatagtacactgagcatgtgtttatatctgaggttacaaagtgaaggcttgaactttaaatccagtctataaaagtgctcttttggggacaaaacagtttttgttgttgtctggctgctttctgtttcccaaccttaaaacagaacatttagttttgaatatttctctgtgtgtgtgtgtgtgtgtgtgtgtgtgtgtgtgtgtgtgtgtgtgttatatttttagaaatg

SEQ ID NO: 152791 - DNA, 480 bp, Homo sapiens
ctgggttgtcagccgggcagttgagtgggagtcaggggtgctgacctcacaggcacggccagtgaggagcattccggggccctgaggatgccagcatgggtggtcctgggctcgccctctccacagcatggctggcgttcctcgactgccgccggagccccgggaagacaggcttgaccccgtgcacacacgcagggagacgccaggagccctgccctcagaagcctgcacgctttgcctctcttctggcagctagctaaccctgcatccccacctgagcctgtccctggcactgaggacactggacctgtgtcactggggtggggtgtcctgggtcctgctgggtgctgagtgtctccatgccaggagctcccgcctctaccatcgagatgaccacagatgtccccagacgtggcctggtgctccgtggaaaactgctgtccacaaaccatggcgtccttcccctgacccccgcccctt

SEQ ID NO: 152792 - DNA, 286 bp, Homo sapiens
gtgaatcatcactttccctctgctattcactgtgctctactcgccacaggttgaaactcagaggtgggcattaaatgccacaaagagctccagcggactctctgattctagctcaaagagctgaaaaggggcctcctaatgctcaatgccctaccttttccaagtcctcaaatagctgccgaatgcattccattcaggctttatagctgcattcagtgggacagacaagatggagtgtggttactccatctcactgggaactggaaacccaccacacatctttgag

SEQ ID NO: 152793 - DNA, 1473 bp, Homo sapiens
  misc_feature (1028)..(1029): n is a, c, g, or t
gggatctgtcctgagattaaataaaaggatagattagaggcatggtaggtccaatggagactttagatcctacaatcttaatggcacgagatgcagtatttgtgtcatttgaaactgcactgctaaaccattttggatgaaaggtgacacagttggggatttgctgattaaaatgcaaaagagaccagaatactgaagaaaagacaagtatgacctattgcaactcagcttaaataagaaagactaggaataatctgcctggaaggaaatggagcagggacaagaaataaatactgtgtaacaaaatgtctatcatatggccgggcacagtggctcacgcctgtaatcctagcactttgggacgccgaagcgggcggatcacaaggtcaggagattgagaccacggtgaaaccccgtctctactaaaaatacaaaaaattagctgggcgcggtggtgggcacctgtagtcccagctactcgggaggctgaggcagaagaatggcgtgaacccaggaggctgagcttgcagtgagccaagatcatgccactgcactccagcctaggcaacagagcaagactccatctcaaaaaagaaaaaaaaagcaaaaaatgtctatcatatagcattaaatatttagatgaactagaaaggaacactggaaaagagtaaagataccaattgtgtaaaaatgttggaattaattttttttctttaaaacataatttcttgtccgggtgcgatggctcatgcctgcaatcccaacactttgggaggccgaggtgggtggattacctgaggtcaggagttcgagaccagcctggacaacatggtgaaaccccatctctactaaaaatataaaaaattagccgagcatggtggcagatgcctgtaattccagctacttgggaaatcaaggcagcagaatcgcttgaacccaggaggccgaggctgcagtgagccgagattgcgcaatacattccaggctgggtgacagagcaaggctccgtctaaaaaaaaaaaaccacnncccaaaacaacaacggccgaatatgggtcaattgggcaattggcctatagggggcggtttacaataagggcggtcgttaacaacgggggatggggaaaacctggggtacccaattaaacgcttgggggaaaaccccttttcccagtggggaatatcaaagagccccacctgtgcctttcaaaattggccacctaaagggaatggaattgaggggaatattgttgaaaaacgggaaattttgtaaaagcgcatttttaacaagggcgaaaggcaatcctcttaacaaaaaataccccgtaagttaggtgttccattggcaagaggccctttaaaacgggctccaccaaggggaaaacccttttgggggggccttctgacacaccttattttgggggggcgcgaactctaagccctgggcccttatttctgggacacccctcgggg

SEQ ID NO: 152794 - DNA, 457 bp, Homo sapiens
aaacacactgcaatggtgacatttgaaataggaggaagtaagaagggcccagactgttggtatactaatgtagtgagctcagaatggctattgaaagacagtcttaccttcaggctataatgaacttgactgactctaaagatcctcaggcaacttgttttctttcatgggctccctaaggttgagctgacatgagctagaaacaatctcccaaagagcggagttactgaagtccactttctcccaacctacaaacctaagagcctttctgaattttcacatcatgtggattggaattgaacatcgtagggctcctggaatattagtgccacttgaaatcaactttttaattacagtgattgaaatgaggccgggcacggtggctcacacctgtaatcccagcactttgggaggctgaggtgggcagattacgtgaggtcaggagatcgagaccagc

SEQ ID NO: 152795 - DNA, 169 bp, Homo sapiens
gtcacatctctttcatatattttaatgtaaggtagttggcaatgacttttttgaagactgtagaccattattttgtagtatttctctcaaagtgaattggtctgttctcatgaggagagtcacatcaatattttggccaggaatactacatcagtgatgttgtgttctt

SEQ ID NO: 152796 - DNA, 167 bp, Homo sapiens
cggggcggggacgcccagccgcaaggccttgtcaatcactgcagaggcggaacctgtgaggacccggcaggggcacggacatgactacggggagagacccagccccgttgtctctctccaattccctgccccactgcagaccctgcagggcccacaaagggacctgc

SEQ ID NO: 152797 - DNA, 362 bp, Homo sapiens
gggaatcatctgataagggctacaggcccctccagtgcctcatggggttagaggctgctggagtcttctccagcttgggggcccctggttaggaggaatctacattgggttgcaggggagtccaggtgcaggatgtggactgaaagccaggacccaagagtcccattctgtgctggcccctgccacctttggcacctgtctccctcccagttcaagctgtggtggggcctgcagtagaggttggtagggggagctgtagtttctatattaaagtgctttgcagtgtctcaatggaagggaacaagtgggtgtcaagccgcatgggcagtagtagggttggggtttgagcccccttcccaacc

SEQ ID NO: 152798 - DNA, 270 bp, Homo sapiens
cgtggtggagagacggcaggctggcaggagcacttggctgaaggtgggcgaggcccacgctgacagcaccaccttcacggatgcccatgtggagccaggcaggaagtataccttccgagtgcgggctgtgacctcagagggggctggcgaggcctggagtctgaggagatattggtggctcctgaggctctccccaagcccctttcgcgccagccatcctgtcggcctccagccagggcatcacactgacatggacagcacctcggggcc

SEQ ID NO: 152799 - DNA, 203 bp, Homo sapiens
caactagacgaagcttgcagaaagcaatgaatatgtctgtcagattcacactgtgcccccagcaactaatacagagtctagtatgcacgtactttcttttattgtgcttcatggatactgcattttttttacaaattgaaggtttgtggcaaccctatatcaaggaagtctgttggcgccatttttccaatagcatgtgccta

SEQ ID NO: 152800 - DNA, 347 bp, Homo sapiens
attccgggagaacttggaggaagtaagataacagagaaggaagggactatggcatctttgaggatcgaataaggtaggtgaagggtccgtcgggattgcagccctcaattgtggagaagcagagagactctctgggggaggggttcccagagctgggtactgcagaatgaataagagtttggggaatcgggccaggtgtgatggctcatgcctgtaatcccagcactttaggagcccaaggtgggtagatcccttgaggtcaggagtttgaggccagcctggccaacatgatgaaacccctgtctccactaaaaatacaaaaattagccaggtgtggtggtgtagta

SEQ ID NO: 152801 - DNA, 563 bp, Homo sapiens
tgttgtaaattatgcaacatgtcttagaaaaagtacatctagaagaaatcagttttaaaaagtatcttcacgcgtttctttaaaccgctcacttaaagctagttaaaacagtaagcgtgattttgtttagcctttcattttataagtttaagatgccatttccttccgccctctttcgaagaatcattaccttgaaaaatgagtttggcacttttaatcattccacaataacccttatattcaactttgaatggcattttctttatgcaaaactattctctaggaaatacatcctcaaaaagtttctttctaattctacttgttggaggaatgatttttgaccaatgcctttgtttctgatatggagacacatcagaatcactagtgggaaagcaggtaactggaggaactaggcacaccatcaggggattgcccatgccatggacacacacacaaatggaaaggactcaagtatgagaggctaccgcatggcactctagagtaaaaatccaaagcaacaggtcaagggaagggtcttggggttcctggaaaccattttccag

SEQ ID NO: 152802 - DNA, 255 bp, Homo sapiens
ggaaaaaaaggcagagaagagcaggaaaggggaaggaaggagggagcaagaagccatggtccccaccctgtgctcaccagtgccttcctgcttctctgcccaaagctgcttgggccctaaagcccctgtgctggtgacctcattggcttattctaaccccaggcttgttttctgctggggaggtctacagcccctggggcaccttctcagggattagtgagggcatgcagtgtgggggagctcagggcacaggtg

SEQ ID NO: 152803 - DNA, 494 bp, Homo sapiens
caaaattaaatttcctataagcatggaatatcatacttagactttttctgcatatcaatatcatatattttattagatccctcttcatgttaaatttaccaatatgtataagtaatttttaaagctttctttactccaaattgtctaaacatatggttaaccctattatttgcaagaattcttgcataattaaggctgttggtgtttaattaccaacatcaccacaatagtggccatttctgtgtgttcactgagtatccatgtccccctttctctctcctaacaacatccatttatgtgtaggtgtctaccctgtccccccacactatccaagtacttagaagatgtctcccagcccagcacggtggttcaggcctgtaatcccagcactttgggaggccgaggcgggtgggatcacctgaggtcaggagttcaagaccagcctggccaacatgatgaaaccccatctctactaaaaatacaaaaattagcag

SEQ ID NO: 152804 - DNA, 365 bp, Homo sapiens
cttgcttgacacaggattgccacagaccttcaatttgttaaaaaaaaatgtaggttgggcacagtggctcacgcctgtaatcccagcactttgggaggccgaggcgggcggatcatgaggtcaggagatagagaccatcctggctaacacggtgaaaccccgtctcaactaaaaatacaaaaaattagccgggcgttgtggcgggcgcctgtagtcccagctactcgggaggctgaggcaggagaatggcgtgaacccgggaggcagagcttgcagtgagcctagattgcgcccctgcactccaacctgggggacagagcgagactccgtctcaaaaaaaaaaaaagtaatatctgtgaagcaca

SEQ ID NO: 152805 - DNA, 753 bp, Homo sapiens
acaatcagcacaatcaggtactactgtcacctgctgtctatccccagacttagcatggacctgtgagatgccggcacagagcgccgagaggcctatgaggtgctctggggttactggctttgtgtcagggcagcaaccaagtcccattctaggtgagcccactgcctcgcagcccagacacagcagagatggagcatggacacagcagagatggagcatggagaggtcaaacagccgagtcccacctccattcctaccaccaatcccaggcctaactccagggcgtcctgacctttgtagtccttggtccttccatcacctgttttccgggcagtcagaccaagagcctacccatcctgaaggaaaaaatgatcagggagctcttcctggccccaagacatgccaggcctcctcctcacagcgtccctcgtctgcggccactgtctgcccttcatctatgttctcaagcactgaggagcccagcacgggccaggaagcttccacttcagcctgctttctgccagtctccttgcagttttcctcctgcaaacctctcaagggtttggagaccccctagttcccagagtgtgtatagccctcaagcagcctcagctccaatcttccctggagtggactggtatactctagctggtgtgcccacccttcccccacacactggtgctaactgtctgggtcccaagggactgccactggaaggccaggctggctaacggcaggatagagtttcccata

SEQ ID NO: 152806 - DNA, 250 bp, Homo sapiens
catatgctaagctcttgaataccactgatgtttactgtaacatcttcatagggcagtcagaagagagatgttaataatctatagatggctagttggagggacaacttacatgtttcctgctcagtgctgcactaagagctcatgggtgcccctggtaataatttatgctcttaatccccatggattacctaatttcctagataaactattcccgacagtcagcgctttgcagggcttctgagccattaaa

SEQ ID NO: 152807 - DNA, 362 bp, Homo sapiens
gtactaaacatagagaagtcccaacccccagaaacctgatgagccactttctggggtttcttcagaggtagaatggattgatgatgaatggatgaacagatgaaaagacacaagctgtacattcaaaaaatgtccaagtgaatgttattccaattaaaagtgcaagagctgaaaggaaaaaatatatcaccagacttaagtaggggagatggcaaacaaaaattcttctgtgaaggtagactttttagagtggaagaggctttgcagatggaagaagtgactccaggaaaggcacagcaataggaaaatggaggaatattcaacaggtgcatccagcttcaggggcaaggctgctgttggtc

SEQ ID NO: 152808 - DNA, 596 bp, Homo sapiens
tatggctattcttgcaggaataaggtggtatcgcattgtgggtttgatttgcatttctttgatcattagtgatggtaaccattttttatatgtttgttggccatttgtatatcttcttttgagaattttctattcatgtccttagcccactttttgatgcgattgtttttttccttactgatttgcttgagtttgttgtagattctggatattaatcttttgtcggaggtatagattgagtttgttgtagattctggatactaatccattgtcagatgtatagattgtgaagattttctcccactgtgtgagttgtctgtttactctgctgactgttccttttgccatgcaaaaactctttagtttaactaggtcccagctatttatctttgtttttattgcatttgcttttgggtttttggtcatgaaatttttgcctagccaatgcctagaagggtttttttccaattttatcttccagaatttttatagtttctgatcttaggtttaagtccttaatccatcttgagttggtttcttttataaggtgagagatgaggatccagtttcattctacatgtggctagccaattatc

SEQ ID NO: 152809 - DNA, 402 bp, Homo sapiens
atttcaggatcagaaaatggtctttaggagctcacaggcaaaaccaactctgaaaaacctttaatactcagcatgggtattcactaagttaagtctccaccctgagtaggaattgttttaaagctgctgtaagagtctaaatctttccttcacgttttatttcttgcaaatgtttgtgaacgtgttccttgctcttagattttgtgaaatgtaggctagagtagaacttatagcactgaaatccatttctgctttactcttagacaggtagccatgatggcatctctggagccaagtctctagaatgcaatagtctttgacataatagtgcttttgcaaagctggagaattagacaatgccaaaattagaaagtgtctgcaaggaacccacgcgaagttagt

SEQ ID NO: 152810 - DNA, 166 bp, Homo sapiens
caaaactaacagaactgtaagaggaaatagacaaatatgcaatatttctcttttagaattccatagaacaagtagacaaagtatcaagaaaaatccaggagacttaaacaagaatatcagctgtgtttggagctgccaagaagcaggtaccaagacaggatttaac

SEQ ID NO: 152811 - DNA, 595 bp, Homo sapiens
gcccacatcctccttcgtgagggtagggacactttccctgggggacagggaagaacattttttcctggcgcgtgtttcagggccagaggatctggttagtttaagcaactgcacccacggccccagaacttccagcagatttgtgctggagtccttggcccctggctaatccacatccagcaccctgttcctatgtcttagaagacgatctcttgaaaccttgttttttcctcaagcttcaattttccttggtattttccattgggaagcctctcctggatagtcagtcctgtaggtcttattttcagatccactctgggtgttgacttttcactgcccactcctttggcactagccagagatttttacatctgcaaatgctctccagagccaggacgagggtgatgatccttgtctttcagacgaggaaatttgagactcaggctacttggggacttgtctgagtctcacaaatagtaaagggcacagcggggatttcaagcccaagtttcttccccaaagcctgtgttcattccaccctgtctcactgttcctgcttttctgcttgggaggtcactataagcttaaccttttc

SEQ ID NO: 152812 - DNA, 811 bp, Homo sapiens
tgaaaaggtatgacagctgcattgtacaaatgacagaaagattgtcttgatcttctctaggaaacttttctggcacttggtcaatttatagagtgctctctatcttgtatttctgaatgttagaattggaaatgagcctgacaaataatgatcagtttgcatagttgatttcttttaaaatctgagaaaagttcagtcatttaaaatgaatattattaaagcgaacattcatgagcatagttgatagtaaacagaagaaaaaagggaaaaaagcagggagagaggagtcagccccagtgacatgctgacttgaatgttgtgtttgtcccctccgctagaatgtaagccccaggatggcaattatatctctctgtgctgaacacagtgcctggtatgtaacaggtgttcaatttatatgtgttgacgaatgaatgaatggactactaacgtttttgttgtttttttctacctcttttgttctcataggtaggtttttttttttgacctatgtgattgcagcatactgcctcgtttaattcttacgtaacacttacctcaattctcatttaattctgcctaacttcaaaagagtttttaggtgactgtatgtttttctcattcattctttcagtagaaatagcacttatttccttaaaaatggtctaaaagcatcatgcagtggcagatatatacaaattttatgtatttgaaatctgtgtgggcctacatcaaggaatgtaagtaacataccagagtttgttgtcagcatctgcagatactgaaatagtaaatggtataccagcttttttgg

SEQ ID NO: 152813 - DNA, 341 bp, Homo sapiens
acacaggaagggtcagaaatggagtcaggcacaccaacacttgatcactaactggacgtttggaaaggttctagatgcatcagtttctcctgctttataaaacaaagattgtttttcaaccaacttgtggattttgaagaatggccaccaagcatttctggacaggtggatgtgccaacatgaatcgctgtgctctgccatccagtgggtggcggccggggcctgagcagagctgcctgctcacagcagcacatgcaggtgggcatcccacttgtaagagcatctacaacgtgggtggtagagagaggaaatggaaacgaaggaagaatggatgagccttg

SEQ ID NO: 152814 - DNA, 563 bp, Homo sapiens
tctttctggtcatcctctacagaaaaaccaattctcctgtttcccttttttctttaaagactcgcctctgtccctttttttttaaatatacacctctcccaaaacgttttcatcgcaaaaaaaaagagttatgccattattaggaacagcgtgtcccaagacaagatctctatgatcctttgtatattcaagattgcaagaattgagctttaataactcatagaccataaacacaccctgttaaggttttccttcaaacagcaacattcccactcttgcgatccctaataggcgtacataagccacacaacacaatctttcaaaacgacacagatggtaggtgctctccaacctctctcgagagatcctcactgcacattctcctctaaagggcccacaaacactactgtcattcagagggatggtgactgttgagcgtgggtgggaaagaaagtgcacacgagatacctaactggatggggaaggttgttagaggcagccctccggtatcacgtaactagccaaacccgctacaaacttttgagagattaagttaacattcc

SEQ ID NO: 152815 - DNA, 507 bp, Homo sapiens
gtcaagtatttacttcaaaattaatttttaagtcgggattaaaaatgagtaagtaattgtagctaaagccttttatcaactcaaactttctaaaatattatatttgctttttaaaccacattttggtttggacagatagatatgcctggaaaaataaaatataacataagaatgtcaagtatataaatctcacacatatacatttagacaaacacacaatacacgtatgtatacatacgaagtttgtattttaggaagattcttgtggtagggtgaaaaaaaggtggggagtgtgttccttttgaatgttttagattttaaatcgttcctaagcgtatttcctgcttaaaagtcactgcttcaattggtaccacgcagacacttccctgtgcaaccagatctggtttgctgctgcaatgactattcacaggcatttcaaatcacctcccacgactgatgtgctcaccgctcacattccttcctcatgtatcataaaacatggtttgt

SEQ ID NO: 152816 - DNA, 406 bp, Homo sapiens
tacatcactcaaatttctctagtgaaaaacttcagaatccttgattgtactctgctaccctatatccactccaacaagctagttcccttggctctcctttcagaacatacttaaatcccactacttctcagcagctccactgctcccatcctaatacaggcgaccaacacatctcacctaggtgatgaccacagcctcctaactggtctttctgcagctattctcacattcttcttcccgatgcagtctacattctacacaacaggcagggtttttttaattatcaccatcctgctcaaaagctcaaagagcttctgacttggagtaaattgctacaccccaaccaggaccagcaaggtacgacctctctgaccttctcccccagaccctttgctcattccactcc

SEQ ID NO: 152817 - DNA, 348 bp, Homo sapiens
catacctatttctcttttctcagactattttccttgctaaattggaagagctttcaggcattgtttttccaaagagaaccatcttctacataaacagaatttgtttacaatataagaaaagtatttctaatgtttggagtgttcacagaattatactggcatttgagaatgacgaaagttggttaagagatttaataaaaatccgaatcaagtaaactctcaaagacttttaaaagatgaatcgaatccaatgacctaattagctctcctgtggagcccaggtagaggtgcctcatcctgaccagctggtgcctgagctgagctcatacacaacactgctcccgtgtg

SEQ ID NO: 152818 - DNA, 552 bp, Homo sapiens
aactctaatcacaacatccgaagacttgaaataacccaactgcctatcaggtgaatggatacacaaactgctatatccatatactggaatactactgagcaatagaaaagacaaactactgactggtgcagcaaatggatgaatctcaaacgcgttatactacaggaaagcagccaggctccaaatgaaacaagctctatgattccatttacataacacaattataggaacagacacattcagtggttgccaggggccggtagggagaggggctaaccacaaggggcaggagagtccctggatgattatataactgtaggcactaggcgaaactcacacacctgtacgctcaaagcactcaatttttaaagtgaaaaattctcatcttttggaagaattacttttttgtttttggttttgttttgtttcgttcttacttgacacggagtctcgctccatcgcccaggctggagagcagtggcacgatctcagctcactgcaacctccgcctcctgggttcaagcgattctcctgcctcagcttcccaaatag

SEQ ID NO: 152819 - DNA, 326 bp, Homo sapiens
tcacgcccatgtcacaaccctgtctggggacgagaccagcggcgcggggccactgccggagctgaggccaggcgtgagccaccgttcctggcgccctttgctgctttggatggtccctttacccaggtgactggtggtggccagcttgcctgtgggtggccctgcagtccagggcttgccctccctgtgacaaggccttctgctgggctgccccagagcagagggcaggcatgactgagggtcctgagcagctggggaagaccagtgggagatgagggtggatcacttgaggctaggagtttgagaccagcctggccaacatggtg

SEQ ID NO: 152820 - DNA, 195 bp, Homo sapiens
gttcctagctgtactcaaattcttccaggtacagggattttactgtcttcctccaaaagcccagctcatctttagggggccgtaacagtggattttagctcaacataggaaaaaacaccctggagccctcttttccactaactggccttacagtgcccgatggagtgggtcagaacaagccaatcgccccctcgc

SEQ ID NO: 152821 - DNA, 472 bp, Homo sapiens
  misc_feature (45)..(45): n is a, c, g, or t
  misc_feature (56)..(56): n is a, c, g, or t
  misc_feature (102)..(102): n is a, c, g, or t
tctagaatgaagtctgtaagaatgagtttcgtcgggtgcaaaggngcaggaatcangtttttggtcaagatatgttaagtgggtgaccactaagacccttcncgcctccttaatccaaacctaagcagctgccctgcgctgggaaagaggaggttgtggcatactgaaggggcttggccatgagaatctttgctgtgtcataggggcactgccttgcaccatggcttttgctcaaatcaagccaaacctggaacagttcactcccagctgatcacccctgtcattgtctcccaagccaatttaagatgctcagtggccacacacagagtttctggtagtttatttaagcagacacacagggaggaaaaataaaaactaaccttaagaaatccccataagcttccagcttctctgggtggtgcttctgactctaatcacatagctgctttgtgtggatctaccacagattatg

SEQ ID NO: 152822 - DNA, 159 bp, Homo sapiens
catggatggaaatgtgagggatggcaggagagatgctatgattgaatgaatctcaatattcttggtgatcaaagaataatgagactcatgcaataagactctgtgaatgattgaatgtagttcctaagctaggaggaagaatgaggaatgattttctgg

SEQ ID NO: 152823 - DNA, 516 bp, Homo sapiens
cccacgggctgtcgcatcaggaagcttgtgacctacaaggagaggtgacagggagaatcccaagaacaattaccaggctttgtctttctgccgccagtggctaagaaggagcagcactgtccagcccgccatctaagaaggggccatttctggaccctgctctgtatttccagaggctgttgacaatcgccttcattttctttttctttctttctttccttctttctttctttctctttctttttcttttcttttttttctttgacggctaaatagtactccattagtatagatgtaccacactttcttttttgacagagtctcactctgttgcccaggctggagtgcgatggcttgatctcaactcactgcaacctctgtctcccgggttcaagcgattctgctgccacagcctcaggagtagctggaattacaggcatgcgccaccccacgcccggctaattttgtatttttagtagagacggggtttctccatgttggtcaggctggtctcga

SEQ ID NO: 152824 - DNA, 438 bp, Homo sapiens
caatcctaaaattaatttgacctggacacactaattcattattgttggcacaaaggaaatccttgaatgtagacctgctctttcatgctccacggatgcatgagacattttctgggcctctgaatttacattggttgatttttttaaaaacatcatgctaccacaattcaggcatatgttagttttaattttctgataattataaagaccattaaggcattcctactttatttctgaaccaaatctagcaaaacctaaccagtcatctcacacaaattaacctcagaaaagacagcacatcaagttgccaatggggatgtctgcttatggccaccagcattactcaggtactctgtaatttagaaacctaaaccagaacacattttctcttaaagaaacaacattgtaagtatgaatagtccttatttacctccaatc

SEQ ID NO: 152825 - DNA, 239 bp, Homo sapiens
ggttttatcatgtcagagctcgtgtcacatccagtgcaggcgtcaatactaagggcatgagtttaacgggctttgctgtgttaaaaactcgtgggaagtgtaagcagtggagcgctgtagccacccgtcgccacgatgccccaaacagtagcagttcatggggaaaaaaagaaaaaaagaaccattatataaagaggaacttgagacatattgaaccaagtataaatgtatagactctc

SEQ ID NO: 152826 - DNA, 259 bp, Homo sapiens
cccgtgctatccctttggtgctgaacatgacactttggagagccttttttttttggagacagagtctcactctgtcgctcaggctggagtgcaggggcgtgatcctagctcacggcaacctcggcctccggggttcaagcgattctcctgccccagcctcccagagtgctgggattacaggtgtgagccactgcgcccaccccagttatgagaattaaataagcaaaatgcctggaatatagcgagaagtcaatgagtg

SEQ ID NO: 152827 - DNA, 208 bp, Homo sapiens
catggaagcaggagacatgaagggacagggaggggatggctgagagaataggcagcttcatggagttagagaaagcagagtcagagatggccatggtacccactcttacccattcccaccccaattctcccagtcaagtctgatgagatgttttttctgacctccgcaacccctggactggggttaagcccacaaggtgtttccagag

SEQ ID NO: 152828 - DNA, 453 bp, Homo sapiens
ggagcccggtggcctctgttgccggcatacactggaaacgcgcatctgcgtctgtctgcagagatgcagggtcttagacgcggtgctggggattccagtgaaacgctgggcaggatcccaagtccgccagcaatggaatggaagacccaccgtgatctaatcgcccaccagcagaggccacggaggcggaggcgagccagccacagccccgccaacgcgcacgaatcccacgtggcgtgagtcttttcacagaccgtgggaaacatgcacaactgcctggtatctaatttagggacacagcctcgtgacgtaaaccctgcagaagcacagaggcgtggcgcacgtgagaattcagggcagcgggctgcggcagagcgggggaggaggctggaagcgtccctggagctgcacggggccccctccctcatggcaatgtgctaacatagctgaata

SEQ ID NO: 152829 - DNA, 370 bp, Homo sapiens
gggaacagggagtccagtttaggaggcttattttacaattataattatagaaaagagatgacatagtggcttggattgggggcttgaggcagagatgatgagaagtagtgtattctggatatgttttaaaggttggaccaacaagatagagagaagaagagtcaagaatgacacttggctaggggcagtgactcacgcctgtaatcccagccctttgggaggcctaagcaggaggattgcttgaggccaggagtttgagatcagcatgggcaacaaaacaagactccatctctacaaaaattagctggatgtgatgggatgcaactgtagtcctagctacttggtagatggagggaggaggatcccttga

SEQ ID NO: 152830 - DNA, 570 bp, Homo sapiens
ccattctcctgcctcagcctcccgagtagctgggactgcaggtgcccgccaccacacctggctaattttttctatttttagtagagatggggtttcaccacgttagctaggatggtctcgatctcctgacctcatgacccacccgcctcggcctcccagagtgctgggattacaggcttgagccaccgcccttggcccatatgtcattacttacatctccttggctagagcttagtctcctggccacactcaaatgcaaacatggttgaatgcattttatttattttacttttttagagacaattccattttttgagctgcttaagccaaaattcctggtatccctgtggtagaaaagctagttgcctcccaaaacgcattcaggacggatgcagtggctcatgcttataatcccagggccttgggaagccaaggaaggaggattgtttgaagtcaggagttcaagaccagcctaggcaacacagggagaccctcgtctctaataaaaatttaaaaattagctgggcacagtggcacacacctcccagttactcaggagactaaggcaga

SEQ ID NO: 152831 - DNA, 423 bp, Homo sapiens
cgcctgtaatcccagctactcaggaggctgaggcataagaatccttgaacccaggaggcggaggttgcagtgagctgagattgcaccattgcactccagcctgggcaacaatagcgaaactccgtctcaaaacaaacaaacaaacaaaacaaaaaaacttaatgaatacagtccctcctaagattttcaaataaatgaaataccacattaatcatattgttttatttttatcattacattaaaaatcaaatagtatcactaggtttataatgaaaaacagcagaccctgtcccagccctccacactctcagtttctactccctagatataatctctattcacccagctacctcttctggtatttatctccgtatttctaaatagcatgcttatactactaattcttaatttttcagtttgggc

SEQ ID NO: 152832 - DNA, 175 bp, Homo sapiens
ctcttcccctgtgcaacatttccttacctgatcctatcagagcacaacccttgcttccgtggagcatgtgatccaggagaatgacatgtggggtcacttttatgtgtttaacttggctttttattcactccagataaacggtggtggttccctgtgtaagcagagagagagagaa

SEQ ID NO: 152833 - DNA, 399 bp, Homo sapiens
aaatcaggcaaataaatttagtgtgataaatgccacaacagagaagcctttccagagaagaagatttgtgagctaagttttaaaaatacacaaaaaagtgtgctaaaaaattggggcaagggtcctggtcacagaagaacattctgtgataagcctcttgacagccttaattccaaagaatgctagatactcttttttgctgtaactgaagctgggttctctcctgaagcacccccagaaaccctctcaactcaccctcctacatctctcacatctcagcaccctctggtgctggccccagatcattactcctgcattcccttgtctttgtggctcatgtcatttagcaatactatccttttccttccttttcactgccacctactgcctgcgtaaaat

SEQ ID NO: 152834 - DNA, 281 bp, Homo sapiens
aggcggaggttgcggtgagctgagatggcgccattgcactccagcctgggcaacaagagagaaactccgtctcaaacaaaaataaaaacaaaacaaaacaaacccacaaaaacaaaaacaaaaactgtaatccagcgggaactaatcatgttggtgataataataatgacagctctggtctcccatgtcccaagcgtccactctgtgcctcatgctgttcccttcaccagcagttagttctccatctaatctttcttctgagaaaggcagggcagtcacgg

SEQ ID NO: 152835 - DNA, 765 bp, Homo sapiens
atggagtttcacccttggtgcccaggctggagtgcaatggcatgagtcttggctcacagcaatctccacttcccgggttcaagcgattcttctgcctcagcctcccgagtagctgggattacagtagagacggggtttcaccctgttagccaggatggtgtcgatctcctgacctcatgatccgcctacctcggcctcccaaagggcggggattacagacgtgagccaccgcgcccggccctggagaattaatttgaaggggaggaaaattcagtttcagctcagctagggatttagtcttactaaagacgtgggaggaagttctccagctgaccagctttccccaacgtggaaaggaccacggcaaggtcacctgacctctccaacaaacattacacgccaagggattcacagtcccgccttggccatgagggagattgtgctcacgcagacggggcagtgcgggaaccggatcggcgccaagttctgggaggtgatctctgatgaacatgccatcgactccgctggcacctaccgcggggacagggacctgctgctgaagcgtatcaacgtatactacaatgaggccagcggactccccagtacaacatggcctggagatctttccatgttcctctgtacagatctgtcatcgatttccagcttcatggtaaccacaggatagatggacacaagttgtttaacccactgatagacttcattcctatactttccctaatgcaaaaataaaactcgagcatcctg

SEQ ID NO: 152836 - DNA, 200 bp, Homo sapiens
gcctcttgtgcatatcacatggatgctaaaatcactgggtgaatggtttttagagaacaatgtatttgcatttgcattgtgtcaaaacattattccctagtccccaccctctagattctttgctaatagcaaagggaaaaatacatatttatggccgggcatggtggctcacgcctgtaatcccaacactttgggaggcc

SEQ ID NO: 152837 - DNA, 209 bp, Homo sapiens
aggttagctggtgctgctgttataaattcaaccattatttttgacctcctggtatataacaagcattgaacaacacactggggacacggtagggaacaggggggaaacagcccttgacctcaaagagcttgcaggctagtggagctgtgagatgccaaagagatgatcttacaaataatggattatgctgttacgtgcactggaagtgc

SEQ ID NO: 152838 - DNA, 145 bp, Homo sapiens
gagtatttcttggaaattgagcctcaggaaggcaagtgagactagaatctaggctgcctatctctgagctggtcatctcattgaattaatggtggcagtcattggttacctgaacattttaggactcctgtccacacgtggtatt

SEQ ID NO: 152839 - DNA, 217 bp, Homo sapiens
agaccatttacaataacctatctactctacataaaatattcccagtagactcatcaaaacaagaccctctgataccacaccatactgggtttttccttattgggattcccccatgttttttctttaatgcttccccatgttttagaaacagatttgcttacccggaaccttccacactcaattccatatttatcatagtactatcatttgggagtaa

SEQ ID NO: 152840 - DNA, 165 bp, Homo sapiens
atttaaaggagcattacaatcccaatttaactaagatgagttggttaaactcaaactatgctcacataatagagtatattcagtcactataaatggggactatagtcagaattactggtaattcgcccgtgaaacctttaaaagatatacttacctgggaataac

SEQ ID NO: 152841 - DNA, 370 bp, Homo sapiens
acccaggctgaggggcacaacacagcaactggcctgcccccttacaagactgcaggtcatcagagtaaaaaaaaaaagctgaggagtgctccagactcaaggagatccaggagacaggacaactaaacacaatagtgcatcctgaaccggatcctttcactacaaaggacattatcaggataaatgggaacccatagctcattgctaaccccggctctgatggctgcattctagtcatgtagaagagggccccttgtttgcaagacatacaccctaacagtgatcaaagggtaatgggtatcaagctggtaacggttcagggaagaaagttcttcatactgtattcgcaacttctctaactttaagacgt

SEQ ID NO: 152842 - DNA, 234 bp, Homo sapiens
aatttcctgtagtcccaattttacctcaggcttaaattaagcacaaaatatgctaattattactatatattcttagttcagagagttgccagtaagctgccaacagattgaaccaggaagaatctacacatggcaatgaaacaaaatttaaatgcctcacaataaggcatgatgaacactccatgttagagaggaagccacaacctaaaagacgacttcacccagcctaattat

SEQ ID NO: 152843 - DNA, 148 bp, Homo sapiens
gtgctgctgggattacaggcctgagctaccatgagcccaggaatttcatgagaatctctctccttctagatgggttctggagtaagaccacctgggttcgactcctggctccattgctaaccagctgtgtgaccttaaggacgttact

SEQ ID NO: 152844 - DNA, 689 bp, Homo sapiens
ctaaaggcgtgcgccaccacgcccagctaatttttttgtatttttagtagagacagggtttcaccatgttgaccaggatggtcccgatctcttgacctcgtgatccgcccacctcagcctcccaaagtgctgcgattataggtgtgagccaacacgccaggctgctatacaactattttaaaagaaaacttttatatctttggaactttgaaaggcgttttcccctcaataccagaacttaaaattccttaggctgggcaccgtggcttgcacacttcgggaggctgaggtggaaggattgaggtcaggagttcaagaccagcctagccaacatagacctgtcctatctaatctatctatctatttacttatatatttatatattttgagagagggtctctctgtcacccagcctggagtgcggtggtgtgatcttggctcactgcagccaccacttcctgggttcaagtgatcctcccacctcagcctctagagtagatgagatcataggtgcatgccactatgcccagctaattttattttttgtagatatggggatctcactatgttgcccaggctggtcttaaacttctgggcacagtgatcctcctgccttggcctcccaaagtgttaggattataggtgtgagccaccacacctggcctagtctctttaaaattaaaaaaaaa

SEQ ID NO: 152845 - DNA, 492 bp, Homo sapiens
atacgctccactcttccctatctccaagcatttagtgataccattttcacactgaaattctatctataattcaaggttaagttaaatgttacccacctccttcccacctagcctccacagtgggtctgctcacaagctgttttctcacaaaaccagaaccatgaatgccttacacaaagcaagactaaacaaaacaataatgaagttttgctgagtattcttcaaagaccattctgaaatccacagctttcacaagtagactaaaatacaatacaactcatctttccaaagatcctgtctttattgcagttcataattttcacacattacaagagaagacagctgaatgaaactacaaatttcaaaacagattaagagaaatgagttccaagccatgcttttgatggaaagggaagaaggaaaacagtgatatgttaaaaatggagccaggagcagtggcatatgccggtaatcctagttattcagcaggct

SEQ ID NO: 152846 - DNA, 213 bp, Homo sapiens
aggtttgttcccatctgtcttagggagcctcagtagctgtgttgagcttgtggggtctgtttccatggcccaaagcataatgggcagctgggtatagagggtcacaggctcagggtctgggagagcctctatttctgggacagcccagtaagtgggggccagtcatctattgtattaatgctgtatagcatgaggccaacaggggcaatatct

SEQ ID NO: 152847 - DNA, 434 bp, Homo sapiens
ctcaggctgtcggagaaggcatcatccctggggagaagacagacatgaattggaggcaccttcccccaaagaacccagcatatacagagctccctgatatgtgtctgaggggctgaattaacacaacttatggttactttgtgcccacagcgcttgctaggccactgcccactgggtgccttcccaccacgcatgcccattgcaacactcctggtcagtttccgcagctgggaccctcttctgtcccacacctacctcctccttttttctcttctagcttgttcattcccaggcagctccaggctaggacaagctaaatgctgcagggtgtgttggagaaatggggggatggagtccgcaggctgagcaccgagggctgagtgctgagtctctgtgtgacttcatgagaaatggcttctggctaagcaagggag

SEQ ID NO: 152848 - DNA, 528 bp, Homo sapiens
aaaattcactcagcttatatatttagggtttatgtacctttttgtacaaatgttatgcttcaaaaaaagttaccttaaggaaaaaaagaggcttatcttttaaatactactgtaatgcttctaaaccacaagaaaacagacgctaagaatagggtactttacacttccttatgtttaaagcatgacagccaaggatacgttacatgtattttggagctcaaagctatcacaggcacagtacccatggattttgttctctaacaaaataatggcagttctgtaacacattatggtattaggctaaccaagcaggtcccaagtctgacttctttacaagtgaacaggtttaatttttcaaaaactgaatgtacggctcacgagcaagcgatctgagattttgaaatgattcttaccgaagtacccttttcattaagtctttccttctatagcttgagttcagaggggatttattcatctaatactaaacatttcacttctgttgaagcatgtggtttagttgcataacat

SEQ ID NO: 152849 - DNA, 247 bp, Homo sapiens
ggattacaggtgtgagccaccgtgcgcagtaataaatgttaaatacagcagaaataaatattaaagaacaaatgggaaattaatgattgttcagttaatgacagttctccctctccatgaatattagccagaggataaccaccaccacagccacaaagggtcaaacccaacagagctgtcttggaacgaagctgggtttgatttccttgcatctctcccgaattctcacatggtctcctacacaaga

SEQ ID NO: 152850 - DNA, 299 bp, Homo sapiens
acccaacgaatccagtactgaatgttctgccagtatatgtggcctctagtcagtaaaatagagcccaatcctaattcaacctattgaacagtaagatgttaatggggaacctagccttccactttgtctccttcactaggttgacacttttattaaataatcagaaacagaaacaaataaaagggaaacagggtaaagtaggctagcagagatataaaagatataaaattaacaagacctttgtcctacatggatatcttatcctttgcatttgtaaagaatccgaaaaacacatattc

SEQ ID NO: 152851 - DNA, 366 bp, Homo sapiens
agctgaaggcatcgctgatcctgctggacttcattaagaaagacaggtccaattttccaacgtgagcacagctaacagccaggaaactctggggctaggaaaacacctcctccagaccattaacaacttgtggtcaataaaaacctctcgttcctggcagccactctggctcaaatcgaattccacgacaggaaaaaatggctcaccaggaacacagaattcggaacctatctgtgacttaccgttcgaccagaagcctgccaggcgccagctgcagagtgagacctgcacggttccctggaagaacaagccagggtaggaaaacagcctcctccattcaagagccatttccttttgaaaaccaca

SEQ ID NO: 152852 - DNA, 1012 bp, Homo sapiens
gcataaagcccgtatcacctcacttagacaaaaggacagtgacatgtctgcaactgttttttcaaacttattagcaacacttagccaactatatgccacctatctgcctatgtatacttttcaatgcccaactattcttaatatatattccagttaaccacctataaataaacttgattggctattttcaccatttgtcctagttcttcacttttttttttaccaacttactgctgttgttgttccatccagttattctatccatgaattctcatcaccatctgttactttatctcccccaactgatatgttcatagaatgacagtttgtagatagaagatccttaaagtccatcatatacacaaagaaatggaggctcaaaaatgttatatgacttaggccattgcaggactgagatcagaactgaggtctcaatttgtctgagttttttaaaatggtgtaatctgctatatctccataaaaaaaaacaacaacaacaacaaaaaaaaaacaggcttaatccccattgatttaggccactggttccccaactttacctcagaatcaactttgtagttttttaaaaacactgatccctgggacccacagaaggttactgaaccatagcctttggaagtaggacaaaggaaactatattattaaaaggcactccaacttaaaaaatgttttaaagaataatttttttaaaaagatgcctcagggccaggtgcggtggctcacacctgtaatcccagtactttgggaggccgaggcgggtggatcacctgaggttggtagttcgagaccagcctgaccaacatggagaaaccccgtctctactaaaaatacaaaattagccaagcatggtggcgcatgcctgtaatcccagctgctcgggaggttgaggcaggagaatcactggaacctgggaggtggaggttgtggtgagccgagattgtgcttccgcactccagcctggacaacaagagcaaaactccatcttaaaaaaaaa

SEQ ID NO: 152853 - DNA, 162 bp, Homo sapiens
ttggagggactgactgtcttgggttaataccctgcttgtggcatgtttcccagagtgcctgcaaagacctccatgctgcagtccccagccacagttcagagtctgggatgcgctggcaatgtttgttctagaagaaatgtgagaaataaacattaaggtatc

SEQ ID NO: 152854 - DNA, 110 bp, Homo sapiens
actatctcatgtgtgaggaagcccagagagaactgaccaagcactaggagagcctggagtgtctgccatcctactctgtctactgcctcctcccacttgccacgacccta

SEQ ID NO: 152855 - DNA, 497 bp, Homo sapiens
ctgcagaaggatgatgcgcgggctccctcaggaccagagtgagaaccatgagtttgtggctctgtgaaggagaagcattggaagtgttgagctttgaaaagaaaaagagtaaaacagcaaagccttgggagtcagttgaactggtcagttgctgagaggctggcagcggagcgttgccgttggtggatgtgccacaggcagagtttgctccttggctggcaggtcagggactcatcactcagcccagccatagatactctgagtccaaagccggcccaaatcaccttgggccactctaaagagagaaataaatgccggttgtcactttctgataggctgataatgactttatgctacaaaaacataggtgaagcggattgaaaatataaccattatttggggattgattaatgccttttccttactcatgcaggggttatgagactgtcagtaaatctaagacatgttaaataatgtagaaaactatttgtagtata

SEQ ID NO: 152856 - DNA, 472 bp, Homo sapiens
accctccacgttcacaaacttatataggcacaaaaggagtcatatgcatggccacagagtgatgcacagatacagcatccttacatctgatcataacattgacttataagaacccaaagaattgacaaatacattagtaattagtaattatgtatctacctatcctccccaaccaattccaacaattcctgaattgtcaaaccttactaagagatttcaacccaaacccacaaccatacctcttgtcccctatactatcctagatttagaagctaattaactttttcctatactccaaggtgggagagggagcagagagcaaaaagagatttttagatagcttcaaatacgtgaaacctctaatagggaagcaattcattttgggaattcattttattttaatgagttctgggtaacctgagagaactaggagggaaaaaaatcaggaaagaaattttcacatggtactcta

SEQ ID NO: 152857 - DNA, 466 bp, Homo sapiens
ttctaaagcaatatggggcaggcgataaaaagcttcttgggcatcagaaacatcgtgaactgggatactgaagcaggaaagaattcactgaaaatgagtagtatatctcagccataataacgaaaaattggtatatcagaagccattaggctgaggacacaccgatactatataatttgtcatttatttggaaaacaaaatcgaccctcaggattttacgccctcagacaattaatctgcatgtatttaagatacaaaaatacatatataccatccacataccctcatctcaaaattagaacagcttgtgttaaaacataaagactatgacagttcttactcatttatcttttcacagttaactatttcatttagattttatggcaatctgtattcacatgctagcatagaagtcatattaaaaaaccttgattgagatgtaattcacatatcatactatttaccc

SEQ ID NO: 152858 - DNA, 393 bp, Homo sapiens
ggcagtgcaccgtgatgcgtgatggcgactctagaggacccgatgtgattgttgaaaacatatttattttcagccagataaaactcagagcccccaaatggtgacaagatcagaacccgtttgttttctcatcagctttggctcatccacctgtgaaacattcataacattgcagttaatttctacaaatacttggatgactggctgggacaaatgtacagtagcagttgtggtgctaaaaataaaaatatagctagaacaatcacatcatggacaatcacatcatgaacaatcacatcatgaacaatcacatcatgagcaatcacatcatgaacaatcacatcatgaacaatcacatcatgaacaatcacatcatgaacaatcacatcatga

SEQ ID NO: 152859 - DNA, 507 bp, Homo sapiens
taatgagcagcgcacacacacaaaggcgagctaaaaatgtctccacccttctaaatatgggatgccttggccaggtattgagtcagctctgtgacgccagtgcaattatcccgattcagcatcagatttattcaccattaaacatgttctaacttgattgcaaacaagccttgtattatttagagggatccacggagctggcagagggggcagaggtgtccgcaggcctcctgcccttccaggcttaatggatgatcatcttccctgctaaaaaggcccattcactaggtgagtgatgtggaactgtttaatgaaagcaggaagatgatgtgaatgccagttcacttgagtgttacaaacggtttgggcactatagccttaaagtttctcctgctctttgcagatgaatgaaggggcgctttctggaatctttgtggctggggctgctgctctgcactgctgtggctctttttcacaaatgcttatggagctctaactgggggcaag

SEQ ID NO: 152860 - DNA, 298 bp, Homo sapiens
caggagatgggccttgcccttcttcagcaaaggtagggctagatgcctcttgttacagttccttctagagcattttgtaactgggaatgtgtggaattgggggtgggtgggtgagaaggatgaatcctgactactgagctagggataaagggcaaaggacactgagcaggctcttgtaataatccaggcaagcactgatgtgctttggaccatgatggtggcagtggaagtagcaagaagtgattggattctcaatatatttgggcagcagaacttacagggttcccaaacaggatga

SEQ ID NO: 152861 - DNA, 167 bp, Homo sapiens
gaacaagcgaaggagaagaaaaagataatttttttaaaaaagaatccttttatgagcttatgctagcttattttaatgttcttgcattataggcatgattaaagattttaagtgtatgactttgcattttgatcagagttatcatctccctcaaggctgctcaataa

SEQ ID NO: 152862 - DNA, 450 bp, Homo sapiens
tttcaaattagggataaaaggttttaagacgttatcacttatttctttgcttttcaatttcatttatttttatatttactcctttattatcaatgtgtcaatgcagtaagtagtaacataactaaaatatgaaatgaaaaatgattattaatacactgatattacaatatacatatacgtgaaaccatattaaacaaatattccaaatatttgtaaggcaagttgttgaaaacacattgcctgtagtctccatgagatacagaattgggcatctgtgactgctacggactgggtatttgtgtccccccaaaaattcacatgttgaagcctaaactcccaatgtgacggcatttggaggtggggcttttgaggtgtagctaggtcaccagtgtggagccctcatgaatgggattagtgcctgtctgagaagagcctatcagcactttgatc

SEQ ID NO: 152863 - DNA, 478 bp, Homo sapiens
gtggttctgctggatcctgctgtcccacctttcacaatctcattgtctcctttgattctcacacaaccttgggataaaggcagaacagagaatgtccttatttcacaggtgatatagggtgacctgtgcttcaacagaggactgtgtggcacttaggaatacagactgctgttcactcccaatgtgacataaggacctgtgaactaaggacattccctgatctgcagtcaaatggcccagaccactcacctgcaacagggttggtcaggattcaaggagatggcagagtatttctttttctcctgtgaggttaatgtctttggccttagtgctcagctctagccaaatgagttggcagcccagattttaggacttagatgagggttggggggaagaaagttccataaccatcttagtgcccatgaagaatcattgcgcaaagggtaaggattttcctttgttctctctacccagaaca

SEQ ID NO: 152864 - DNA, 280 bp, Homo sapiens
ttccatgccttcccctggagtcctagacccgctagacaacatcatttttccttaattttttttaaagctaacagtttagggaacattttatcctttctccagcaaattcactagcttctgatgtaaattgccatccaggttccccagggcagcccaggaatgggggccagtgtctcaccctctaggctcaggtgtgtggcaccctgctgcccggctcctgcccgcctccccagagacagcacgtccctgcagctcctgggggagggatgcttattctgta

SEQ ID NO: 152865 - DNA, 364 bp, Homo sapiens
gggtgtctagaggaccgtgtcatccctcgtcagatgcattggtgaggggaggtgacgagatggattgagttgagagtagatgtgggaaacggtatacaaaaagcgattaagggaaggtgggggcagatagcggatttggtttgggggatgttaggatggaaaggcctcatggagatttggcatccaacaaatgtgtgcccgtcacgatgtgcatagcatggtgtggtatttgtgttaggctttgaaatttatgtgatgattcggttaaggtcagttggttgtttaaagggaatagacgggaactagtgaatgttgatgcttagaaaaaagtgggaatgcgagaggagttggaggaaaaggaaaa

SEQ ID NO: 152866 - DNA, 452 bp, Homo sapiens
acatggcaacaatacattgtgctggccagaaaggatgtcagcaaacaaactagggcccttggcttccagttttccacttctcgtacatttgagctggagctgagatgtctccttccctttaagccctggggtccttttcatccaactccatgagtgcagctgggaattcccaggttggaacttgcagacatggggagtggggactgctgatattacatggcataatttcaggtggtcttggctatggggtctcatggctgccttgggccccattttccctttcagagtcatggccagctcacacactgcaccacacacagccctggtgaggaagccactggggtggagaagggaagcctctgcccagtgccacacaatgcgtcagtagaggaacttaactgagcatggaggccaggtggcctgctcctgggccagtgtccattccacgagcc

SEQ ID NO: 152867 - DNA, 583 bp, Homo sapiens
tgatttctaggaacccccaaaaggagaatagtaaaaaaagatcatacttaaaatttgtattacaatttttattttaggaacttattcagacacgtaaatgttgtttaattctgtaggtaaccatttgagctgcaattcaggatcttttttataacaccagtgtagccaaaagagaaacagataagtgaattggtaagaaataagattcagagcacttgggattgtaagttataggttctgagctgaactgtttatcagccgctctttttattaaaagacagtgtcaacacttcaaaaaacgtgcttaaaggagacaacggtgagattaattgcttagaaaaagctcaaggctgactgataagttttaaaaatttggtggtcttgtagtattttgaaatacagtagtcttttaacagaatttccccttagggaggtaagtggacagaaatctttgctaaaatgtttatatcatatttattttaaaatgagagagatatatttttaaattatttattatttaccttgtggtatggtacctgtgtttagtgtttacgttctgtagctttatttaataagttaaatt

SEQ ID NO: 152868 - DNA, 300 bp, Homo sapiens
caaccagggcttcttggtgttatttagatctgctttgtctaagaacacagcagcaacctggatgggccacgtctaccaaatgcactagggaattggaatttgtaattccatttgtcgacagggagaaaaatcatggactatcatacaatagacggggaaattgagtcccatagaggctgagtcccatagaggctcaagattacgtagtaaattagagtcggagttagggctagaaacaagatcagcattcaatgcacatcttcaacattttcttccctgtacctcattggaggctgtgga

SEQ ID NO: 152869 - DNA, 735 bp, Homo sapiens
tttgatgaagacacgtggtggggtgtgttgctgactgttcagccagaagcccagagtcttgaccgaagaaatttgtcagcctcctttgagctctttgaagggatttttgtcctctgggatgccctttaccagtggatccttgccagatcattcttcaacgtaatctcttcttcacaacatttggataccttaaggggaaggaaaaacggatgactcatttggtttaaaacagaatactccagatgccaagaatttatttactgcaataagttttcaggtcgtataatttcagtttgattctctctgctttccaccaatgcatacgtactttgtaggaaagaagaaagttgcacccttcccactccttctggatatatctccagacaaaggaaaaacagctggccatgctccagctaaagattccccgtagacactgcctccaacatcaaaggagacaagacccaggaatcagaacacaactggcaacggaagtcaagaatgtcatcagatttcatactgattaaatctttttcctcattccaaaaatgtgactcgtaaaggtggaagagaataattattaaattccagcctggccaacatggcaaaacctcttctttactaaaaatacaaaaagagttagccgggcgtggtgggactgaattacttgaaccagggaggcagaggttgcaagtgagtcaagatcgtaccgctgcactccagcctgcgtgagagagt

SEQ ID NO: 152870 - DNA, 997 bp, Homo sapiens
aggtcaaacattagctggtgtcatttcataaatgaagtgggcctctttcctaaagctttttccaagtatcatctgcaaatgttccagttgggtgctacaacatgcagaggccaccctgtctcatcgtcttgtcttcaccacccacccttctctttcaaaggcagtatgatcagacacagtagacggggggcctatcctaccaaatcccacctggccctggatgctgcagcttagggcatccaagagcccaccagggcaagcctgcactgtaccttctttctctgggttgtcagtggcaggccactctgctcaggcctgccaagtgagggtggtacactgggcaaatcaactttctggtagaagcacaggaacatctggccccaacactcttctctccctctgcctaccccacagtaatcctcagaacctagagacctaatgacaactctccaaacttcattctaaagtcaggaacaagaattggaaacctcatcacaagtcagaagattgagacatgcttaaggttactacctatgtgttcagattagcaaggacaggagcacactgtaggtaccaaccgcttatccatggaaggctgctcctgagctgcactgggctgcatgttatatttgtgtgcctgttgtctacaaacactcctatcccatcagaagtacacaagggtttgtcagatgacttactggccacgagtgaatcaatgaattcttctcaggaagagaaccagtttgccttttaaaaatgctgacagtgaaacccaagtgaggaaactcacctgctgcacccagcgtgcagcccacactccttcagtggtcctttaggagttggaaccaatctagtttcccagcctcttctcccatgacttcactctacgaatgcgtctgctccagccacgaaccttctctgggctcctcgaatgtacctaaccctttcaggctgtccttcccccatttcccacctaacaaaacccttttgaccttca

SEQ ID NO: 152871 - DNA, 325 bp, Homo sapiens
ccaggactcaggttggtgttatctggtgagactatgggatgtgtagagagatgaatttctatggattctctgcatgagcttgtgtctgtggttggggaccttggggcttagggactgaagaagagtacatgaatggcattcacagggacggtgatcctctgagttgtatgcaaatgttggagtgtttgcgcatggaaccgaactagtccatagctttcgctatattctcagaaacctctgtaactccttgaaaattcagaacactgatatatagggaaatacccagagaggattagaagggtagaaaaccctgtaaacccagcta

SEQ ID NO: 152872 - DNA, 505 bp, Homo sapiens
gtcaggtcccagctcaaacatcacctcctcgaaggcctcccttgttggccacctaaagtggcccagtgcctctggcctactgtctttccttttgacatgaaaatattggccctgaaagagcaggatctgcgctggccagcaggcatccaggatacctctggatgcttatcaggtgcataatacattcactgaatgagcagtgcataaaataattgaagaaggaggtttccatttctcttctcactgctgtagtcatgataagcaataaacaaacaatgacgaggccggtcgcagtgagtctcgactggtccaacacttcgggaggcggaggcagatgcatcacttgaggtcaggagtttgagaccagcctggccaacatggtgaaaccccgtctcttttttttttttttttttttcagaagggagtctcgctctgtcacccaggctggagtgcagtggcacaatctcggctcactgcaggctccgcctcccgggttcacgccatt

SEQ ID NO: 152873 - DNA, 247 bp, Homo sapiens
tacctgacatatagtcaagtctcaataaatagaagctttaattactcctctcatcagtgctatcatcatcatcatgaaaacatatccttaaaatatatacacagaatacattcaaactaaatccataatgaggtaaaaagccaaatctcaattattcataggctatctagttggagctccaagcccttcatttcctcttcaagggtaagtagcttttggccatcttactgttggctatcacctccac

SEQ ID NO: 152874 - DNA, 189 bp, Homo sapiens
atcattacctaggccatgggtcaagtttgaatgtggcctcatcactgcaagcttatttgcaatgtttggggtccctcaaacattcacataaactggagtcattcatgtttattaactgtctctatggattcttcacctatcgccttcctctgcaaggtgtatggggtcattagtgaaatctacattctt

SEQ ID NO: 152875 - DNA, 300 bp, Homo sapiens
cctaaatccccttgaaaatcactgaatttttctgttctaggtgtggctgccaacttctctaggagtttgctcttgacaacatggaggtagtgtcattggtggagataagaaaaatcatgaaagatagttgcttcagaaaagaactggagatgactagctactagaaattgtccagtagacaattgaaaatctatttgtttgttcatccaacaatatttttgagcccctacttggcacctactatgtgtcaggcacctgaacaaaaaagacaaagacccctgctttcatgaagcttactga

SEQ ID NO: 152876 - DNA, 353 bp, Homo sapiens
acctcatgatgtgcttgccttggcctcccaaagtgctgggattacaggcgtgagccactgcacccagccggggatttgaattcttatctcaccatttacatactaagtgacctttggcaagtgatctaacctgagcgtcaattccctcatctgaaagatggaggacataacccctatctcattaggattattataaagatctgatgaggcaaagccatctgtgcaacagaaatagaaattcaggcatctaatataaattaaccgcatatgtcatcctaaaattttttagtagatacatttttaaaagtagaaacaggctgattcattcttcaataatgtatttgatctaaacc

SEQ ID NO: 152877 - DNA, 714 bp, Homo sapiens
caggttatcccatgtgagcgcctagtacgtgtggaaatttaatagacaggcagaacagaacgtttgtagaccacctgaacaaataaattagcacccgtattagagtcgcagattgcttatatgggcggtgatttattatttgttagtagtgttttgaagaagaaatacggggatacatatgcagtcggttttaagttatatgagtggcaaggttgatatatattggctatattcccgactggtcttttcaccagccaaaagtcctctatgatgtcactctacgtacgggattcttcacttaactctagccttcgccctttccctaccttctatcccctctttccgtgagtcagcccccacttatttcccttaaaggtaagtttaaacatttaaaaaactatcttagaggatacgcttggttatttctaatcttaacctgactatcccatgtaggaaggctattcttaccaccagttataaatatttcaaaatattgatggagatacatactaatttttagcagaatctttaaactgcccttgaaggtataagatcggtcctatacctaaacttacctttgtgttaggaaattcttgatttgattttagactgaatttgagtgtcagaaagcaatgacgagatattgtaggttaaagctgataaaccaggtagtacataaaaaagaaaataatcttgaactgcgaaggtgagcta

SEQ ID NO: 152878 - DNA, 448 bp, Homo sapiens
gtgatggcctcccaggtgctctatctgaccccaggtgtgctgggggagcctgcacatatcccttctatctcaccgctggccttcatgctctttgtcaccaaccctggcacctctctacctgagggtcttctctggtgggcagaatccactctgtctaagcatgggtgggtaggaagtgcctgagaattaaaaaccctctctttcactggatgatgatgtgagttggtgcataaataccccagctccctcacccgtcagggccgtaatgctgagcacatgctctccattggcttccagagttccctttggcattaaggtccaggtattcaccatggtcatggtagcctgcttgataatgctccatgttttggttaaattacctccctgtctgttttttctacttcccttttcctgtttccttcacctcccaaataaactacttgcatta

SEQ ID NO: 152879 - DNA, 599 bp, Homo sapiens
agccttaatcctgcaaccaaagagagacaacaaacagaatgaagttactcctagaaattagtgggaactagcttattgataacctcataaagcataaagctccttttcttctccaagttccttcaaatctactatcagtaattcaatggtggtccttaagaagttaaatgcaatgccaaccctccacctaggattgtacaatctcattatgtatctgcccctttcacagacaagagttaacacagcaggcctgaggctactatctacagaaggacctgtctgcaagattagatcctggctggtatctgggaacttggctttcaaagttaactgacaagaccaacaagggctattcactcttcctagaccgtctatacaaacatggtgatttatgctgaacacctgccccactctagaagtctagaattttttttttcttttcctttttttgttgagacagggtctcactctgtcacccaacaggctggagtggagaggcacaatctcagctcactgcagcttcaacctccccaggggcttaggtcatcttcctacctcagcctcccaagtagctggaactacaggaatgcaccaccatg

SEQ ID NO: 152880 - DNA, 102 bp, Homo sapiens
cctcccaaagtactgggattacaggcgtgagctaccgtgcctggcctgttcatcctttttagtgtagtttttagcacatgaagaggacacaggaggtgttta

SEQ ID NO: 152881 - DNA, 376 bp, Homo sapiens
  misc_feature (203)..(203): n is a, c, g, or t
  misc_feature (220)..(220): n is a, c, g, or t
aaggatgaggaattgggaggggctagacatcataacaataactgaggtgggggtaggtggtctcagtgtgggtggtccacaatggggcatggactgcggtctgaagagggcctgtcctcactcaggtctgggctctagcagtgtggcacttccgacagagcacgtgaccgtccaggggaagcagccattgtcatctgcctcantcgacaggggcttccanggatgaggaattggtagggctggaagggaactacagtatgacctattgtagtccttcattttcagagaggcctggaggagataagtgtctttaccaaggtcatggggctgatcgatatggagaggcagagctacaaatagatctgtgcacctctga

SEQ ID NO: 152882 - DNA, 296 bp, Homo sapiens
acaatgttgtcctgtgttgagcatttttaaaaggtagaagctccatgtgtgggggtgagggaggtgggctataataagtgatgagttgcctcttgagaaagctctgcagattacttttaagagaaatatccaaaataaataggtccatgtaaacaataaaagtaaagtatgttatttctcaatggatacatttatatttgcttccaatcccagacatatgtaaaaggaacttttgacaatatatattaagaacagtctagactcacacttttccttttttttttttggagacaagg

SEQ ID NO: 152883 - DNA, 386 bp, Homo sapiens
ggtgaggctcctcaacaggataagtgtgtgtgtgcaggagggtgagcgtggccagtggaggtgggctaggctaggaagaaactgtcaccaggggcaggaactggggccccactcttgagctcagcccctaccctcccatctctagctccatgacctggaactcagcctttactgtctggtgctgggctacagttctgctctttattgccccctacctcccagcattgccatggcaaacactagctcctaatggtacaaataactaatactcaggggacaccaatgccaggctgagcgccctgggtgtcccattcgtttaagcctcacaacagtcctgaaaggctagtctccgtgtcccaatgttatttacaaggaaacttgggcta

SEQ ID NO: 152884 - DNA, 187 bp, Homo sapiens
tagtgcatcctttaattatttctgtgacacgatttttttaatgtaactatttaatacatatggtatatattttggtataccgatgaattcaggatcttagatatcatcccccagtattctaagtacttttaaaacactttattgaatattatttcttccatattaatatgttaatttcattagatac

SEQ ID NO: 152885 - DNA, 321 bp, Homo sapiens
acagcagttttggggaaaatgtgtgtgtggccccagctgcctgatttttctctgagagtcagaagtggtgtctgagtacatacaggttaggaatccccaaggtctgtcttcctttagctactaccagcccccatcttcctccaggactaatattttttaaaccttagtgcaaggacctatcccccccagactaaatactgattatcacaagagatcttgcctgctagctctgaatggacttgtggaccaggtcccttgataaactgtagtgggggttccagtaatacaggcctctttcttacaacagcaaagaatccccaa

SEQ ID NO: 152886 - DNA, 131 bp, Homo sapiens
agatccattcagccaactcttcctaagtgaggaaagaaagatcaagattaagcaaaacaaagggagaaatatatgaaggaaaagaaatacatacaaaggattgtttcccttaagtattaagcaattgcctt

SEQ ID NO: 152887 - DNA, 563 bp, Homo sapiens
cagaggttgtaatgagctgagatcatgccattgcatgccagcctgggtgacagagcaagaccctgcctcaaaaaacaaaaaacagtttgtcaattatggaacatttggaaagctgacagaagcctccacccagaacagtgtttttgtaggttacatctatttcagttctccaaggagtcccaaaggtattaataaggagctattttccatttcctcagagcagtatgtatatggggataggaggatggggaggtggagtaagttagggagaataaaaaaatatgccagggggttgttgtcaatgtagtgcccaagcaagcagaaaagcagcagtgtttgacagcttgctatgcacatctcagcaccagctatcttggagaggtatcagtaaggcctaatctgctattcaaaaatatctgatctggttctcttaacctctcaccaacttgttgaaggtccttatttagaattcagtgcccatttctcattcatgagagatttacttgtggaaagaatcaaatggcatccttgtctgtgaactcttccatccaagaccttgggga

SEQ ID NO: 152888 - DNA, 442 bp, Homo sapiens
tgtggatttgaattactgcaaatatgtctcctgggttcttcccaattgaactgataattagggtcctgccacatagtccctctccaggcaacagctctcatccattatgaagtaagtccacaaaaaaagtctttcaaaatccttccactgctttccccacgattcctgagttgattttccttatcttctctcttctttctgtcctcttcctaatggaagataaaatagacaaattggcactttttcccctttattctcttcctcaagcttttttttctcctctatatctttctctatttttcctacggctttgcctctctaactgcaattctttgcctttttttgtgtcttctctccttttttaagtgtcccatttgcatttgctgttgacagaggccatggcaagctagagccaaaagtagagaagctggctttggccccc

SEQ ID NO: 152889 - DNA, 338 bp, Homo sapiens
caccctttcccgactcctgttttcatcttggagatgggcatggataaagccagcatggtgtccttggtggctcaaagggggcaggggtcatactgctgtgaaacagctgtggttggtaggtcgtggtacaagaaggccaaccctgaggcttgggattgttctgctgaaaacaaatgggctcgaacttggggaagagggggcagtggagaggcccccagacagacagcccagagaggctgctgggcagttgggcctcgtgcccctgctcccgtcacggtgctggggctctggcggtgtctacacccagcctcctggttgtgggcaggcagtgagtggag

SEQ ID NO: 152890 - DNA, 258 bp, Homo sapiens
agaagcatcaggtaccctttggaagctggtagtgctggtcagtttaatctcactctgtgatgtccgatcctcgggccctgggctcacaagccatcgcttcccatcgtggctccattctgtagctgcaaatcacaagactgtagacttgccattacccagaagcaggtcacctctgaaattcagaactcttcctgtcctcccactacacagcactccttgaagcagccctgcccacccctgccccaacctgggaaatct

SEQ ID NO: 152891 - DNA, 312 bp, Homo sapiens
acgcaatgagggcacaaaagcagcttctccctggctatcttcagaaggaatcttagattgcccttgaacaccatcaacaatctgctatttggagggctggaaactaagcctaagaaaccaccaggcttcggccgggcacgctggctcatgcctgtaatcccagcactttgggaggccagggcaggctgatcacctgagcccaggagttcaagaccagcctaggcaatctggtgaaacccagtctctataatatatacaaaaactagccaggcatggtggcgtgtgcctgtagtcccagctactggggaagga

SEQ ID NO: 152892 - DNA, 488 bp, Homo sapiens
ctgggcggacgtcatacaatcgggcaaggagatgtcacttggatgacggatggacgagccgcgatcgcgacatgatcggcagtcgaggcacccagacaatatattaaaatcagtgctatattactgactcgagcatcatcaaatatcgatgctcggaaagggcaaggcatgaaccacctgaagagaactgaatattcatcaacgagcatactatgtgttacgcagtgatgagtaaacgcttcggaaaggaactataatttgctctctagcagcaatgggtccagactgcttagatcagggtagaccatgaggaggaaagtgtatggagttcaaagacacatgaagtaaaagccacataactgggagtgagaaagggagagagagagcgcactggcaatgaccatcttctacttttatgcacatataaatcctgcccaaacatgagctcacatgctacatcctgcacaaaaccttcacttttgctcctt

SEQ ID NO: 152893 - DNA, 670 bp, Homo sapiens
agtatatcttttaaaatttggagcaagcattatacataatgatatcaccttaagagttatttactttaaaattgggaataagacagttacctgctttaccacttctagtcagcatttgatggagggtattaatcagcaaagatggaaaaaaaagtggtctaaagtttggggaaaaacaatcgtaaactatatgattgtttatatagaatatccaagcgactttacagacacattatttaaaatagatttgttatatgaagattaacaaaaatagatacaacaacattttaaaaattaattttgtttctataaaccagagatcagcaaacttcctctgtaaagggccagataaatattttagacttttgcctgacacatacaatctctgaaatacattctttttcttcttcctttgaagtaatataaaaatttcctttagctatggggcgagacagacagaggcctaaagctagatttggccagtggaccataatttgttgacatctgttatatacagaaatagataattgaaaactgtaaatactggccagggacagtgactcatggttataatcttagcactttggaaggccaaggtggatggatcccttgagcccaggagttcaagaccagcctgggcaacatggtgagacctggtctctacaaaaaa

SEQ ID NO: 152894 - DNA, 716 bp, Homo sapiens
taaaaatacgaaaattagctgggcgtggtggtgcacacctgtaatcccagctactcgggtggctgaggcacgagaatcgcttgaacccgggaggcagaggttgtagtgagctgacatcgcaccactgcattccagcctctgggtgacacagtgagacctagcctcaaaaaaagagtatagaaacaggtttgggatctagtagatatacatatttcaaaatatgtaaggatactaagccatgtaacactacagagaagttaggagtgtgtatgtgttggggggtatttcccaaaagatggagcgggagggttagcattactcttgtgagtttactgcaattcatggtgtggcctttagctttgtgagctataccagggtggagcaatctttcaagcctagatccacagtgatcaagctcatgcgactggtgcataaaaccaggaaagttagcttattcatttacagtgagccataactagcacaaagattgcagtactgtgttgacatgactagtatgttctctttcaggaggcagatagactcacgtaggaatcaagacataatcattaaattgtttagtaagtgtggtatgacagagaagagttggatgctgctcaaatgttgaatgaccatcgtctccacagtagggggtagatttgttagtgcactgattgtggttcacacttttttagactgtacattggatccttcagtgt

SEQ ID NO: 152895 - DNA, 136 bp, Homo sapiens
ctcagctgctttttaaaacgatttcctctacctcttggacttcactgaacctgctgttgaggatactgcctcctctgctgtcctgttaaaagaggactgctttgttgttgttttttttttttataacccctgcacc

SEQ ID NO: 152896 - DNA, 273 bp, Homo sapiens
acatattatattaataatattaatcaacttatcacaaccctgacaatacatagcattgtatcaacacgtatcaactgctgagagctgcacaaaataccctgggtggattctcatttaatcttgttaagaaccttttgaaccaggtgtcatgatgatgcccatgttactgaggtgaaataactgagtcacaggggttatatcatctgccccaaatcacaaagggaatcagtgtcagtatcagaaatttaacccaagcaactgaatggacctgaa

SEQ ID NO: 152897 - DNA, 511 bp, Homo sapiens
ccatcttggccaggctggtcttgaactcctgacctcaagtgatccacctgccttagcctcccaaaatgctaggattagaggcgtgagccaccgcgcccggcctaatttttgtatttttagtagaaatggggtttcaccatgttggccagtctgatctcgaactcctggcctcaagtgatccaccagccttggcctccccaaagtgttgggattacagacgtgagccacggcacccagccttttgtttgtttttgtttttatgtatttcattaaatgaattgtccttttagtggtatatcaggagatcttgccttctggtactcttgaaaaatatgaaaagaaacaactgaagtaggcatctcctataattagtatgtagcattttattctcagaaaatgtgtggtaacctggccctggattttacctttttgcaaagtgatatccgaataaaatgaacactagattcccacttggagtggaagaacattgcagttgaggccttgggtaagt

SEQ ID NO: 152898 - DNA, 297 bp, Homo sapiens
agatcctgtggttagcagcaagtcaccgagtccagcctacgcaagcgagcactaggaggctgtcaggctctgagccatctcagttgtctcggtcttcctgccacgctgactgcgacagccctggtcagcattcactgagtgcctgctgtgtgcctggcaccgttcaaacactcatagattaatctttaatcacttatggattaataatttaacctatacattgggctgggcatggtgggtcactcctgtaatcccagcactttgggaggccggggcgggcagatcacgtgaggttag

SEQ ID NO: 152899 - DNA, 343 bp, Homo sapiens
tgtgcctgtcccaagggaccgttggaaagatgagagaaggaaatccatataaaatgcttaacacagtatttggctttagtaattgctcagtaagtcatagctatatgttattaatatgatacacagtcattcttctgaaatgaatgggcatgaatgcttccctctctgcataaggaattatttgtgctggatccttcttaagaggcttctcttctcttctcttctcttctcttctcttctcttctcttctcttctcttctcttctcttctcttctcttctcttctcttctcttctttctcttctcttctcttcctttcctctctctgtagcccaggctggagt

SEQ ID NO: 152900 - DNA, 569 bp, Homo sapiens
ctagcaatctttggagttccctgccttgtagaagcatcacctgatctctgccttcatctttccatggcattctcccagtgtgcatgtctgtttctgagcctaaattttcccttttttataaggctaccagtcagattagggtccacattcatggcctcatcttaacttgactccatctgcaagagggtctgcaaagaccctattttcaaataagaccctattttcaaagaggtactgataggatttcatatctttttggggggacacaattcaacctgtagcaatgagcaataatgaagtgacgaggtaagttaccttttcaaaagggattcctcacaagacaagggtatgttgtgtagcaccagcagctggcttcaagacttactgcctgacattttttaagagtaaggattttttaattgccccaaagcctcaggatcatttaggtggactaagggatagtattgtagtctttagggctattctcaaatattgcatatctctctcctcctctgggcaatggtaaaaatgtacttcccaatctgaaatggcatggccacgtgacttgc

SEQ ID NO: 152901 - DNA, 239 bp, Homo sapiens
tgcccagcagagatgaagttagattctcatgagcttaaaccctgaattgtttctacaaaaatgggaaccattttattaaaacaagaaaatcatgtcatctttttcttgaattttggaggcagtagccaggactcatattgattagtctttttctgaagaatcgccactttgaggaggaggaggaagagagaggaagctaccacttactggccattacttgaagagcagatgagtgatta

SEQ ID NO: 152902 - DNA, 507 bp, Homo sapiens
ccacaaagcaggggctgggcctgcaggctccccgcggtccagctcccgaggcaggtctccaaagtgcccccgtcccccgcataactagaaaatgtctccggcaagtaacagagctagagctaaggccaacttaagcttggtggggtgaaggcaaggcgctgatgtttctaatacgttgaaaaggagaaagggaacatcacagagaggacagcacagaagttaaacatcttagattcagtgggggcgggattccgaggcccaagcccacgcctttatattacatttggaagctgaatttgtttaccttatgtaaataagagtaactgttgggattggaagctttttcctctctttgggactttgatgtccttccgaggtctccaaattagggtttgaaattattcaaaccagtaatttccctcccctcctcctttcattaactgaagtgagtgggggtttgggatttctggattttttcaagtgctacatggcaccctttctctcatc

SEQ ID NO: 152903 - DNA, 246 bp, Homo sapiens
acatctttatttcactttcttgaataatagatcatcagagtagaaactctaaatcgaggtatttcctattagcactttgaagatattcctctattgccttccaacataattatttcattatcttctagtgtctttcatcaccacgaagaaaatgtctggtgtcattccttagtttcggagtctgctgataaattcagcaaccagtaacatttattaaggttaccgtggtgagcactatacatgcca

SEQ ID NO: 152904 - DNA, 166 bp, Homo sapiens
gtagccttgttccaatccaagcaccactgatgctcatcccttcccatcattacagtttcttaaattataagctttacaagtcaaacacaagaaaaattgaaaaatccataaagtgaccatctaacaccaaaactatttatgtatttggtatttatattttttcatt

SEQ ID NO: 152905 - DNA, 400 bp, Homo sapiens
cctggacttcatctctcctcaccattttcattcctgggaatgagatgatatggtctttgactagagttagataggtagatagatagatcttacatttaaataatatctatctactaattcagtcagcttttattgaaggctttctattactaggcaccataatggaattaataaaggtagaacacctaccatattctatactgattgctttcataaattaactcctttgatccttacaactttatagttactactgttatattcattcaacggaggagcaaaccaaagcacagagagattaagaaaaattttcaagattagagagcctgtaaatggcacagagtttgaacccaggtagtcagctccagaacccatgagcttaactactatatgatatact

SEQ ID NO: 152906 - DNA, 569 bp, Homo sapiens
ctagagacagagtcttaccctatcatccagctggagtgcagtggcgtgatcaccgctcactgcagcctcaaattcctgagctcaagccatcctccctaaagtccttctttaaaataagcagcttctccgcttagctggagctgcaaggaaagaaacttaaaaacaaacaaaataagctgtttctttgttgagccttaaagactcatcacatagggtttacttggttgctttctacattctagagaaattactgaataaataatttcctaccgggggttgaaaattagaggtgcgaaaagaagataaatagtgtttgagtatgaaaacaaggagaaaaaagtgtagggtaaaatcgattccactgtatccttggattaaaaaaaatacaacacaaaaaccaaacttatatgtacttttctatttacttcttttcatcaatattcacagaataaatgtgtatcattcactttaagctgctgataaaaatggatgtatgctatgatcacatcctcattgtgtccatcaaacttctttccctaagtttttctaataaagaacattttgattcc

SEQ ID NO: 152907 - DNA, 602 bp, Homo sapiens
aatgctttggcgtgtgtgggatgacaaggtgggttattgatgaagctcatgtgcgtgtggtaagtcagacttgcagtctggtgtatgattcctagattggaggatgctcgcccctctgcagcccggtccttgagatcctcagcaatgcccagctgctgctcatggtattgtttagctctctccaaatcctgcatgcacctggcagcatggcctagtccagcataggcccgcatctcaatagccttctccatcaactcctgtgccagctccaggacatagttatggtaagacatggccttgtcaaagttcctccggtagtgataggcactgcccaggttgctataagcccgggcctcttctcgcttgttccccaggtccttggctatcttcagatgctgctcatggcactgcacagcattctcaaagtcacccatggcaatatacacagctcccatgttgccaagttctcgggcttcagaaagttcatctttggattgcttggcaagaagaacacactgtttgtgactggccagtgcattggggtagtctccaatggctgtgtacacgtggcccagactgctcaaggctgatgaagctgcctg

SEQ ID NO: 152908 - DNA, 320 bp, Homo sapiens
ggcacagtctgaggcagaattaacctggtggagtgaatgggatgtggggaagaggattagaggaattggtggtggttactggatttctaccccaggtgacagggtacatggatatccatgggccaggaaagggagacttgagggaacagtttggggagaaagcagcaggttccgttttagctgtgcacagtgcctttgggacagccaaatagagagatctgcagattcaagaggtctgagttggagcttgtgattggagcattatcaccgagtgatggtggaagtagagttgaagattgttcaggagagagtgcagaatg

SEQ ID NO: 152909 - DNA, 406 bp, Homo sapiens
gcatgtggtcagactggggtgcacaaatgagaggccaggatgttggaggagtcatccaaagaatttctatgtgccaaatcaaatgactcatgggcagggtgagcgtgggatataccaagtaagccatggtggccgggtgggcttatactccaccaggggagtataagtggagtgaaatgttccgaacaggccaagtggcctgggttatagcaagcgggccataaggcggcatgggtgggtgttgtaaagtctcccccagaggagttgcatatcgtcaggagctctgaccctggttcagatcatctgggtctgagtcctggtgcttccgtcttgagcacacctgtctcagatctgagtatcaatcacaagccctcctccccatgcgaccttggccaagtgacttcac

SEQ ID NO: 152910 - DNA, 389 bp, Homo sapiens
atagtgagatcccatctctacaaaaaattttaaaaattagctgagtgtggtggcacacacctgttgttccagctactcaggaggctgagatggaaggatcacctaaacacaagaaggttgaggctgcagtgagctatgatcacgccactgcactctagcctgggcgacacagtgagatgccatctcaacaaatatccccacaacggaacttttcagagatattctatcaaaactgcctcttaattctctatgatcagagctggccattctgaatgagtttcaagttttaccaaaggggttttgtatgtgtgtattaacaaataggccggacacagtggctcatgcctgtaatcccagcactttgggaggccgaggtgggaggactgctt

SEQ ID NO: 152911 - DNA, 300 bp, Homo sapiens
ccttttggtcaggaagggggcctctgaaagacgaggggaagtcggcattttctcaagagaacaacctcccctgtggaggtccaggcatctcaccagagaacacatctcatactcaggatgattagctcttggtttcgtctgaatggtggcataatatggatgtgttgcttagaaaagaatctgatttcagcacatgtttgatgggtgtagaaccaagggctgtggtcccctttgccgatcactttacattgtggggatatttggaaaaggcaactcatacttaggggcaagggcagtcac

SEQ ID NO: 152912 - DNA, 1000 bp, Homo sapiens
tattcccccaaccccttccacatctttccaaccaaaacaaaaaccggtctgttatcgccttttattaattttaccataaaccacaagatggaaaagacaactaatacagacacagttaagttccagaagacttctggacttcaaatgatggactaaaaccagcataaatttacataaaaagaaacgaaatacctacatattttcataactcaatgagcctaatgcatgatagaagggacttgtttttatggcaattaatatgaggaagagcagggagttttttgctgagaacaagatcagtgtgagtcagtgggatggccttgttacttaaagaaaacataggctgcattatttaaaacattctcaatttaagggaaaaatttttcacaactctccacactcagcaggcctcacctaaaaaacactgtccatctctataccagattttactagggacactgaagagttggacggggcatttggataaatgtaaccaaagtgaaaccatcatctccttcttcatgcaacatcctcttctccttggtttctgggacaccactgtcttcataaccctcatattcctgaatgactcctcttagtctcctttggctgctggttggcttacaaaatccatccttcacttcttcaatagaagtcaagatttagctgggcagtgatgatgagcattttttcatgtgtctgttggctgcataaatgtcttcttttgagaagtgtctgttcatgtccttcgcccacttgttgatggggttgttcgttttgtgcttgtaaatttgtttgagttctttgtagattctggatattagccttttgtcagatgagtagattgcaaaaattttctcctattctgtaggtttcctgttcactagttcagcatggctggcgaggtctcaggaaacttacaatcatggaggaaggggaagcgaacacgtccttcttcatatggcggcagcaagaagcagttctgtagcggtggtaatta

SEQ ID NO: 152913 - DNA, 301 bp, Homo sapiens
ctttggctgctggttggcttacaaaatccatccttcacttcttcaatagaagtcaagatttagctgggcagtgatgatgagcattttttcatgtgtctgttggctgcataaatgtcttcttttgagaagtgtctgttcatgtccttcgcccacttgttgatggggttgttcgttttgtgcttgtaaatttgtttgagttctttgtagattctggatattagccttttgtcagatgagtagattgcaaaaattttctcctattctgtaggtttcctgttcactctgatggtaaaatgaaaaa

SEQ ID NO: 152914 - DNA, 690 bp, Homo sapiens
aatcgcagatgccagttaagaggccgcaaacagacaagtccagagatccaaggaaaggccagaagattaagagtgtggaagtttttaggaaaagggaatggagggagtccattagagaaaaggataagataaaatacaggccaggcccaagtcctaaacaacacccagtattttgtcatggagtatagaaagggagcagccagtgaagcagaacgaaatcaggctctggaggccttgtgcaagccatgagcaaagaggcggtcagccctgcaggtgatgcgggcaggtaagaaaaggacagaagggaccggaccgctggatgcaacaacttggagctcactggtgagctcagtgatccacgtcagtggagacagagcctgacgggttaaaagtaaatggaaggtgaggatgagagacatcacatatgcagacaattctcttagtgactaattccatataatcagcaattactaagaaattctaggccttgtggctgcatggctgtgactccctgtggtttggtctgattacagctcctctgaaaggtttcctggccagctgtgaagccactcacagcctcattgagactgggctctcgcccgatgactcctgcagctcctcaattggactctaatcacagagtaccgctgctggcctttttattttagggagaatataacctccttactg

SEQ ID NO: 152915 - DNA, 305 bp, Homo sapiens
agcctggcctttgttttggcccagcagccgctgaggccttctcagcactgtacctccacgctccatgtctggttgggcacccctaacaaaacaccatggactggtggcttaaatgacagaaatctaatttctcacaggtctggaggctggaagtccaagaccaaggtgtcagcaggtttggtttcttgcgaagcctctttccttggctcgcaaatggttatcttcttgctgtgtccccacatgattgtccctgagtctgtgtgtctgtcctcttcagataaggacaccagtcctattggattagg

SEQ ID NO: 152916 - DNA, 435 bp, Homo sapiens
ttctgtcctcagttggttgaatccacagacatggaacttgctgatatagagggccaaatgtacatttactttttatttggacacaaatgccaagtcacctgtcacttctaaaccacttctctgttcatttaattattcttcccaagtacctgttagatatagacaaatttaacagcattgtggaatctactacaaataatgtccatatagtcaggtacagtggcttacatctgtaatccagctactcaagagatggaggtggaactacaggcgcatgccaccatgtctggcttgtgtttattttttttgagatggagtctcactctgtcgcccagcctggagtgcaatggtgtgatctcggctcactgcaacctccgccttccgggttcaagtgactctcctgcctcagcctccccagtagctgaggaccatcgt

SEQ ID NO: 152917 - DNA, 359 bp, Homo sapiens
ctctctcacactggctctctccacactctctctccacactggctttctccacactctctctcctcactcctctctccacactggctctctccacactggacctacttcagaatggcctggcttttccaaaggtgatataccactagaaaatgagggtcttgataaaatctagcaaggactatgtcctgtgtaagttatccctcatcttcttttataattgcatgtagccttatgatgttaatgataccttatatacataaccattctgtattctgtacatgacaaaaaggtaaaggtcaacaggccttccaagaagtaaactgagtgggagtgagaataaagagagagctgatgagaag

SEQ ID NO: 152918 - DNA, 447 bp, Homo sapiens
ccctgaccaggctgatgcacgggagtctttgaacccaggaggttaaggctgcggtgagctgtgtttacaccactgcactccagcctgggcaacagagctagactctgtctcaaaaaacaacagaaacaaaatgtattgagtgaatatgcatgtgtgaattacagaagtaatagattttaatgctaactataaaagtctcatcagtgtagctctccatttcctctctgcctactagcagatggaaaaaaaatgatatttaatctgcatttctgattatgagtaagtttgaacataattttaatgtgtttattgcccatttctcttttttttctttttttttttctttttttttccaagcagggtctcgcactgtcgcccgggctggagtgcaatggtgcaatctcagctcactgcaacctctgcctcctgggttcacatggttctcct

SEQ ID NO: 152919 - DNA, 587 bp, Homo sapiens
taagatttatttgtaaatagcaagtttcttctacataaatacttatcagattcttgaaaactattaacattaaggatgtagcttggtaaaccctttctccaggacagcatctggttaatttgtgtatgaatatgcagaagttcaaaatggcattctaccacaaaggagtctgactttaaagacttgtaaaatgtgtagccttgaatctttaccctggtattcaacttgggggatttgtagggaaatattaccattatctgttgagctagacaagcaaatattcactttctagcatactcaggctacaaaataatctaatttcttcctattaccatttatttatagaatacttatacagctcataaagcatttttcccacatatttttgctcatcagaacctcaccaaggtgttcttttgagccttgcttaggataccctatcctacttcaacatatcccaggtcctttctcctcttgttaagccaacaacaggactatcaaatatttttggaagtaaataatagcagaacattaatgaccaatattggctatgtgcccagtactgttttaagcacttaacatgtttt

SEQ ID NO: 152920 - DNA, 404 bp, Homo sapiens
gatcgcctgaacccagtcaaggctggagtgaaccctgatcacaccactgcattcccagcctgcgtggcagagtgagaccctgtctcaaaaataataataataagaatactaacaatgtattccttgagtgtagtattcattgggatttttatgtcatgtgaaaaatgactctatgactctcctgtgatacaaatatttgactttcacataataaagtcatttcttcttgaggttttttttttttaaatcaaggagaaagtgagttttgtactaataggtctttaacatctctctgtcacttgctcatacctctttttatcaagaagagataggactgacctcagtctgctgggagagtatcttagaatttgatctcgtggatttcattataccctggtaccctt

SEQ ID NO: 152921 - DNA, 535 bp, Homo sapiens
tcaccgtgttagccaagatggtctcgatctcttgacctcgtgatccgcctgcctcggcctcccaaagtgctgggattacaggtgtgagtcaccgcgcctggccatatttgggaagtatttttacagataatcgaagatcagcttaataaagaaatacagcaaaaaaatgtaataaggaggggttacacactgaagaaagaattttacttgagtagacaaaggcgccattaaacacttgagttgcctttggctcttggtggtcacaaaaggctttatcaaaacagcaaattttagttaattaagagagagagctcactgaatgggccaggtccaagaaaacggtatgtagattcttgtcagcagagatctgccattgcagttgtatttggtaaaattccatcccaagttatttttctgatagtggaattatattatgcttacactgctggaactctatttaccctgttggagcattcctaaggaaggaagctgagtgtggggctctgaaattatttagaattgacctgagaatgaa

SEQ ID NO: 152922 - DNA, 515 bp, Homo sapiens
acctgcctctggatggcagaggtgtgtcctgcagcctcctcctgcatacaccacccatgcccacacttgcgactgggcatccactctcagcaagctgctcagctggcccagtcttggcctgagagtggccggtggagaagcctgtctgccttctcctggaaggaccctgtgggtgggaggagtggcccaggagcaggggagggggtctgttctcagtcactggtttccttgcctggctctcggaatgtgcacggcatctggtttggctgtgcgtccccctgggaggctgtgctgggtcaagttcttccagtcttggcccaaggcctaagcataagcatggagtggaccccttcactccacacaagaatttccgtttgagcctcagaaaggattccctggtgtccaagactgacttcaaaccctggttgtgtgatttggggcaacctattaactctctgagcctaggttctttatctgtaaaatggaaagagtattagtaacaccgactacccagg

SEQ ID NO: 152923 - DNA, 317 bp, Homo sapiens
tgttggcattttggtattttggaaagggatggggggaatgcgggtgtcctggtggcagagggtccccactgggagccccccagggccccttccttggcattgaggaggctcttgctggggagagctgcctgccaccttcctccccatgattttcccttcaattactgctccctgcccgtcttggcacagcttgtcataaactcatttatactaatgtgtgagtggctaagtgtgccttcgaacttggccggcagaggggtgaatctgatggagggaattctggggggcctcctcagctccccaatatccccctttct

SEQ ID NO: 152924 - DNA, 293 bp, Homo sapiens
taaggaaatatatatttaatcattctcttgaacgatcagaactccaaagctagttttctataacaaaatgtaacacagacacggtggctccaagggccaggaaggcagtggttaagacacgaaaagtgtgggaagggggctggaaacaaagcattcttttccatcaaagcttcattcctcaaggcctcaattcaaacagtcattgtccctgctttcaaaagtctctgtgtgcttcatggaaggtatatgtttgttgccgtaatttgaactgtggccaggcagggtctggagat

SEQ ID NO: 152925 - DNA, 800 bp, Homo sapiens
agctatgctgaactcttcgagaagaaacacattcctgagagaacaaatggggcattccacctgtattccacggaggaagacttatttcaagacataagcagagccacttgtagaaggatactgctcttatctttttgtgtttttcatgacctttcttttcaggcaatgtgttgcagtttggtcccataatatgcaactaggtttgtctgggctgacttatctgggttaaaatattcaaagtaattctccatttgctatccttcccaaaacactttgttaaaagttatcagtacataggtaaaatagcttaacacagtgaaaattctaattcagaataattatctgaaaggcttaagtgaattaaaatctgatttataaaattctttttgatatctacgaatgtatttttaagttctctcaaaatatgagctgattctcagacattttcaaggagagttccttttggacctgttttaacaaacaggtaaaaatcatttttaattagttcatcattcatatgcaaataaatgctgctacagaatttcaagagtgcctgaaaggacttcctaaggaaagctaatagttccctcgtgatttttttctatttatagtttatttatcaaacactttcatagaaaaagtacaaagatcgtgatcttacctatgctagaattatctcagcttcttaaatactgtttatttaatgagattttactggaatcctcatcgttagttttatcacacaggaatggtaattgtgtcatgtgtataaaccttctggaaaacattccagacctcag

SEQ ID NO: 152926 - DNA, 367 bp, Homo sapiens
acagacactgtctctgcatgttggaatttagtctgtaaagtctgaatggtgatgatctggaccagcatagtgtggaaggtactggtctgtgttctggatgatttaggttaccatgccatctccagataaatggagtattgctgtttagggccctgacttatacacttggtcatttccacctctggtctacagttgcctaccccgcaatccatatgcaattctgcatatggctttattttctaggaggtggagggaggaaaagaggtgaggatttgcgtgaagacaagctagtgttggtccaggttttttctgctttctcaattatcctataatctttgaaaacacattggtttttttttctctcttg

SEQ ID NO: 152927 - DNA, 452 bp, Homo sapiens
ccagagtagcatattttgggatggcatattctgatctacaacaccaaagaaaaactgctcctatctattttttgcataaaggcagtcactgacttttgttatccataaataaaattcacagataaattaatcttacttattttctaaccctggtatgctacagtttacatgcttaccccacctcatattttcatctcgttaactaatacataagctgctttctccacacaatttgtcatcattccaaaaccatttttttttttcaaatttattccatgtgcatgaccgtgtccctttgcctaacatatccatcttttctcctgtgaaatttcaagttttattcttccattgttccatttgtgacctaatctgtgaagcctttcttatcttttccaagtaaaggatcactctcttcttacttcttcagttgcccctttgagctctataatata

SEQ ID NO: 152928 - DNA, 209 bp, Homo sapiens
cataagtacataaaaaagaaggagacaaagaacattcgatacccaacctcaacagctttttccaagaaaccttccctaaaaaataaaaaaagaaaacctcgaggccgatacatgagaaatgttggcttttaaaaattgtttcccaggcagagataattcctttatttgcatctctcacattctccttctctttccccgcaacttcatta

SEQ ID NO: 152929 - DNA, 280 bp, Homo sapiens
gtatttataactgccttcttctacccattccagatccctttgccctcagcagacacctgagctgcttctttacccgatggggtgacccaaacctttattattgcagagtctgggtgtattagtctgttctcatgctgctaataaagacatacccaagacttggtaatttgtaaaggaaagaggtttagttggctcatggttccacatggctgaggaggcctcacaatcatggcggaaggcaaaagaggagcaaagtcacatcttacatggtggcaggcaa

SEQ ID NO: 152930 - DNA, 408 bp, Homo sapiens
ataatgtcgttcaatctgtttcttctaaaattacatgaagtcaagccttagttacacttggccatccttcttgagctaaggataaacttacctttccacactggtaggctgagctggagggagtggagaaacctgtattaccaatgtgctggctgtggtgaaataatagcttttaagtagtctttttctaggccattgcattgtacaaaactttttttttttggctgttttttttttttttttttactttacctacattgtgaccacagtagcattaacatttgctgtgttttacaagaaacaagatttcacaaattttatttaaactgctttatccataaaagcctttgatatataaaaacttcatttgggtctcaccaattaaaaatgcaattatttctaaaaaat

SEQ ID NO: 152931 - DNA, 1066 bp, Homo sapiens
gagatgtaattgactcacagtttcacgtgactggggaggcctcacaatcctagtggaagatggaggagcaaaggcacatgttacatggcagctggcaagagagcatgggtaggggaactgccctttaaaaaaaccatcagaccttgtgagacttattcactatcatgagaacagcacgggcgaaacccacccccatgattcagttacctcccactgggtccctcccatgacatgtggggattatgggagctgcaattcaaaatgagatttgggtggggacacagccaaaccatatcaagtgctaaatagcaatttgataaaggaagtctacaaaaaaacataaaatcttacttaaaggtgaaacactgaatgctttctacccaagataggaaaaaacaaggatatttgcttttacaaattacttgaagtctagccagtgcagtcatggaagacagagtgtggattattagcttaccacctcataccccatccccgtattctttatcatagcatttttttccctaatagttacgtattcagtaatttacctctgtattgccactctttctcaataagctccaggagaggggcatctagcataatatctgtcatataattagaattataataaatacttagtgtattactgaatgcatttaattttgggaaactttctcttccctagattttcatttttcttttggagagatgttcactaatttatccccagggaaggaaaagtgaatgatctcattggtgagtttaggagaaggagctgggctagtttagctgagacggttccttttcttttagttgtagagagcacacgttatattctcctcttctatgtgatacgttttatagggaaagcccacactgcgggaggtgctgcttatgattgagtaggtaaatctgtttgattcaacagtgaaatagtattagcaagtttacctgccctgaaacctggtatgttttctacaattcagctttgctaataatatggctgatatttttatctttagccccctggcttacgtgactgaactcaagaaggaaaaggggcagg

SEQ ID NO: 152932 - DNA, 757 bp, Homo sapiens
gcttagatcttttgattatacaactgttgcttttcactgaactccaaagggtctccctggcacttgggctattcggtaatcagacaagaatttgaggaagcttttacatgccaatttaatcactctcccctctgtggctcccactgtatgggatttgtttcttcaattttctgccattctggcagctacctactctatctcaagcaactttctgtttatcttctaactgcccctgtgctgcacggactggggaggaacatgcagcatagggcagttaggagatcaacagaatcagggggaaagctgtttaaatatggacctcactctgtgcagttcccttctttcaagagtgaaatcctctccggtttttgtctgcccttgataccttcaaatagttttttcaatgtatttaatatggtttctttcatttctacccgtaagaaggttagtttggtacacgccactctgctattgttgaactgaaattgcccctttccttgtttagataagtggtggcagatcataaatacttcatcttgcttttcgtatctaaccatagattctgatgctagtccttagcaaaatatcaagatactcctcattcctttttacttttacgtagtactccattttttagagatatatactataatttattaaatcagtcttctattgatagctattccaatgatgaggcacttgaatttatggcagtgggttatacagtagtcacaaaataagccctttgccttcaagg

SEQ ID NO: 152933 - DNA, 602 bp, Homo sapiens
ggcgcacatagcgacttggtgggcgcgtccagtgatgactgggggatcccggcaagtaacatgactaaaaagaagcgggagaatctgggcgtcgctctagagatcgatgggctagaggagaagctgtcccagtgtcggagagacctggaggccgtgaactccagactccacagccgggagctgagcccagaggccaggaggtccctggagaaggagaaaaacagcctaatgaacaaagcctccaactacgagaaggaactgaagtttcttcggcaagagaaccggaagaacatgctgctctctgtggccatctttatcctcctgacgctcgtctatgcctactggaccatgtgagcctggcacttccccacaaccagcacaggcttccacttggccccttggtcaggatcaagcaggcacttcaagcctcaataggaccaaggtgctggggtgttcccctcccaacctagtgttcaagcatggcttcctggcggcccaggccttgcctccctggcctgctggggggttccgggtctccagaaggacatggtgctggtccctcccttagcccaagggagaggcaataaagaacacaaagctgt

SEQ ID NO: 152934 - DNA, 887 bp, Homo sapiens
ggacacaaactgcatcttagcgtccctagattctgctcaaccaggcacccggcagagggcagggactcaggaaacacgtggccccacctagcacctcctccactgtcaggcccaaggaggccccaggtgccctcagtttctggttggcggatgagatgccttgaaggatgagcaccacagccaaccccatgacaggcaagcagactcacctggcggtcacaccacctcctagcttggctttcaggtgtggcatttttggtgactcctcacccacctcaccctcaacctcaaccacatttaaagagccatagttgagcagcactgggcgttgggactttatcaggctggctctatagccaaaagggtgtcaggatttgggcagattaagaagggcagagtcatttttatgggtaaggaggtggctggaagggtgcgtctttgccctcagcagtgtgtacccactcgttggagaggcagagcagaacagacgggcctaaactgcctgtcctatccctatcaccctctttcctcccagagaaggaactgaagtttcttcggcaagagaaccggaagaacatgctgctctctgtggccatctttatcctcctgacgctcgtctatgcctactggaccatgtgagcctggcacttccccacaaccagcacaggcttccacttggccccttggtcaggatcaagcaggcacttcaagcctcaataggaccaaggtgctggggtgttcccctcccaacctagtgttcaagcatggcttcctggcggcccaggccttgcctccctggcctgctggggggttccgggtctccagaaggacatggtgctggtccctcccttagcccaagggagaggcaataaagaacacaaagctgt

SEQ ID NO: 152935 - DNA, 664 bp, Homo sapiens
ggcgcacatagcgacttggtgggcgcgtccagtgatgactgggggatcccggcaagtaacatgactaaaaagaagcgggagaatctgggcgtcgctctagagatcgatgggctagaggagaagctgtcccagtgtcggagagacctggaggccgtgaactccagactccacagccgggagctgagcccagaggccaggaggtccctggagaaggagaaaaacagcctaatgaacaaagcctccaactacgagaaggaactgaagtttcttcggcaagagaaccggaagaacatgctgctctctgtggccatctttatcctcctgacgctcgtctatgcctactggaccatgtgagcctggcacttccccacaaccagcacaggcttccacttggccccttggtcaggatcaagcaggcacttcaagcctcaataggaccaaggtgctggggtgttcccctcccaacctagtgttcaagcatggcttcctggcggcccaggccttgcctccctggcctgctggggggttccgggtctccagaaggacatggtgctggtccctcccttagcccaagggagaggcaataaagaacacaaagctgtaaaaaaataatattatttaataaaatgccggccgcaatttgagcttacttggccaattcccg

SEQ ID NO: 152936 - DNA, 603 bp, Homo sapiens
ggcgcacatagcgacttggtgggcgcgtccagtgatgactgggggatcccggcaagtaacatgactaaaaagaagcgggagaatctgggcgtcgctctagagatcgatgggctagaggagaagctgtcccagtgtcggagagacctggaggccgtgaactccagactccacagccgggagctgagcccagaggccaggaggtccctggagaaggagaaaaacagcctaatgaacaaagcctccaactacgagaaggaactgaagtttcttcggcaagagaaccggaagaacatgctgctctctgtggccatctttatcctcctgacgctcgtctatgcctactggaccatgtcccccccgccgtccccgctccacgctggagcccacccccatgggcattgtgagcagcaagcaggtgggctgtccttccaggtgtcatgtgaaaattcgatctcccctttaaccggattgatagagcaccggcttataggctcataatctattcattttacccaacgtgaattgatacgggttttcacaagaccataaatggtaatcttccgctaagaccagagagtggccatcagtaaccaacacgcgcag

SEQ ID NO: 152937 - DNA, 696 bp, Homo sapiens
ggcgcacatagcgacttggtgggcgcgtccagtgatgactgggggatcccggcaagtaacatgactaaaaagaagcgggagaatctgggcgtcgctctagagatcgatgggctagaggagaagctgtcccagtgtcggagagacctggaggccgtgaactccagactccacagccgggagctgagcccagaggccaggaggtccctggagaaggagaaaaacagcctaatgaacaaagcctccaactacgagaaggaactgaagtttcttcggcaagagaaccggaagaacatgctgctctctgtggccatctttatcctcctgacgctcgtctatgcctactggaccatgtgagcctggcacttccccacaaccagcacaggcttccacttggccccttggtcaggatcaagcaggcacttcaagcctcaataggaccaaggtgctggggtgttcccctcccaacctagtgttcaagcatggcttcctggcggcccaggccttgcctccctggcctgctggggggttccgggtctccagaaggacatggtgctggtccctcccttagcccaagggagaggcaataaagaacacaaagctgtaaacacagccgcccccaccacaccccacaccccacaaccacgccacaacacacacaaaacacccctaaccacacaacaaggaaccacaccacca

SEQ ID NO: 152938 - DNA, 549 bp, Homo sapiens
ggcgcacatagcgacttggtgggcgcgtccagtgatgactgggggatcccggcaagtaacatgactaaaaagaagcgggagaatctgggcgtcgctctagagatcgatgggctagaggagaagctgtcccagtgtcggagagacctggaggccgtgaactccagactccacagccgggagctgagcccagaggccagagaaggaactgaagtttcttcggcaagagaaccggaagaacatgctgctctctgtggccatctttatcctcctgacgctcgtctatgcctactggaccatgtgagcctggcacttccccacaaccagcacaggcttccacttggccccttggtcaggatcaagcaggcacttcaagcctcaataggaccaaggtgctggggtgttcccctcccaacctagtgttcaagcatggcttcctggcggcccaggccttgcctccctggcctgctggggggttccgggtctccagaaggacatggtgctggtccctcccttagcccaagggagaggcaataaagaacacaaagctgt

SEQ ID NO: 152939 - DNA, 699 bp, Homo sapiens
gtctgtgtggagtgagttcaaaactactgctgtgcaaagttttccctctgcagtgtttatcagttgcctactttgtaaagagcaagggtttcaggcattctaaacccgctttgttaactggtagattattaagcagttacaggatataagctagtttttgggtgttcgggagattgttcagcatttaagaatacaatgattcccccatcccctactcccttttagttacttaaaatcaaaccatcttatcataaaatgcagattttatgcagatttttccagcagttttacttacgcttataaaaacagatgttgggttgtctgtcaaaggaattatatcctgtagacctggaatctgtgtttgaggggaatttgattttagattgtagattgctttgttgcctacctatgaaaacatcatttatttttgtgtagggttttgtgagctttttttttaaatggtgacagaaaatgaaaatagcctaattgtgttttttatcatcaaaggatgaaattggcttatctgaatttggctggaaaatttgatttggtatcagcaaatgatgaactgaaaatcaatgagctttaatctgctctggataatattaacaggggtttatcctaaataggactcttctaacctgtgaatcttagaacctttccactttttggtgtcaaagttttaaagcatagtagctt

SEQ ID NO: 152940 - DNA, 378 bp, Homo sapiens
aaaacattaatgactaagtatatcccatgcactgaatatgctgttttgggcccaaggttggttagtgttgccctctctctttcacctcctccccctgaccccccactgtatctgggtatatagtcatgcagttcaacctgattttaaatatgtaaatacttaaatatttatctactgaagatctgaagactcaaaggaacttttaaaaagtttttttcgtgacagtttaacatgagaattatagaatcactatagtgaaatgttagcatttaatatgaatatatatctgtatcacataatgagctcagagttgatctcacttggtaggcagagtaagagatgattaaaagcattttatttcagctatgtacctacaca

SEQ ID NO: 152941 - DNA, 274 bp, Homo sapiens
tcatgatagattcatagggaaatgatacagttgaccattgttctggcaggttccatgtgctgagtcctcgggtatatatctcacaggaagtgattctagcttgggtgggtcatctgcgttctctgttggccgagtaatcactggccgcgctgtgggcaccagagagagagagagtatgggcggttatcagtctgtctcgctgtctttagcctgcagaacctgtgtatcacccggttttgtcactgtctgcagggatgcgcgtcttctttggaca

SEQ ID NO: 152942 - DNA, 648 bp, Homo sapiens
tcaagtgcaaagttgatgcctgctccatgccaggccatgtggtcaagagaaataaaacctactccttgccttcaacaagtcttcagagcgtggaaagatgaacaaggtggcaactatgagtgtggataccactatgttcagcgtgtgtaacaggacagttattacaaacaactacaaaagcaaagccaaatggcactttgagaacaacaaataaactctgcttccatttgaaagcaaaccaagaatcatctggttctctcttcaggaattctccaagaggctggatataaggtctcactctatgagtcagacaaggggaggctcccactcataaccacatggtcgtccccaggctgaccaaccagggaacttcagcagcccaagcactgggaagcccactgggaatccactttctctgggctttgaccccaaagacccaccagagaggctcccagacaaaggactgtcccagaggctcctgaccgggccaacaccatccaaaccctcatttggaaaggcaaacacctctaccagagacacgcataatctgatgaagaatgggctccagagatgatcaggaggggccccctctaaacagcattcttttctttttttttgaaacagaatctcactctgtcgcccaggctg

SEQ ID NO: 152943 - DNA, 441 bp, Homo sapiens
tctgcttctctctctatcctcattctctcctaagcagatactcctggcttctataatccctgcttatcagcccctgtggaaaaagatggcgcctttagcaacatctctatatcaaggacgttgattgatttgattgatcaagcttggatcctatgaccattcctggtctaatcctcatggacaaagaaataggatactgggatcagtaaagcctgaatcatgtgctcacccttgtatcccagggtgggagtggggctatacagagtactgtgaggggaagtcatattttaaaaaaccacacaaagtataaagtggcagatactgtagtctggttcactcaatattccctctgtaatctttcaaccacctgctaccttctgctacaaaggctggaaagtttaaaacaccactttccagacaggcttgcagtgagggtgcagg

SEQ ID NO: 152944 - DNA, 502 bp, Homo sapiens
cccagttgtcaactacttctaataacttatcactgacatcaattgtcagtatcatccctgatgaaaatgcctatttaaatgatactggatatgaattatattttaacctcctaacagtccatcttgagtcactagcactctgttgaatcataatttctgctacaaattttgtgtatgaataagaattattgagcatttgaagagagttattgaatagcttgactctggagaaagaagtctcttacccaggcctaaaattccattttgaatgctcaatttttatttccatttatgagaatttaaaactggcactagctttctatttcccgcctgtaacattcctctgattcataatcttcctccacctttatttttttaattttttgagacagagtctcgctctgtctcccaggttggagtgcagtggtgcaatctcagctcactgcaacctctgtctcctgggttcaaacgattctcctgcctcagcctccctaatagctgg

SEQ ID NO: 152945 - DNA, 434 bp, Homo sapiens
ttgcgaacaggacaagcaaggaggctgcggccaagctggagcccccgcccaccaggatcgcggcactctctgaggacaaagtacttccgaggaagtcttcctcccctctggtcttccctgcctcctggctggggacaaggcttgcaaccctgctgtagggctgcaaggcagggctgccagggtgaggctcagaggcttgctcaaggctacacagctgacagaaattgacaaggtgatcctaacattcatatgggaagggaagggacccagaatatccaacaccaccttgaaaaagaagaagttggactcacacttcccaatttcaaaacttactacaaaggcaaggtcaacgagactgggtggtactggcataaggacagacatatagatcagtggaacaaaaatgagagttcagaaataaaccctccaactta

SEQ ID NO: 152946 - DNA, 222 bp, Homo sapiens
tggtgggacaactggatattcacatgcacaggatgaaattggactcttaccttgcagcatctaaaaaaattaacctgaaatggataaatgacctaaatacaagagataaagttataaaaatcttggaagaaaatatagaaacaaatttttatgaccttggattaggaaatgcttttttttttttttttttcctggacagggtcttgctctgtcacgcaggct

SEQ ID NO: 152947 - DNA, 462 bp, Homo sapiens
gtgcaaatttttatgctttgaatagtacacaacattactgaataaaattcaatacatgatctctatcaaaatccctttcttggggagtttgtaaaaattgccttttttttttttttttttgtagaaattgacaaggtgatcctaacattcatatgggaagggaagggacccagaatatccaacaccaccttgaaaaagaagaagttggactcacacttcccaatttcaaaacttactacaaaggcaaggtcaacgagactgggtggtactggcataaggacagacatatagatcagtggaacaaaaatgagagttcagaaataaaccctccaacttatggccagttgatttttgacaagggtgccaagacaattcagtggggaagaaatgaacaaatgtgtggtgggacaactggatattcacatgcacaggatgaaattggactcttaccttgcagcatct

SEQ ID NO: 152948 - DNA, 153 bp, Homo sapiens
ctctacccacacaaaaaaaatgaacaaaggatatacattggaaattcataggaaaatataaatgacctgagtcttaactttaattaactgttagcaaatgctggccgggtatggtggctcacgcctgtaaccccagcacattgggaggccaag

SEQ ID NO: 152949 - DNA, 714 bp, Homo sapiens
tcagatttacaaaatattctttggttgctctttgtggagacattcattttaagtctttgtatattctagatatacatactgtacaagtgtcttccttattgtgaatttgcagttttcccaaaattgaaaattaacctccccattctgtgactgtatttccttgtgaactcattttattctttattaaatctattaagccattcttaggaatgcttacaagctggaatttatttgaggaaagacactggctaatctttgctgttcctaccatatgaaaatgaacttaaatcaaaggatgcactatatctgcaatgcatgataaatacaagatggatagagaatctgttcagtggtgtcagctacaaaagcaaacatgataaatgttaatgcagttttgagccctgggataagctattcagtgcacaagtgtagctgaatctctttgctatgttgttattcattgcagccaaataaatgtcaataataaaagagaattaaagattttcatttcccagaggcagtcctctaatacggcttgatctttcatttcatttgtaattcgttctcatgtcaggatgcaatcattcgccaggctctgggtgtcatgttaagccatttaataatgattaagaacataaaaatgcttggcctgtggggcaattcacaaaagagatgccaatttgttattgttttccctcctttcctcttgaatat

SEQ ID NO: 152950 - DNA, 835 bp, Homo sapiens
gcctcgggccatgcagctggctgagtgagagctcctaacttgtactttctcccctccccggaagctttggtttgttgggggaagcagattcatatcagacccaaggcaactcagctgtgattgagatagacattgagtcttttgggagacagaagggagggagagtgccagtcaaaagggtttcgtgaagaaggttgcatctgactgggacagttaggcctctgtgtaccactttaaaaggtgttgacttttctagtaaatatcctccatgtcaaagtctatctcaagatctgttccaggacaaccccgcctgcaacagggcccatttatgttccagccagcacggtgatcctgagtctgggagggtgcccacagactgcttttgtgagcagcatgccttcagtggccagtccccaagcccctcaactccatgtggagcaaggaccaaccaccccatggagaagaggaacccgcctgcaaggcgagccaagaagggacctttggaaccagccacactggactctgtagggggctggatggctggccccaaaaggataggtccatgtcctaagccccagaacccgtaaatattgccttatttggaaagaaattctttgtagatgtcattagggattttgagatgaagagatcatcctgtattatgcaagtgggccctcaatccaatggcaagtgtccttacaagagtaaggcagggctgggtgtggtgtctcacacctgtcatcccagcactttgggaggccaaggcaggagaatagcttgaggccaggagttcaagactggcctgggcaacgtagtgagaccctccatctctaca

SEQ ID NO: 152951 - DNA, 356 bp, Homo sapiens
gaatgtcctgaggctcaatattccagccatttgttcctgtctgttgtctctcaaaccagatcctctgccacttctgaaggtccctgcaaaagaggcttctgcctctaaccctaagcagccagcccaagcctgccatgtggagagaaggggacagggaggcaggagttgcaatctgtgccccgtgtgccccctgtgccatcaccctgtacaattgtggcccaggcaaagctcctctctgtacctcggtccccttgtctcaggaacaggatctctttctttctttctttctttttctttctttccctttcctttcctttcctttcctttcctttcctttcctttcctttcctttcctt

SEQ ID NO: 152952 - DNA, 147 bp, Homo sapiens
aattcaccaagtcctattacaaataatatcagactgatccaaaataaacttccatgtgggttccccttctcctatacccattaaatgtaggtgcttcatggaggctctccttagcctccttttcttttcataaaaaatgtctctcat

SEQ ID NO: 152953 - DNA, 314 bp, Homo sapiens
  misc_feature (176)..(176): n is a, c, g, or t
aataaaaacaattttacaccaattaaattattaaggaataggccaggcacagtggctcatgcctgtaatcccaaaggaaaacaaaactgggaggccatggtgagagaagcgcttgagtccaggagttcaagaccagcctgggaccccgtctctccaaaaaaaaaaaaaaaaaaaantcccgggtttggtttttcccagtggggaattttgggcaagccaattaaccctttgggccccaagtttttcaacttgaaaaagggggtttatataaacacttaatgggcttcaaaaaaggttttttggcgcccccaaat

SEQ ID NO: 152954 - DNA, 789 bp, Homo sapiens
ccaggcagtggctccttggagagtgggcctgcaaactctacaccggttttgtgttcctcaccttctccaccagtaactgcctcctggtcctcatctctgtggaccgttgcatctctgtcctctaccccgtctgggccctgaaccaccgcactgagcagagggcgagctggctggccttcggggtgtggctcctggccgccgccttgtgctctgcgcacctgaaattccggacaaccagaaaatggaatggctgtatgcagtgctacttacagttcaacttggagaatgagactgcccagatgtggactcaggaggtctttgggagacaaatggcggtgatcatggcccacttcctgctgggcttcctggggcccttagcaatcataggcacctgcgcccacctcatccgggccaagctcttgcgggagggctgggtccatgccaaccggcccaagaggctgctgctggtgctggtgagcgctttatctgctggttcccatttaacgtgatgctgttggtccatctgtggcgacgggtgatgctcaaggaattctaccacccccagatgctgctcatcctccaggctagctttgccttgggctgtgtcaacaactgcctcaacccgttcctctacgtcttcgttggcagagatttccaagaaaagtttttccagtctttgacttctgccctggcgagggcgtttggagaggaggagtttctgtcatcccgtccccgtggcaacgccccccgggaatgatggaagacttcagctggaagctggaagccgtc

SEQ ID NO: 152955 - DNA, 385 bp, Homo sapiens
gttattgaactcagtctttatgcattcaatgacccatgaatgaatgaacaaatgaatgcatgaatatgcaggcagaatacaagtcagggagcctccacttttacagtcagttgctgggtgactttggacaagttacttcccttctctgagcttgtttccctgcctataataagagttgattttcatagcttctaacttctcatctggctgaaaatccttctcagtctgagaaaggtagaaggcaaagacctggccagaaaggaacttgaaacatagaatttcttcacagaccctgtcttgaatgctccccttcctgtcctccccagttcaatcagcttctccaaaattgttggctggtaaggccttgccaccagttagcttctca

SEQ ID NO: 152956 - DNA, 431 bp, Homo sapiens
  misc_feature (35)..(35): n is a, c, g, or t
ctgctctgaaaacattagagcacagtaactactantgacgctaacactgggtgtgaaaccaatagaggcaaaccagataaaagcttgggggttagtgggtatagtgtaggcaaagtagtggtgtaggttttgtgaaaagaagaagaaaaggaaaaatacttggaggaggcacgtcctattcctattctatctcaacatgatctggtttttattttttattattagatttgtttcaaatcatataaatggctgctagtggaaaacagatcagatctagaacagttatgaagagtctagttaggactggttaggaaaagagatggagtgctgacagtactgagagagagaaatggatgaactacaggtcagacagcttctgagaggaactgatgaggcttgaagagagatttgcatttcaagaagtaatgata

SEQ ID NO: 152957 - DNA, 172 bp, Homo sapiens
gggtctaatcgaagctgtagccaccggcctacgccagagcgacagcagctctgtccatcatgaggccaaaaaatccaatgtagaatgttagacagcaagactgtggagaaaattaaagcagttaaggggaatagagtgttagctgcgtgtagagttctcactgttttgtaca

SEQ ID NO: 152958 - DNA, 501 bp, Homo sapiens
gtggccataagaaatgcaaatcaaaaccacaatgagataacatctcacaccagttagaatggcaatcattaaaaagtcaggtgctgcagggaaaccaatactgaaaaagcatagtgtgattgatgctggcagaaacacggctgtagaaaacctggacctactgggttccgaggtgagaagatgttatttttttagagttaatagattggttttactagcaactttgctggatgtcagagaaaagtaattctacggtataaacttcatatacattttgcttaatataatactccctttaaatacagttttagaggctattacagaatttcagaatagggaagtacaatctggtccaacttcatttttgacataggaaagtaaaaaccaaaaggtaaaggtttttgaatcaagacaaatgtttactaaacatgtacttactatagattatatgctatgaactatggcatatataggtactggggatactgagacaggaaagga

SEQ ID NO: 152959 - DNA, 162 bp, Homo sapiens
catgaaacaaaacacttctgcatggggctccctttcataagatctgatttagaggtctggctacaagcaacagaatcctcaggaaggctatgaacagagaaggctacctttcagaacctgaagcttttctctcccggctggatattctgcatttaccccctc

SEQ ID NO: 152960 - DNA, 160 bp, Homo sapiens
ggtcagaaaacgtgtcagggttcattcctgggccattttctaaacgttggcagtgagtctgcctgcagttacatgaaggccagtccagaccaaacggggctgcaaccgtctctgtctccagggctacgtctggaagggattttgctggaagggattttcc

SEQ ID NO: 152961 - DNA, 288 bp, Homo sapiens
ataactgcaaacaaaattctaagtagagaaagtgttattattagtagtataatcctgagctataaaataaaatgctccagtaatatctatattatccattataaacacaattagtataatgtaatccatctttctaagccatctgtgggggtttggttacttcttcttacataatctcattgaagaggatctcatggcatggaattagaggagaaaccactatgtagtgatgagatttatctgcacaatgcaagatttctagctaagcttcatgtaaaaggtatgtct

SEQ ID NO: 152962 - DNA, 274 bp, Homo sapiens
cgccttggcctcccaaagtgctgggattacaggcatgagccactgcgcccggcctgtctgtgttcttttgagaagcggcacagctctgaggcatcaggccaagctcagccctcggtaacatgcctcagttcccctcccagatggaggcatcgttgtgagagtctgattgggaggggaatatgaaaatgttttcggaagataaaagtactacacagatgtgaggtggttttgccttggaagaaagtgctccttagatgtgtctggatgttatgca

SEQ ID NO: 152963 - DNA, 247 bp, Homo sapiens
cccctgctcctcaaattgaaaaggcagcagcaacttgggaactaagcgcttggatgcactcggtacttgttaattggtgctcatgctctaaggagctgagtcttggggttaggcttgaaatcctaagcagatgagaaaccctgccctctttaaccactgctctgctctcctcttgggtgcctaacctcgcctgtgggagggcagccctgttctttgtctttctccacctccttccagcaagatcgtc

SEQ ID NO: 152964 - DNA, 545 bp, Homo sapiens
ggtatttgtcatttaggaggaaatccaccagactagtgctgcaccgtatctttcagtcccctctccccatcctcactggggatgtcttagtttcaaaataggtctccccaagaggtccatttattgagtttgaatggcaagtgctttggaaacaccctgccttatcagcactctataaaatgttctcggttatagcatccttttgataatatagttaattaacaactgatgttacagagattttaattgtgagatcaaaattaagcaaagagcaatggaatagaaagagcacatttgtagggcttaccatctctgcacatgaaaccaaggctcaaaattaggattcaaagagaagtgtaactgttatttcagaaggtggattcatacagcaatgagtatcagtttcatcagcatgggtcatgaatacacattcctagagtcccagatttctatctagtgatacatactctatccttaaattaaaaaaaacaaaaatagatcaaaattttaaaacctggggtgagagaagaaagagacttaagaga

SEQ ID NO: 152965 - DNA, 538 bp, Homo sapiens
  misc_feature (35)..(35): n is a, c, g, or t
tacgaactcgagctcgtgacccattcgcgaatcanctaattcactaattcacctaattcacctgtattaggacttcacctaattcacttcactgtattagcacttcacctcctccttcacctcactgtattaggaccctagactgctgctggcaatacgcgcggccacagccgctgggagacacctgtggctccactcccctcctccagggcatctgtcaccaatctctgcagaccagcaccctctcacgggcgcaggaccagcctggcacaaacctttggctgccatcagggctgaacacgcactccccagaaagaggccaggagcacagagggaggccgtctccatccctctctgtcctctgtgttcctgagataggtgtgagtcacaccctgcaggctccccttccttgagaactcacgaacagggggatcccagccacgggtcacgctgtgggttttaacccggaaagaacaagacaccacacacctgcctcacttccccaggatgcgtcctaggtctcctagtgaactcccag

SEQ ID NO: 152966 - DNA, 333 bp, Homo sapiens
tgggacagtggcagaggaggaggggggctggctaagagccagattgggccagggaaggagctgagactaaaacccctgaggtcttgttaagtgggtcttacgctcaggccagggacgatcacataatcagttccagtcggagctggaaccaaacccagcgtcctgagggtgcactccctgtggggtccccagtacccagcatggccaggagagggagtgtgaagaagccatgcggaaggtcggcgctgcagaggcgcttacatccaaacgtggcaaagtccacatgtggatggtgtcatcacttagagggggacaacagacctctccaacagg

SEQ ID NO: 152967 - DNA, 250 bp, Homo sapiens
gttttagatggagcagaggaagaaaaagtgaaggaggaagagaaagaaggaagaggaaaatcaggatgacataacaggaagaagttgcaaaaatgttataaagattgtatagttgaaattactgtttattcaaaaatgtgccttctgatttgtttgaatataatgaaactttcgaaaaaatgtattgaaattgatatcacatttagatacagttattaaaataaattgtaaaaaatacttttaaacaaat

SEQ ID NO: 152968 - DNA, 379 bp, Homo sapiens
attagcgcaggcaattagcacccacctacctgctacctttcccccttctcctgggccagaagaggtgaaaaccacccgtgggagcctggctggccctgtgccaccccaccctgagaagtgaggctggcacaaacagactcaggctggctcaaggcccagcagccagctcagctcccctgcttaccccagcagcctctgctcttcccaaatttctcacccaatccctttttcccaggcccatgggagctggcatccccaaagagctgaaagtgggggctgcctcctgctgggctgccccctcctccatacagcacttttgtgggaagtggaggatggcatccctctgggcaaacccctcctcccatcgtgtgctcacttg

SEQ ID NO: 152969 - DNA, 525 bp, Homo sapiens
tgaacctcattaggtttaaggtaaaagaaaattaggatgagttgacttacagtaaaggagggacaaataagcccccgagacaaatgtaaaaacacaaagaataagaggtaatagaaagaaaagaaaaccaagaatgaagcaaacccgacacgagtaggttaagatgaaaggtttagttgaggagcttagtgcagtaaactcccagggattatcaactaaattattattggattccatagtttctagaatacatgtaatccaaggtcagagtcaggaatctgtactgatttcaggtgggaggaacacctgtcttcccaggaacttcaagattgacaggaagcctcagcccttgtctgggtggccacttgagtagagtggaaataagcagtgctgtgtttaagaccgtgaacacaaagacagtggtgtagctccacctctgggaaatagagaagccttccagctgaaaaaagagagcattatcaggcaggacctataaggcagcaatactgggtccctgacctgtta

SEQ ID NO: 152970 - DNA, 502 bp, Homo sapiens
  misc_feature (466)..(467): n is a, c, g, or t
agaccttaataatgtaagtatgcacttctagggcaatagctaaaagaatagaaacagagttttaaccttcaaaacagtaaagagaatgaatagaaaactttaattgaaaagagcaaaaattaagaaaccaatggcagggcagatggaagacagagcaggatgggtgcaccgtttgtctgtcagtaacaacacaaagcggactgagtgctccagcaccaatcagattatgtatgtgttactcagaagagatgcctgaaaacgcgaacagtgtgtgtgtgagtgtggtaacatattatatgtactataatatacacataagctctttacagaagaaggctgatgtgctgatacctgacgaaagagattctaaagcaaaggcatcattagagataatggtgtagaacaccacaccgagcaacggcagcacatattttctttcaaagtacaaatatatcattataaaacnngccaggtcgtctcgcgggggatcctctaaggtcac

SEQ ID NO: 152971 - DNA, 338 bp, Homo sapiens
agtgacctagagattcacataactcattttccacattgcatcttaaagcataactccatccctgggacattcagaatttcctcttcccaagcctcggaactagagccaaatcccagatcccacacccttcttcatcccaacacagccatgacctgtgaccttgctgttcagaggccatgtcagtgtttgcaggctcattccaccaaatcactcaagggtaggggaaggaaagggctaacagcactcagggccagaataagaaaagccttgagatcccaaatcagggtgaagcaacttgttcccagagcagtgatgactccagggactcctagacatag

SEQ ID NO: 152972 - DNA, 595 bp, Homo sapiens
tatttacgtgggatttccaaagcttctgttgcaatatttggaataacatgtcagataaatgcatgggcttttgtcctgtgttccagttcccactagagatgcctgtgtcttgtgtagcacacccagtgttatggtgactgccccctatactgaagactgaaaattatttcacagttcactcatcaaatagttcccaaaattcgtcacatgctgcttattgggacaaataggtagtacattttccccatttaaaaaatgcggattttactcaggccggtaactttacagtcagaggacacgttcatcatgagtagcttttgttagtatgttttaaaatgtatcttcagttcaattattttcagcatttacaagacatctgaaaatggctattttgctaccaacagtaaatgaaggggctgtttaaaaaccacaaccagttttctacactattttttaaataatactttcatttgaaaaaaaggaattagttttcagatacacttcagagattgaagcaaactatttgccttttactcaaaagcctgcttgcctttacatggacttaccagcaaaataggtagaactttctctttta

SEQ ID NO: 152973 - DNA, 313 bp, Homo sapiens
acctcatatggacttgtgagatacaacaggagatacaaaatgataaggacagtctctggtacactgtgagcttacatggtagctattattatactactgctactgaaataaacttttttttttttggctttaaagagacagagtctctttccattgccaagactgtaattcaatggcgggatcatagcttactgcaaactcgaactcctggcctcaactaatcctctcgtctaagcctccgaaggggttgggactacagccacacaccaccacatttgccttttggctgtgggaatgaggtttcactatgtgg

SEQ ID NO: 152974 - DNA, 282 bp, Homo sapiens
tctctctcacgtgcacactctctctctctttcttgctctcttgcccatctaccttctgctgtgggatgacacaacaagaaggcagtctctagatgcaggtcccttgaacttttacttcctggactcaagaactgtaagaagtaaatctctgttctttataaattacccagtctcaggtattctgttttagcagcagaaaacagactaagactaatctaatcatattttctctgtcactacttctagttcagatgttttagtttgattaccagaggaaagaca

SEQ ID NO: 152975 - DNA, 649 bp, Homo sapiens
ctaggtaaaaaccagggtaaagagacttaatggctgaatgagtacaagctggagtgcttgagatgaataaacctgtggtcctgtaacatattcagcaagtaaacatattgttctcttttaattccattagtgagtaagcgaaaggagcttcttgattcccaattttacctttctcttgtcaccccgagtcttgtcatcaagacacaaaagagaacgtattttcttctttttctattatccattaggtcttcttcgaaataattggaaactttttcttaatagctaatacgtatttctgagtccttcttatatgccagattctatgttacacacctttaattctcagaataccctatcaagtaggttctatgattttccctgagaggaaagcaaagctatgagaggtgacacaaggtccccaaggtcacacagctaattagatggaaccggaatctgaacctcttggttcatcagatttcaaggcatgtactcttaatcactatcctaaattctccatatagagagccatcaaaagtcacagttatttttctgatgctcacccgaaccctgaggcataatgatgatgaggccaccctgccctgtctctgcttcctaaactgtactcttccccacctccacctcttaatga

SEQ ID NO: 152976 - DNA, 553 bp, Homo sapiens
  misc_feature (352)..(352): n is a, c, g, or t
ttttgccttgtcttaaattgatctctagcagtgcctttttccccacacccacgtattatttcaggggtcagtgacatttgatgacgtggctgcatatttcacaaggaggaaatggatgcatctagctcttcaccaaaaggcggctggagaactgtgggaacttgacctggctgggtaggctctgccctctcccctgcccctctccaggctctctgagtacttcacttgttgagaatgagggcaattccacatcctttctagacctagaaactagaccctttctccacgtgacagacctgagctccacagggaggaaagaggggcctattattttttaatttaatattaattnatatttttagaaacagggtctcacactgttgtccacagctggagtgcagtggtgtgatcatagctcaccgtagccttgaactcctgggctcaagcagtagtcccacctcagcctcccgagtagcgtacaccatcaccccagctaaattttaaatttattcctagagatgaagtcttgctatgttggttaggactggtcccg

SEQ ID NO: 152977 - DNA, 1159 bp, Homo sapiens
cttcatcataatgatgctacctgaagcagtcccggatcctgaattaaaccttcctggagctgtttgcaggatacctggcatgtgcttctagatcccatgttcatggagctacatacaagaaatttaagagtgaagggttaggaaaaagctttgattccctcaacatctgggtgggttttattatttgttcaacaacaaagagacatgcacctgatagcccttctcttttcacctcacctagcaggaaagtcggagctaaattttcttcagtaaccaccaccttagcacccatacatcatctgccccctaattcctctccatcttgagtcccatctcttacttgtttttcatggtcctggcttttcagttaatttgacagttcaccacgtgtgtttctgttgtgatctgcctcaaaccttctaggtactgaggtcagggtaagagtagtttaaaaacaagacaacacatggacagtgaagggtgtggcattgggagtaccctttctgggtcttctctcccttcctgcgggggtagcatggtagtcttctccactgccccagtttattcactggggatgcggtccagtcggaaatggggctctggctcaggggcagggaaagggacctggggagaaagaggtttcccaaccaggcctgtcacagtaagcagccagggacagggagcctcctgtctctctcaggctgggacgagggctgccattctagtcatgagaatttcctctcccagaggccctactcctcaccaccctccagggcaaggattattattaactcagctcctggagagggaactgcagaatatgtgatgttagaaacaaaggacaggtcccctggggcgggggtgcagcgttggccttgagccctgagaatggtagccccaattcttcccaggtcctccttcttggggcttgcctacagtaagggtcccacagcactgccaacaactgcaccaatatcacctctctggctctgggttcctacctctattaatacagccaaaagctgcactcagtgttggctcatagggaattaagggtcaaaaacccccaggtcatttccaggtcaatagttgtcagagagctggcaggcatcactaagccccttccctccttctccccaaccccgccactcacctccag

SEQ ID NO: 152978 - DNA, 725 bp, Homo sapiens
ggcaagtttcttttattaataggtggtcaggtggcttgggagtggggcttgggttcagtgggacgaggctactttagacacagcacaagctggtgtcagtgagataactggagaaactcagtctccttatgggcaaaatggaaaaacacgggctgaacagccacagctagacagtgggttagtagctgttgtcaacactgctggtgaaggtgctttgtacgctccctgcatgttctgatcccaaccgacatcatcagtagtcacctaggttaaaacacagaaaacgctgataaaatctgtaaagaagctggtgacaaaaaggaccagaaaaattctcaggagactggaacaataggctgaaactaacaagttgaggtgtatttgggacaattgtgaattcctacactttggttaaaaaaaatcacctttagaagtactagttaaggccggcctgttttgaaaacaatttccatggtaggtgtacaaggtgcaaagttttatgtttaatacatggttcagcaatggccagtgtaggatatagttcaaacaaaagaataatgcgacccactacattcacagaagtagaaaatcctgagctgtactcaagtgtggtggagtccattagaaacaggaatatatcagccaggcaaggtggctcacgcctgtaatcccagcacagtcggaggcggaggtgggcaaatcacctgaggtcaggagttagagac

SEQ ID NO: 152979 - DNA, 141 bp, Homo sapiens
acagcgttgtgggttaggaatctggacagtgagggcagggttaatcttcagttctgtgccaccagctgggatcacttgagggtgcttggctggcatacgggttagtctggggaccactgccccctttccggcatcctctgt

SEQ ID NO: 152980 - DNA, 485 bp, Homo sapiens
gaaatctgatgttacttgttcacactaagacatgcacagttgagtcctcctgtttatgctgggtaaacgatgcttcctaagaagaaatggaggaaaagaaactaacatttactgtgcacttactaggcactaagttctgaattaacttagttagttaatgagttgtctcattcattctcaatagccacataagaggacctattaagaaatccagggccaggtgtggtagctcgcacctgtaatcccagcactttgggaggccaaggcaggcagatcacctgaggtcgggagttcgagaccagcctgaccaacatggagaaaccccatctctactaaaaatacaaaattagccaggcatggtggcgcacgcctgagtcccagctactcgggaggctgaggcagaattgcttgaacctggaggaggtggaggttgcagtgagccaagatcacgccactgcactccagcctgggcaacaagagcgaaa

SEQ ID NO: 152981 - DNA, 311 bp, Homo sapiens
tgatgatcacatttcttctaagaaatacctattataataaattcaagaagttctggggccctgattcctagttgcttttatttcaacggtttgtaaagtgcttttacacacaccctcttatttaaccttcaaagcattctattgaagcacacagagaagtcttatgcccatttctaaatgaggaaatcaagacatgataagcgtatgtgtttctaaacactgagctgatttgtaatctctcagctccaacccacccttctatccactgcttgtggtgctggggctgggcacctgaaagatattcttccttg

SEQ ID NO: 152982 - DNA, 909 bp, Homo sapiens
tttgatctaagggtttccaaagaagcatgatgcctttgagatgaagaggcatgtcgtcataggttacccccgacagggcccctgttgctgcctgccacaccttctcaccttttcaagaagcttcattctttcctacgggaccttgaacgtcacttcaccggtattcttcaaaaacagaaaatacaggctactaaagaggaggcacactgggcatgccaaattgtggacatccttatcatatcccaacctctgtgtgcatctatcagtgatacttgttacagagacattttaacatcctttcaaaaggcaatcttctgatgcttgcttttcctgaaagaactcaggcccaaattctttagggggattgtcaatcaagagaagcgaggataagatgaaaaataaaggcaaggcgaggctctgtggctcacatctgtaatcccagcactttgggaggctgaggagagagaatcacttgagtccaggagttcaagaccacctgggcaacacagcaagacccccgtctctacgaaaaaataaaacatttagctgggcatagtggcacacacctgtggtctcagctactctggaggctgaggtgggaagatcacctaagcccagaaggtcgaaacagctgtgagccatgattgtaccactgcactccagcctgggcgacagagcgaaaccctgtctcacacacaaaaaaggtaaattgtaagaacaaaatatggtacacattttcattgagagacacatttagaacttggtttttaatttaagaacttttgtaaatacatttaaattgttctattctgtaaactgtcttcagtcataaggtagttagatattcgtttcattgtatctttccaagaagacataccttatgattagaggcgggacggggaagtggga

SEQ ID NO: 152983 - DNA, 433 bp, Homo sapiens
ttttttaaacataaaatgttgaattcatcaagtgctttttctttgcaggtagagatcatcttttccattaatctgttaataggatgtattacattaatagattatctcctgttgaaccatctttgcattcctgagttaaaccctatttagctgtggtgcattttttcacccacacggctgaatttgacttgctggtgtcttagagttctttaagatctacatttatcagtgaggtttacatgggtatattttgaattcaaagtttcgctgacttcatgaaatcagttgtaaagctttcttttttttcccccattatcagaaataattctgtaacgtagggattctttgttccttgaaggaactatagatttaatatgaaagtttctaaaacaaaacatggaaaaatatctgtatgaccctgttggaggcaaag

SEQ ID NO: 152984 - DNA, 283 bp, Homo sapiens
agtttctgattcaatagatctgagctggaggctcaagaatttgcatttctaacaagttcccagctgatgctggtccagggaccacattttgagaaccactgcattggcctccttttagtagagggaaagctgggcacaagtcatccttgacaaaagtgaatggcaataattaggtatcatttgtttcaataccatataaactaatatgaaatgcttcctcataattcttcacaatcagccttacctatgagttcagaaactttaaaagctgttaaactgctta

SEQ ID NO: 152985 - DNA, 506 bp, Homo sapiens
atgaaacagttttctttgtattaaattaatatgtatgtatagcatctaacctaaatacattgtccataatttgcattatagttgaagaaacttagcagagaaaaggagaaaggagaaaaccagttagtatggtattttaccaagaacataattatgacttataattacctaatactctctctttgaccattaatcatatctatggatcttttttgttgttgtttttcccttgcccacacatcatggaggttggagtagaatccaaatgttaataaatgttaattatggatttttaaaaatcaaaccaaaacagcaaaaatcatgaaaaaagtaattcatggaagctgacaagctttcaccttaatcatctcaaggttaaataatgatcggaattcttttagttgaagcacttacgttacatcttgatgtttgactatcatataaatataactgtactattaggctctatttttcattgcagatgaaattgatgcatctttgtgtgg

SEQ ID NO: 152986 - DNA, 305 bp, Homo sapiens
gatttggttccctctgggtggggggcattatcggggaatcagatgcggccatcagacatccagcagctacttggggatgcctcaagacacctgggctcagcacagcttctggcactcagcacctctccctcctgctggtcctgttcctcttccaagggctctcagcccaaagaatgggtccaggaagaaacacagcagtgtgtctgcattcccccctcacctcaccctcctccgcccagtcccatccatcagcaagtcccgcctgctctacgtgggttcctacagccctcctcctctccattccc

SEQ ID NO: 152987 - DNA, 467 bp, Homo sapiens
tgtgagccactgcgcctggcctaaatggggtttctaaaaattgccaaaccaagtttggtattattagtgatgtgctttcctttcagctgtaactaaaagaagatatcgtttacttcttgaactttacagtgactttgcatttgtgttagtttaaaaaaaatactttctagaaaaaaatattaaagtttgtcctaataaagtttcttccaaagttgtgataatataattgacataaaacaagtttaaaatacattagagacacataatacttaacttacttcatttgaacggccaacattcagcagctacttactccagacggattagtctttaaacatcaatcgttagttctgggtttcaataaacgggcgaaataatctgctccctaattgccatagaaaacttctgagaattaatgaaactgtgtgtaagaggtggctatatattcttccacatgggtactgttt

SEQ ID NO: 152988 - DNA, 339 bp, Homo sapiens
gtatccatagatatcgtttcatccttttatgttaataagactcaaaattgccaatatcgagaatacctgtagttatgctacacctcaaagtcctggttctcaccaatcctctagtaaatctagtatgcacaaaaccaaaaccttcccatttccaatgagaatacatgaatatgcatattaagagcaaataatgctccccagagacaactactaataaagtacttgaagactgaaataatgtggttaagaatagtaataataactaccaatttagaaaaccggggccgggtgcggtggctcacgcctgtaataccagcaccttgggaggccaaggcagga

SEQ ID NO: 152989 - DNA, 274 bp, Homo sapiens
cgcaagccaccgtgcctggctaatttttaattttttgtaaagacgggtgtctcatcatgttgcctaggctagtctcgaactcctggactcaagtgatccttctgccttggcctcccaaaatgttgggattacaagtgtgaaccactacatgctggctaacatatttgtaaagaaattatttatattcgaatagctagtaaataaatgaacaaaattcaaaatgttcaaaaggatagataataaaaataagttttttatcatctcttctccccta

SEQ ID NO: 152990 - DNA, 521 bp, Homo sapiens
cggccaagagattagaggagcagggacaactggagatccaccacggagaggccctggccattctacggaagaggcgcaaggaagtcttctgagtccgctgcttcaccttttgacatcagagggccaaaagctccaccctcagatcaggctaacacctctggtttttgcacatagagagggggtgaagctggattgcgcatatgcctggttttgggtctgcagttggttcctgctggtgggttcgtggtctcgctgacttcaagaatgcacccatggactttcacggaccttcgcagtgagtgttacagctcttaaagatggcacagacccaaagagtcagtggcagcaaggtttattgtttattcgcgaaaggacaaagcttccacagcgtggaagtagacccgagtgggttgccgctgctggctgtgtggccagcttttattcccctattggccccgcccatgttccgtttctgtcctatcagagtgcctttttttcaatcctccctgcgattggctact

SEQ ID NO: 152991 - DNA, 305 bp, Homo sapiens
cctgtggacacattagtccctgaccttcttcaattgcatcttgaccttggtcgttttccctgtatcctttggattgtgcctgccagggccactggtgaacttcagcttcacaaattttcagcaaacatcgcttctgtttttgaataatgagtatctaccttcagaagctgggttacctggaaccttcttaatcttcttctttatgaggtgcccagtgtcctcacttgcaaccccaccctgcctgtagaggggagtcaggtgcatggatcctctggactttgggtgaatctatttttttttttcct

SEQ ID NO: 152992 - DNA, 466 bp, Homo sapiens
tggtcagagagaatataagaaagcctatgtgtggttctcaaagtgtgctgcttgcatgagttttcctgtctcttttctcactttatgaagctttaggaggattgtgtctcccatgtttctgtgtgcctttgccagaactaccctcttctcttctgtacataacataaatattttccgggggttgctggtcctttctgaatgtagaaatgtagagaaaaaggaagtcatgtggagcagtgctgtagcagccacaagaaggtatacatatgcaatatgggaactactgcccagcgttataagtgacataaacgttgtatttctgagtgaggtggtagaccggggaaagaataaagcatcttcctttctataatctttcacgtggttgatttttttcggtatactctgatatttgttttgttatctttgggtctaattttgttgctttcataattagtagaattattag

SEQ ID NO: 152993 - DNA, 825 bp, Homo sapiens
agactgaacctgtggcacccgccaccaaatctgccggcctattcacagtccctgccatttctctcgttaagatgaactctccgcctcaggaacgagatggcggttccctggaggctgagtgccgtttgcggtgcccaaggaggccgagctctgttgctgcgaactccagtggtcagacctgctcatatctcagcatttcttcaggaccgacctatcccagaatggtgtggagtgcagcacatacacttgtcaccgagccaccattctggctccaaggctgcatctctccactggactagcgagagggttgtcagtgttttgctcccgggtctgcttccggctgcttatttgaatccttgctctgcgacggactattccctggctgcagccctcactcttcatggtcactggggccttggacaagttgttactgattatgttcatggggatgcctcgcagaaagctgccaaggcagggcttttggcattttcagctttaacctttgctgggctttgctatttcaactatcacgatgtgggcatctgcaaagctgttgccatgctgtggaagctctgacctttttgacttcctactttgaagaattgatgtatgcctctttgcctctgctttggcatgccattaagctcacaataaggaagaaataacagattagcccatttggtggacagccttcttctcttaatcacaagattattttcagaatttaatccttgaggaaaaggttagaggaattatatctaagttgtgagactgagttctgtattctggtgagttaatggggttgcctcccagcttcttataaga

SEQ ID NO: 152994 - DNA, 322 bp, Homo sapiens
caggcaacttagtattgtcctcaagctacctcaagatgtaccaggaaaaaaataaaatggcatgcgggcactgcacatgcagcatctcaattcagcgacccgtgatcaaaagtactcaaagaaacaaattaatgtgaagaaaagaatatagaaggggcagcagggaatgggaaagagactgtaacaagtggtgctacacacctgtgatgtcagaaaaaaggttagttgagagaagtgaagacctgactgcttgacactggaattatttttttttaggtagggtcttgctctgtcatccaagtgggagtgcagtggtgcaatc

SEQ ID NO: 152995 - DNA, 532 bp, Homo sapiens
aattgccatgaacttgggagcctaaaatatcaaaaattattctcctacagttttggagggcaaaaatctaaaatcaaaatgtaagcaaggctgcacttcctttggaaattctgaggaagaatttgttctttgccctttctagcctttgatggcctttagcattctttgagttatagccacatcactcagtctctgtctctctgattgtattacatcctcctcatttctgagtcagctcctcttctgtatttcttgtaaagatacatgtgattgttttaagtaccaacctggataacccagggataagccccttctcttaggatttataacctaatcacttattttgccaaagagtaactctttgatcctttgagggatgtggacatgtcttttgggggctataattcacttctctgtattctatcctctgcctcccagaattcatgttcatgccatatgctaagtattacctcttttccctaccaacatccccaaaagtcacaacccattcattacagcatcaactctaagt

SEQ ID NO: 152996 - DNA, 555 bp, Homo sapiens
cactctcctcctaaagtcaataaaaacaatttattccaagtaatgtaatgatttatatactcatatgcaactttctgtttataatgagcatcattgttagaagcagggaatacaaggaagggacttttaaggacataaatgacttttatattctaaatttatttaataggtgtacacagatttatcttatagaaaaaacatcatctgtactctaaattccaaaacagtagaagaaaataaattctatacatatatttgatgtctagcctgtggaatttttatgtgcctcgaatttgcttataattatgaatctttaccacccatttccatttgttacttaagtatatatacaatcaaatatcacttaatgcagatatatgttctgagaaatgagtcatgaaacaatttcttcgttttgagagtaccatagagcatacttacataaacctaaatggtatagactactgcacacctaggctatgtggtataacttattgctccagggtacaaacctgcacagcatgatactaagctgaatactgtaggcaaatgtaa

SEQ ID NO: 152997 - DNA, 393 bp, Homo sapiens
cccggatgtcttgtcctgttcgaattgttacacagttcagctagagatttccttctccctgtggagttttacccgtcttccttctggccaccccctcaatggatccctatggtatcaggttaggaatggcctgcttggggacatagtgagctcccagggcctttctgctacttgcactacccctgtattttgctccactctctaaattgactcacttccagttaaggtcagaaacctctcctacaaacagaccttcagtttctccattctgggggtgtgttcaggagaggaggctctccctttcccactccgcaattggggcactcacagtatttggggtgtctcctgggtcctgcaggagcagtccgcttccttcagagagtctgtggctct

SEQ ID NO: 152998 - DNA, 372 bp, Homo sapiens
gtcagatggtgtgttgcccccagccccagactccacgtgtcaggagctgttagggaggccagcgtggtgacatcagcatccttcccctcagaaggatgtcctgggcctgcagaacccatctcccctctgtggcttcagccagatcctgcctcaaaacacagaaatctgggaagtttctgccaggggaggagggaagctgaaatgcaggagggtggggtggggaagggagataagaggcagaaaaacagggagagagacagaggtgaaacagagaaggcccagacagacatctggacagaccagaaatgggaagataagacagtgacagagactgccatcgccaagctcgaggccttctctgggcctcagttg

SEQ ID NO: 152999 - DNA, 370 bp, Homo sapiens
tataaatcactggtggaagtgtaaattggtaaaccactttggctttatcttgcgaagctgatcatctccatattctacaatcctgcaattcctctcctagttatacaccaaagagaaactcccaagcaaggataacaggagacatgtacaagaaggttcgtagcaacactttggctagcaaaacactggaaacaaccccaaggcttatcaacctaaaaatggattaatcagttggggtatattcatacaacataataatatgcagcagtaaaaatgaatgaactagagctatatgaaatggaattaaataaagttatgtgaaaaacggaaacccagccgggcgcggtggctcacacctgtaattccagca

SEQ ID NO: 153000 - DNA, 487 bp, Homo sapiens
tcctctcaagggtccagctggcaatataaataaatggaatgaatggggctcctcagatgagtacagcatcttccatgtatggggagcagacattactgagctgctgccatgtgggaatctcagtccagttgtgccaggtcttctgagttattccaagagaagcaagaattcgtctttgtgttatagtttccagtttctaaatattggtagcattttaaaaatatgtagtccaaagaagacagtcctgtgggctgactttggcctgcaggcaccagtttctcatctctgcttgtgaatgtcaagttctagagagaccattgctttagtcacctctgtcctctccctcctcttcccactcctgcctcaccaagaccaaattccaaaagaccagttctcctcaaaagttgtgtttcataaggaccttaaaattggctactagtctaacagtaatttatttcagttgaggactttttaaactccatgacta

SEQ ID NO: 153001 - DNA, 306 bp, Homo sapiens
  misc_feature (279)..(279): n is a, c, g, or t
ctcccctctcaaccactcactcactcaaccgaacatataggacctgctatgtgtaccaggtccctaaaacggaaacatgaaaaagcatagtcctcgcctgtaaccccaatattgtgggaggctgaggtgggcagatcacttgagtccgggaatttgagaccaccctggacaaaatggtgaaaccctggctatacaattaaccggttgtggtggcatgtgcctgtagacccagctaccctggaggctgaggtgggaggactgcctttgcctgagcctgtncggttgagcggagagggtaccgagcta

SEQ ID NO: 153002 - DNA, 457 bp, Homo sapiens
ctcccctctcaaccactcactcactcaaccgaacatataggacctgctatgtgtaccaggtccctaaaacggaaacatgaaaaagcatagtcctcgcctgtaaccccaatattgtgggaggctgaggtgggcagatcacttgagtccgggaatttgagaccaccctggacaaaatggtgaaaccctggctatacaattaaccggttgtggtggcatgtgcctgtagacccagctaccctggaggctgaggtgggaggactgcctttgcctgagcctgttcggttgatctccgctcaaccgaacaggggttggtgtaaaataggcgcttgtcagggaggtagcgatgagagtaatagatagggctcaggcgtttgtgtatgatatgtttgcggtttcgatgatgtggtctttggagtagaaacctgtgaggaaaggtattcctgctaatgctaggctg

SEQ ID NO: 153003 - DNA, 883 bp, Homo sapiens
gctgggcttgctctcatgctttcttgtccttctgccttctgccatgggatgacacagcaagaagccccttgccagatgtgggcctctcgaccttggacttcttagcttccagaactaggagccattgaagaatactgttgtcctatcccagaaggagcaagcggacaacactgatatcctgaccactaaccatccagcaccacttaaagttttaaaaagaataacagaaagaaagaagtggctgaaacctaaatgccatatggagaagacagctaattgccacactctcctctttggtctttcctggtacgcagcatacaagcccacagattgaggactctgcacttgctgttctctctgcctggagctctatggctccagatagactcctgccaactccttcgccttgtccaagttaccttcattaaatgtcagcttaaatgtgtgcctactttttgccctacctagaattgcaagcacctctcaccactgtgctcccattctccttaacttaagccacttttattctcataataaagccacatattttttcttattatatcataatcgtactgtataatttatattttattactttgttgtatacttattgtatgtttctgttcacaaggatgtaaccccatgaacacagagatcttgatggtttattcactgatttatgccaaatgtgggaacaatgctggcatagtagaagtttgataactttttctgaagataatactttggcaaatggtggccgtgtgggaaatacggcggggagtttggcgacagaagacttttccccctcaggaaacgtccttgggtacccaataatgtggcccaggaaaaacaaaggggagggacaggggaggaaggtcaaagg

SEQ ID NO: 153004 - DNA, 833 bp, Homo sapiens
  misc_feature (667)..(667): n is a, c, g, or t
  misc_feature (677)..(677): n is a, c, g, or t
gctgggcttgctctcatgctttcttgtccttctgccttctgccatgggatgacacagcaagaagccccttgccagatgtgggcctctcgaccttggacttcttagcttccagaactaggagccattgaagaatactgttgtcctatcccagaaggagcaagcggacaacactgatatcctgaccactaaccatccagcaccacttaaagccacactctcctctttggtctttcctggtacgcagcatacaagcccacagattgaggactctgcacttgctgttctctctgcctggagctctatggctccagatagactcctgccaactccttcgccttgtccaagttaccttcattaaatgtcagcttaaatgtgtgcctactttttgccctacctagaattgcaagcacctctcaccactgtgctcccattctccttaacttaagccacttttattctcataataaagccacatattttttcttattatatcataatcgtactgtataatttatattttattactttgttgtatacttattgtatgtttctgttcacaaggatgtaaccccatgaacacagagatcttgatggtttattcactgatttatgccaaatgtttggaacaatgcctggacatagtagatgttgataattttttttgaangaataaatanttttaggcaaaatgtgaccgcggcggaatcagggtgtgtactgtttgcacaaaaaacatcgtttaccattctagggaaatgtcctatggggtgaaccacaataattggagggcccaagggataacacaagggggtcaacatgctgtgaggcataga

SEQ ID NO: 153005 - DNA, 1005 bp, Homo sapiens
gctgggcttgctctcatgctttcttgtccttctgccttctgccatgggatgacacagcaagaagccccttgccagatgtgggcctctcgaccttggacttcttagcttccagaactaggagccattgaagaatactgttgtcctatcccagaaggagcaagcggacaacactgatatcctgaccactaaccatccagcaccacttaaagaggtcccaaaacccccggctgtctaccaatacccatctgtgacctcttaggaaccgagcttcacagcaggaggtgaatggtggacaagcgagcattatcgcctcagctccacctcctgtcagttttaaaaagaataacagaaagaaagaagtggctgaaacctaaatgccatatggagaagacagctaattgccacactctcctctttggtctttcctggtacgcagcatacaagcccacagattgaggactctgcacttgctgttctctctgcctggagctctatggctccagatagactcctgccaactccttcgccttgtccaagttaccttcattaaatgtcagcttaaatgtgtgcctactttttgccctacctagaattgcaagcacctctcaccactgtgctcccattctccttaacttaagccacttttattctcataataaagccacatattttttcttattatatcataatcgtactgtataatttatattttattactttgttgtatacttattgtatgtttctgttcacaaggatgtaaccccatgaacacagagatcttgatggtttattcactgatttatgccaaatgtgggaacaatgctggcatagtagaagtttgataactttttctgaagataatactttggcaaatggtggccgtgtgggaaatacggcggggagtttggcgacagaagacttttccccctcaggaaacgtccttgggtacccaataatgtggcccaggaaaaacaaaggggagggacaggggaggaaggtcaaagg

SEQ ID NO: 153006 - DNA, 784 bp, Homo sapiens
ctagaatccattttgggaactgagcagtgtggccaggaaatatagattaaatggatatttaaggaagcaaatctgttgcccctcagttgctacaaccattttatccagagtcccctagtgtgactgtcttttatgccctttttttcacatttaaataaattgtttttactctcttgtcttaaactgttttataaacttatcgtacagatgatactttcaatcctttggaaagttatcaccatgaaaattgtgagtaaaagtaggctgatatcggaggagtcataatacagaatgagtagtatttttatttaatacccattggaaccctggaaggtaataagtcaaagtctgaatatccgcctcaagtaagcacctcaaagtagggtgtttaccactatataacaggctgagcaaattaccaagacacacagctacttgacacctgtcgagtttgtcggtttttttgtttgttttttagctaataatctatacttctccccagccccccatagtgggggagaaaagggcaaaaagtatacattctaagctcttgggaaaagataccatactttctttctggaggaatccagtcctgtatagttctagttaatccatacttttctaggtgtcctgaaattaaaagtgatacaaatgaatctttcttgccagggaacaagttttatgtgctaataacatattcatttcaactaataacaatgtaatagtataaaatgttgatggatcaaataaaatttaatttgatgagcaactccataaaaaaaat

SEQ ID NO: 153007 - DNA, 403 bp, Homo sapiens
tcatctctgaatcaaggagtgtacaagatttaatccattgtagggaacagaactctggacccctcaacattaaactggtgatactcagggaaagaaacaagactgaaggttcatcatttactccttaggtattactatctcttgattaccaagaccacttacaagaataattttgactgttttgagtgtgcaactgtccagattattaagtagagaactgatcatgttaatttatttgatggtgccgttatctctgactctgattcacccacacagagctcctttctggtcctagaccatgctaaccacactctcacctcagggccctggcacttgctcttccacctgcctgtaacattcttaccccaggtatcttagggcttgatccctcacttcactcagg

SEQ ID NO: 153008 - DNA, 233 bp, Homo sapiens
ctagaactatgcaacatccagatattatttttctttaatttattttcttgagacagggtattgctctggcaccctggctggaatgcagtggtgtgatcatagcttactgcagccttaatctcctgagctcaaacaatctgccttcctcagcctcctgagtgcctaagactatgaggcatgcaccaccatgtccagctaacacccagattttcttttttttttttttgagacag

SEQ ID NO: 153009 - DNA, 270 bp, Homo sapiens
atggtggcaagtaactacaactaaatgcgtgaccaagacagagctaactcgagtcattaattagactgtgaagtctggagggaagttctctgaatttaagattacagttttgaagtttggcatctgctaccacttcaaggattaaggatttactgctcactggaattcaatatttaatattttaaaaaccattcagctccagcttgcaaatgagttaaattaaaataatacacagacgttctctctgaggccgtggtttttattggtagc

SEQ ID NO: 153010 - DNA, 410 bp, Homo sapiens
taaattacagcatgttatgttttctaaaagcaagagagataaacatcggcctggagatatgtagtggctccctattcttggctgcctgactatgttctatcccaggataccattatgcaccaactctggtaatcccatctcttctgccatgcatggcagaaagacatttacgggatggggctcctgggaaacaggccagtcaactctcctatcaagatgcagatgaggaaggcctggttgctgtcagcaactgcctgtggctatgatgacgctgatgctataaaaggcaatgtgaggggacagctgagttattgaagcaagcttttctgagttctgccctacacctgaatttagtggtttaagtagcgctgtctgtgctttacagcctatcacctctccactcatgttta

SEQ ID NO: 153011 - DNA, 467 bp, Homo sapiens
gcttatatccttctgatccattcactacactgttgccagagtgatcattccaaacacaaatcttattttatgttactcccagacataaagcaccagtagcttttcactacagaatcaagtgcaggcttttcagtatgaataagatttctacagtcaagcccctgcttatctttccagtcttgctccctgttgtgccaaacagaagccctctgtgctcctgttgctattccctggctgggccagctcactgtgtactgtttgaaatgccctccctatgtcggtctggtgatcacctgtttatctcttaaggtctcacttaatgaagcctctcctgacccttctcctgtggagtcaatcacaggctcttgcctttaggggaaatctatttgcaattaaacttgttgtagatttgctgttggcttttgaaaataagagtatatcagccgggcatggtggctcacagtgct

SEQ ID NO: 153012 - DNA, 370 bp, Homo sapiens
tagtgcaggcacaggttctgcaggctttcatctcgtggaacgtatgttagagggtgtcctcgtcactcgccatgccccagaggaatcagcagggacatcaggactgagagaagacatggcacatctgacctcctgtcctggaaaccccacatctttctgactgtgctgatcacacggacaatatctagaaaagttctgctctgcacagtgttctgtctaccaggcccacccatctgaggacccagatgctaggaacacacagatactgaaggagcaaccacctgcctaaggtgcaggtacccctgcatccatctgtaggaggaaaagcaagaaactaccatttatatggattctttggccctaagaatga

SEQ ID NO: 153013 - DNA, 312 bp, Homo sapiens
ggatggtcgccctcttcgacccgagcgcgcagggtcgggagggacgcacatggagcggtgcgggaggaaggtgacacccgcctagccagccccaaggcctgcacgccatcggtgtgtgtttaggaagaaatgaggaaacaatagggcgtctgatgggtggcagaagagaaccctcaaattgccactggaaatcacagggaaatggtttgagaagagcagctgaaatgggtaaggcctaacagggctggagcagctgtgctccagtgaccagtaactgccccttgagacgggccatcactcaagagagactac

SEQ ID NO: 153014 - DNA, 424 bp, Homo sapiens
tctttgaggaaatccaagccccgaggggtccgattgttctccagtgactggctgttgctttaggaaattccagtgcctcactacagtgctcttggagcctgttcctactcagacattttgtcacctggcagtagcctagaaactaattttagtattcatgtttgtagaccctgaaaggtctacctggtacctccccacctctcttcattcagcctgtttattcaggatgagacagtcacaactacatggggcttttctggggtttccaaggaacagaaaggctagacagaaaaactgtctttctggcctcagctcaagactacaaggcatcctgctgctgtttaatatttactgaaagctcacaaagttctaatatagatgagagcaaaattatggcatgagcttagcctcttagggcctgagt

SEQ ID NO: 153015 - DNA, 230 bp, Homo sapiens
actctttctcaaagaaaaaaaagactatatatagccccaagtttgttaaaaaataatacatgaaaaaatgcttagaaggaactacattaaaatatatagcagttgtaatctcttaattgagaaataatggtttttgtttccttttttaaatctatattttctgttttctaaaaatagccagccatactggcccatgcctataatcccaactacttgggaggctgaggtgg

SEQ ID NO: 153016 - DNA, 369 bp, Homo sapiens
aaggtgggccggatggagtcagatcttgcagctaaggggattgaggtgattgtcagagggatgcagggatccctggcaggtgcagtgcttctgttcttaacaccctgggccacctccattgagtccttcaccgcgttctagtattggcagccatctccttgggggctgtgagtgactgaggcctggcaccaagtctcttctgggtatccctagcacctaggtcggtgcctggcatatttctattcagaaaaaaggcaccatcattacatgactgttgatgttagaaaatttgattaacttttgctaaataaaagaacaagccattaaacattttcaagtaaggggtaagtaccaggtgttcacttgagg

SEQ ID NO: 153017 - DNA, 157 bp, Homo sapiens
atttgtttaaagtaactcaatatttactttatttctttcagcctgaaagagactgaaacatattccaaatgaggatatactaattgcctttcatctttttgttattgtcagacagtatattgggaaattttccatttttctttaatataattggtct

SEQ ID NO: 153018 - DNA, 282 bp, Homo sapiens
acacttgtccatgcagttggagcacctgcccctacctacctctcacgggtgtcagcgctggcattattttctgtttaaactgctgggctccacctgctgctctcaggcaccccagggctgccacatcgagggctttcacagcacaggccccaggggctgtcatacggggacagcagggacactgggtggctaagggaacacgggcacccaggtgtgccgctcatctgggccagggcgggccggactcagggttccagaactacagtcactgtcctgcccatc

SEQ ID NO: 153019 - DNA, 1068 bp, Homo sapiens
  misc_feature (23)..(23): n is a, c, g, or t
gtcgtagcgtgactgactctctncctgaacgaccgcaccagagataaagtctgactatgttgcccaggctgatatctcactcctgggctcaagctatctgcaaaccagagcctcccaaagtgctaggattacagggcatgaaaacaaaaagtaaaatgatggttggaaaaaaatgaagagtttgactataaaatacattattagaacatgaaaaacatctgtgaaatgtttagtagagtacattgttacttaaagattacttacatgtgtctcctgtctgaccaactgtaaataggtgtaaacttttcttctaaagagaagataatataaatctagtttatttgaagaatgatgtataatgaaacattattaaatttgagtggtacttaagatacaaatccaagttgagaaaaacactggtaagaatgctattgaataaactactgacaaaaagagtccctggaaaattcattatattcttgttcctatctttaagagaacagggcacttccttaagagcacaggaatcagttcttcagacaaatatattcagatactccttgtgttattctccactagttccttccagaaggttttacctgaaatctctagtcgacaatctttgctgaaaatataattaatctatctcccatatttctgaactctaaagatttttgttctgatccttttagtcatgccagaaattgtaaagttatttttccaccatcatgcaatgaacatggcatcagaaaattagttcctagtctcctgagcagtcactcttctgctttgcttcatcatttttctttgcatgtcagtttctgccaatagtaaattgagaaagaatattcacaaaattgcctttggctcacaggagttgtagcaaaattatgtcttcatagctacacaaaatatgtggaaaaacatccagcaaattcctgttaaagtagctgactttgaaaatttattttgtatctgaaattatctgagattcgtcaacttttgcgaaacatcaagcctcaaaggatgtatgtacgttacattgcacaaataaagagagatcggccg

SEQ ID NO: 153020 - DNA, 1107 bp, Homo sapiens
cgttatattcttcaatctatgttacgcaagagggaaagagaactagtctgcaacgactctcttatttaccaccgctacacagataaagtctgactatgttgcccaggctgatatctcactcctgggctcaagctatctgcaaaccagagcctcccaaagtgctaggattacagggcatgaaaacaaaaagtaaaatgatggttggaaaaaaatgaagagtttgactataaaatacattattagaacatgaaaaacatctgtgaaatgtttagtagagtacattgttacttaaagattacttacatgtgtctcctgtctgaccaactgtaaataggtgtaaacttttcttctaaagagaagataatataaatctagtttatttgaagaatgatgtataatgaaacattattaaatttgagtggtacttaagatacaaatccaagttgagaaaaacactggtaagaatgctattgaataaactactgacaaaaagagtccctggaaaattcattatattcttgttcctatctttaagagaacagggcacttccttaagagcacaggaatcagttcttcagacaaatatattcagatactccttgtgttattctccactagttccttccagaaggttttacctgaaatctctagtcgacaatctttgctgaaaatataattaatctatctcccatatttctgaactctaaagatttttgttctgatccttttagtcatgccagaaattgtaaagttatttttccaccatcatgcaatgaacatggcatcagaaaattagttcctagtctcctgagcagtcactcttctgctttgcttcatcatttttctttgcatgtcagtttctgccaatagtaaattgagaaagaatattcacaaaattgcctttggctcacaggagttgtagcaaaattatgtcttcatagctacacaaaatatgtggaaaaacatccagcaaattcctgttaaagtagctgactttgaaaatttattttgtatctgaaattatctgagattcgtcaacttttgcgaaacatcaagcctcaaaggatgtatgtacgttacattgcacaaataaagagagatcggccg

SEQ ID NO: 153021 - DNA, 262 bp, Homo sapiens
ataaataacagtgaatggctacttgtagataccaagcgctttcttatacaccatgaaaatagaacctctccctccacgcagctcccctaccaaaccccgctacaacctctaacagctgctacccttgctggatccctaggggtctgggtgcaggaccccacttccagaacacactcttacctttttactctgctcagtgctggatgtcaggatcattagtaccccaaaccttagcatcacacaatatatacccagataacaa

SEQ ID NO: 153022 - DNA, 360 bp, Homo sapiens
attccagtctgggcaacagagtgagaccctgtctcaaaaaaaacaaaaaaacaaaaaaaacagtggccttgaaatctttatccaggtaaaaagcaatcgtaataataacgaaaaatgttctaatttgaaagtcaggcacaagtgcagtttgaaacctgattgttactaaatgaatttagtctatcctaaaagctatttctcatgtctacctgtgttatcagaagaaacaacagcattctagcatcctgatatcattctagcattgggatgaaacgttgccatcctaggagaagacatgggttcttatggataaacgacttagccttcagccagctttagcagtgtttgggagcagtgtac

SEQ ID NO: 153023 - DNA, 251 bp, Homo sapiens
ccctgggcttgtgcatggcatggctgtgtgtggggacaggcagatattctcacatgccaagggaagctgagaaggaagaggactttgggttgcattaatagaaatatatgtaccaaaatagagcagatgacccaaggttcttctgatctttgtggtggctggaccacaatgtcagaatttcagcttaggagggcttgcaaccaagtgtccaattttcctagaacttatctttaccttttttctttttccct

SEQ ID NO: 153024 - DNA, 880 bp, Homo sapiens
caatcatgctcatcctggactgatcctactggcacatggaaacttcctggctggggctgaagaagagaattaactctttcaggcaaagtggaaacatgaagttttatgagagagagaagaaacctttggtggtgcacagggatttgaattcaggtttgtctgcccacaaagcatgagtgcttaaccactaagttacattgttccgggacagacatacagaggttgattctgtgtccgcaattggtgggttcttggtctcactgacttcaagaatgaagccgcggaccctcgcagtgagtgttacagttcttaaaggcggggtgtccggagtctgttccttctgacgttcggatgtgttcggagtttcttcctcctggtgggtttgtggtctcgctggatcaggagtgaagctgcagaccttcgcgactctccacagcaccggacaattgcgcagtgttgaagtctcatgctggtctgtaaagccaggccagaagaggaactgggaataattaggatgggagattacatccaacttacagtttgtggattctacccctgaattctatccacaaaaccctcaagattcaagaacccttgatgctgtcatatggccccaggagtcatcagatataagcaccctaagaagctgtccaggggtagcagggagactctgtcttcagtgaaggaggacacttaaggctgaagtggccccaagaaccaccctcatcatctgtcaagcccagatataaccattctgtatcctcagacctcaaagccttaaagactctgtctaccacgtacaccacccacttcagctaaacctttcacacttgcacagtccacgccagcatctcagcatcctgagggtgagttcttcctg

SEQ ID NO: 153025 - DNA, 641 bp, Homo sapiens
tagggggaaaagcggacgtctagtgggtgacttattgatggacccaggaatgcaaaggtctctatgattttagctgagtcttcctagggaccatccagcttcctggtgaggtatatgacatgggggtcttagctcttggaagagctttagagactctagaaagaaggaaggacaaaggcttctgtctttctgaatgcagactctccacagcaccggacaattgcgcagtgttgaagtctcatgctggtctgtaaagccaggccagaagaggaactgggaataattaggatgggagattacatccaacttacaggtaggtcatcccagaggccagaaaaagacaaaagagtttgagggatctttggacctgatattaagaaactctaagaacagctaatcctgagcttctgatatatgccaggcactgcactgggctctttaacatacattatatcatttaattatttgtttcctggacaaatattaagcacccactatgtgccatccttcttcaaaacaattcagccagattacttatacagagaagaaaactgaagtgatgtgaagtatcatataatttccccacggttatatgtcctctagtggctcagctgaaattcagattctggctggcattctca

SEQ ID NO: 153026 - DNA, 324 bp, Homo sapiens
agtgtcatcccccttcgtatgaccccaagtacgaaaattaaccccctaataaaattaattaaccactgtctcatcaccaaccccaaccccttctgcttggtcatgacctttccttcatctgagagggttattttaaactttaggtaaggccatgtgaggtggctcacatgtgtaatcccagtactttaggtggccaaggcaggagcattgcttgagtgcaggaggtcaagactagcctgtccaacatggcgaaacctctactaaaaattcaaaaaattagtcaagcatggtggcacacacctgtattcccagctacttgggagg

SEQ ID NO: 153027 - DNA, 226 bp, Homo sapiens
agagataaagaatttgaggaccaaagtggttaagcaatttgattaatggcttatagatgaagaaggactacaaatttctttgattcagcttagagctctttccaccacactttacctttcttccaaggatacctttaggacagaacaaaatttgattttgtactccatatttttgtccacatttgctacaaaacgattatctagaaactcatcaactgtagccagc

SEQ ID NO: 153028 - DNA, 330 bp, Homo sapiens
accacagaatgaagagaaacagaatgaaggagaactcctccagggcgaacttgttggcttctacctgaactgtagagtttctgtgagtccagggaaatacacatttcttactacacttcaatttatctacttgcaacatggaaataaagtataacactttctccaacaaaacccatacctgctcccaaacagaccgcacacattcacatcaggactaaccagaatgaggatgacccgcatcccatcagccttcatgcgattgatcagagctggaaacccggcaaacttggggctgagggtgaagtccagctgccgctccatgtagtcgat

SEQ ID NO: 153029 - DNA, 453 bp, Homo sapiens
tggacactgttttaggtactgaacaaactgtagatagaacaaacaaggtccatctctcatggagcttacattctagtgggacagggaagagacaaaaaataagcaagtaaataaggtcatttcgaacgataagtgcaatgaaggaaaataggataatgttttcccagcaccatttattgagtagggaagcctttccccattctttgttttcatcaggtttgtcgaagatcagatagttgtaggtgtgcggtcttatttctgtattctctattctgttctattggtctgtgtgtctctttttgtaccagtaccatgctgtttggtaactgtagcactgtagcatagtttgaagtcgggtagcatgatgcctccagctttgttctttttgcttaggatttgcctaaattaatcatagtgggaagatttataggtagaggcgacaaacctaccgat

SEQ ID NO: 153030 - DNA, 293 bp, Homo sapiens
aacgggtgatgcggttggggaaggttcttggaggaggtgatacaaaggccacatcttaaaggaaaaggagcttactctggggttggaagagggatgtgagcactgaaaggtcaggtgtggctcgagggtggtgagcatggcagggggaaagcaactagaagtgaaggtagtgagccagaccacgggcctggtggacggtggttggcctctattcagagggcactgggaggataggacgacaaaggatactctatgcgaggaaggtaccctggcttatagttggaaacagcgtt

SEQ ID NO: 153031 - DNA, 446 bp, Homo sapiens
gaggtagaatgatcacttgaaccccggagttcaaggctgcagtgagctgtgataacatcactgcactccaggctggatgacagagtgacactctgcctctacaaaattaaaaataaaaaaagcaaaaatgatttgagagaaacaaaaactaagaaaattaatcaccagcataacaacatagtgagaattaccaaaaggatttcttcatgtaacaggaaaatgatcccagatagaaacgcagagaagtcagaaggaatgaaaagttttctaagaaaaaaaaaaaaggaggtaaacatgtaaataattttaaataaatataggctgcataaagctgtaatgataatgtccaagactgtttttatacatttagaagtaaaatacatttcaatataacacaaaagaaaagaaggagtgttttggttagcatccataagctatgctacagt

SEQ ID NO: 153032 - DNA, 222 bp, Homo sapiens
ttggggcagagtactcaatgagaagggataggaagttagagtcacattaaggaagaggcttataacttaagatttcagacttcagtaattccctagttgtcaaactagtaataagacaacattacttaaagcactaataaagaaagaaacatactgggcatttttttttttttaaatctagaaactcagatgtgcaaaggaaagtaagaatagccgttattg

SEQ ID NO: 153033 - DNA, 324 bp, Homo sapiens
ttagcatataagcgtatgaagtcagggtcagatgctgcagtattgaagatgagtgtgcaccgtgaggaaggatttcaagcacacgctgcaggatcagggagaagcagagaggctgccggagaggccggggagaaactggctggccgaattctggaatggaactcacaagtcaggtattataattttctccaataacacgtagcagccttagataagaagggggcctggaagacactgggggaggtgggggtaagagcctaacacagccggcacctcaagacagcccatgctcaccagctcactcagtgagcccactccaccacc

SEQ ID NO: 153034 - DNA, 450 bp, Homo sapiens
ccaggggataacaggaccctgctcctcttgctaaagccagtttgggagcacccccacccaggcaccccacgccagccaggctcgcctctgaccagatggctgaaggagcaggtagagcaggaagtgggagccagtgacccaggttcccctggtggccaggcttggtggcccatgtccatggagtcccccacccgccaacgacctccggccatgcctcctgggtaccaggccacccatgggcgggggtgggggtaactcccagctgactcgctgcccagctggcaccaatgaggtctccacctcagccctgggctgagtgtctagtgctgactccttcctacaggcaggtgagcttgggaggcaggggccctgtggacttgggaagcgggctcagggtctggaggccagaggtcttgtccccaggcccagcatcccatcagcaagagccca

SEQ ID NO: 153035 - DNA, 380 bp, Homo sapiens
attcatgattcatgtctgagagccaagagctacaaataaatggtcataagctttctttactatttccagggactgacctgcttttaaggcagtttttagcagcaaatacatcagctgagtagaatggcaatagaaaaatgactgcatctaggccagtctacttctggcagtactgaagagagcctttaaaaaattgatacatttagcagcactcaaagttttaaatttaattttctcttttgcatttgggaggaagaagattaccatattatcatgattattaagtcagattcagaaagaagtatgcattttcaagaaaaaagcaaaagtgtagcaagtttattgaatgactttagttctcttaaaacagctcttcttgc

SEQ ID NO: 153036 - DNA, 217 bp, Homo sapiens
cccagcggatggaacctatgagttatttgctgaagaaaaaagggatcacagaaataaataatggtttaatgagaagatgaatgtgaggaatgctggtttatatcatgtgatacctccttttccctctttctgcacatctgattattccctcctttaccaagggtgagctagatagttggcaatttatgctttagtttctttgtgctgtgtgtatgtg

SEQ ID NO: 153037 - DNA, 684 bp, Homo sapiens
cctctaatcatgtagttggtttttctggtgaccagctcccatcctgctagcatgctctgttgccccctcctccccacgtgagtcacctcattaggatgaactctgtggttgaaagggactcattattcataataaaagacactcctatcatataggaaattccaagggattctgatgctctgtgccagaagctggggacaaagaccagatgtattctatgttatatcattccctcctttatattatttgaaattttaacattttattttttaccaaaaacaaattgaacacagtaattttagcatatgtttatattttaactgcctcagtagcgacctgttattcccagttctccggttgctgttaagaaaatctttgaatgctagttccagaatctccaggaggtgggaccagtttcgttagtggtgatgtcgaaaataacagcagtaccactgtgcttgggccaggtgaaatcaaatcagatgattcagtctggttgatgtgctagaggcccttttcccattcatgtaaaattggaaaattttgttcactatccaagtgtttccaaatatttggttattgtgtcaatgtagattcatacatattaagtatgtatcttgggtataaatttaagttataatttaatataaattgtgtggcacaaaagtagttcaaaggaggaag

SEQ ID NO: 153038 - DNA, 422 bp, Homo sapiens
cacaacctcaagaagaagaaaatgcaaaccaagcacccattcacggcaacagatgggtagcatcctggagctgtgccatggcaggtgagccacaggtgcccctgacaacttcttttaaaatggcaagaacctagtatatccattatgtagcataagaatataaggatctctgtacttctccacccactatgctatggtagtttcaccgcaattgtccagctttgcctctcttattactgagatgtcttctccataatgtcccagcttgcaggtggacactcagctcgcactgatgcatcccagccacagggtttccatctgccctggtccctgtgcatggccaagccacagagtgtagctccacctcctagagctccacatcctaggaactgaggcaagggacaccacaaacttggagaata

SEQ ID NO: 153039 - DNA, 441 bp, Homo sapiens
cctttatcattaaccaaaggacctaagtgtttctcgggagttctgtgagccactgaggcaatgtaatcaagccgaggtaagggtgacgggaacctggatttacagccgaccggtcactcagaagcacaggtcacaacgtgaggcctctaactggcatggaaagtgggggagtcttggggactgagcccttaccccgtgggatctgagcctgtgtcgaggtagacatgctggaagtgagttgaatcggggctgcccagtaggtttgtttacaccagcattaccacaaacacataatgcgttgtgttatgtacagtagctacaatgtcaccaggcaacaagaaatttcccagctcccttattgccttctgggaccctcggcatacgtgtggccctcattgactgaacattgaatgcacacatgactgattttggaactctcct

SEQ ID NO: 153040 - DNA, 166 bp, Homo sapiens
caactcgtgttcacaccaaggagcactggcccaggcacggagcgtgaccacaggggcggcgtgctgatcctggctcaggcagcgcatctgccacacggaagggcgcaccgtacccagtctggttgaggtgggcacccagcctcactcaacagggcattcaatgtaa

SEQ ID NO: 153041 - DNA, 555 bp, Homo sapiens
agttcgacggagactctcagaagagcgtagcagggaagagctctggtcagatggcaggacgggccagtgcaatgattgcgagggccccaacaatcaagaccaggaggttctgctgtgtggtgagcacattgtcagcctgaacggggagtgggacagaggtgtatgggggtacagggtagatgagtgtcccctccctgcagcagggctctgtttgtcctaccattgaacaactcggtgggttttccccactctgatcagcccaggactctgcttgctagctgggttgcaaaagctcctggacccttttcttctcaaaccaattatctcttcctgggctttgcgtttgctctagggctcttctcattcttggatgctctagctgtgctctgtccctggaggcttcccgagactcatgagtatcagctcctgacatgattctccttcactgtcttttttattagggtttcatgcagactctcatgcacctgccgtcggaagatctgaactttcttctaggacacctaatatccacagtactccaggtgggtcctaagg

SEQ ID NO: 153042 - DNA, 410 bp, Homo sapiens
agagacttgccaggagcccagggggtggtacagggtcactggggtagccccagcctgagggtgcccaggagtggtctgtggaaggtctccagcaatgtcagcctcacatgtgattaatttgagtcactgtgaacatctctccacctccttgactttacccatgaaatgatttccaacatccagtcactttcctgggtatttttagtcactcactttgcagaacctttgatggtctacagaagtgaaggaatgggtttctaagtccaagctgaggtagaatccctggcattgccatttactagagctgtgtgaccttagacaattccacttaacctctctgagcctcagtattcttacctgttaacaagtggggatatgggttcccagggatgagggaccggtgaaatgat

SEQ ID NO: 153043 - DNA, 678 bp, Homo sapiens
attaggtacttccattggagtactcccctttcaaatttagcctatcagatatatcacagaagcgcattctctgtaagttgacttcttttcttaatggtagtacagctgtggctctacaggcacccaaatcggaatctgccacctgtgagttttccttttatgtttctctctctgtccccctccaccaaatgcacaaagacaggcacataggctctcttataattactttttgagttagagtctcactcttttgcccaggctggattgcagtgacatgattatggctcactgcagactcagccttttgggctcaagtgatccctccagctcagccacttgagtagctgaggctacaggtgtatgccgccacatttggctaatttttttttctattttttgtagagatggggtctcactttgttgctcaggctgttcatgaactcctggcctcaagcaatactcctgccttccaaagtgctgggattacggtcatgagccactgcgcttagccctcagttttgaactgttagttcttctgttcattgctattgtgtctcaatcctaggcttttttattgcctctgtaaatatttgaatttagttttctcttgacttctattgagttccatctcgtgtgtcccagtgaatggcagaattgtctggctctctgttgttcctg

SEQ ID NO: 153044 - DNA, 722 bp, Homo sapiens
gcggctcaccctccacggcgtggttcacctcttggatgaacagctgcagcttcatcaccagggtggctgcgtggccatccgccttcccggacgccgcctccttggagccggccctgaaggccgcattgatccactccttcacgtcgaagtcgtctgccaggaacttggagaagtccatggcggaactgcctcaggcctggcgtccagaacttaagagttggctccgggcggcaacggggatgcagaagcgagcgagcctgcgagagcaccgaggctagcctccgaggcgaaccccagaaacgccaggacgggtaacttgcccctttgcgcttccccgctcagcgcactcagtttgcggctgggaatgaccctcgccgcccgccgttcttcttccggaagtcgttggccgttaccatagtgactgcaggcgtccggagcgctgagcagaggtgcagtggctcatgcctgcaatcccagcactttgggaggccgaggcaggaggatcacaaggtcaggagttccatacaagactagcctgcccaacatggtgaaaccccgtctctactgaaaatacaaaaacagcctggcgtggttgtgtgcacctgtaatcccagctactcaggaggcagaggcaggagaatcgcttgaacctaggaggcagaggttgcagtgaaccgagatccgccactgcactccagcctgggcaacagaccgagactcca

SEQ ID NO: 153045 - DNA, 478 bp, Homo sapiens
gtctccatatcaaacataattagtagatttcagatgaacttgaggaactattagaacaacttacctaaagcagttttgtttctcagaaaaatgacgttatagatctggcctagaatttggcatagaaacttttcctacaaggtataatgagaaacagaatcaaagcaagagtcttaagactcagtcttagttctagtttggtctttgtgatcctggccaagtcacttcaacatgaacttggttttctatgtctacaaagtaaaagggttgggctactatcgctgctgtactactactactgatctatttgtgctggattattctatatccagataaatgaggccaagtgtttctggcatcaccaaccaccatttaaacaaatagcatcccctccataggggaggaggctgcacacatctgctgctctccaccctgagaatgtggatgaattccaatcagcagccaccacctgactgat

SEQ ID NO: 153046 - DNA, 376 bp, Homo sapiens
tgctcagccaggagaccgaaacaactccggtgtcaagaatgaacacggaacaaaaatactgccccaaacaattcaacacttccctgagaaaccagcttcctttctcctccccggggcttgtggagggcttttcctgcacctcgtgagcaggcctgctggcatcgtgacttttcaaaataaaaggaatttcccgtcatcttattttctgataatttgaaatatctctcaaagcacaaagagtaaaaatttgctttttaaaaataacaaacatacaatgtgataatagtcaatttcaaatcttccaaacaccatagtaccacttgaacaagagaaacatcaaggttacatcttaaccccaaagtccattgagaaaacc

SEQ ID NO: 153047 - DNA, 341 bp, Homo sapiens
ggctggggacccccgcccagctgggtcagagtgcccggctccttgcccacctcagaggctgctgcaggtgtctggggcccacaccggcctctctgtgacttttagatctccaggactctccaccatttacccctactgtccatgttagcccctgaccatccacgttagcccctgaccatccatgtagcccctgaccatccatgttagcccctgaccatccacgtagcccctgaccatccacgtagcccctgaccatccacgtagcccctgaccatccatgttagcccctgaccatccatgttagcccctgaccatccacgtagctcctgaccatccatgtt

SEQ ID NO: 153048 - DNA, 848 bp, Homo sapiens
  misc_feature (700)..(700): n is a, c, g, or t
  misc_feature (710)..(710): n is a, c, g, or t
  misc_feature (715)..(715): n is a, c, g, or t
  misc_feature (719)..(719): n is a, c, g, or t
  misc_feature (729)..(729): n is a, c, g, or t
  misc_feature (732)..(732): n is a, c, g, or t
  misc_feature (745)..(745): n is a, c, g, or t
  misc_feature (748)..(748): n is a, c, g, or t
  misc_feature (758)..(758): n is a, c, g, or t
  misc_feature (764)..(764): n is a, c, g, or t
  misc_feature (774)..(774): n is a, c, g, or t
  misc_feature (778)..(778): n is a, c, g, or t
  misc_feature (787)..(787): n is a, c, g, or t
  misc_feature (790)..(790): n is a, c, g, or t
  misc_feature (797)..(798): n is a, c, g, or t
  misc_feature (801)..(801): n is a, c, g, or t
  misc_feature (806)..(806): n is a, c, g, or t
aggccgatcgggctttattgtggttttaatttgcatttccctgctaattagagatgttgagcatttatttcatataacaaaagcaaaaatagacaaatgggattgtatttaactaaaaatcttctgcaaagcaaaggaaacaacagagggaagggaaaacccacagattgggagaaaatatttgcaaagcagatatctgataaagggctaatatccaaacatataaggaactcaaacaactcaatagcaagaaaacaaatatgcacattaaaaaatagacaaaagatctaaacagacatttctcaaaagaagacataatagccatcagatcacactttaaataccaagagcctatccttttcttgtatttggaaccaactggatccaaagaatatggggcagaaatatttttataccccatccttactagtgcaaatacatattttggaaattgtacctcattataatatgtaccatatcctttgaaggtttatctctccagctttctgaatgctgcacccatggcatttgctcttcatgtttttcaaggtacctgccctttgtttgctttttgttgttgttgttgttaagatagaatcttgctctgttgcacaggctggagaacagtggtgtgaactgcaacctctgcctcccaggttcaggtgattcttctgcctcagcctccaagtagctgaggacnagattgctgnaactnggangcggagatgnganctgagatccgccntgnactccattgngtaacnaacaaggccntgancgtggtatnaanaaatcanngancttantccaaactgttggtcaaaaccctactgggtaagcaattactg

SEQ ID NO: 153049 - DNA, 427 bp, Homo sapiens
caaacaatgttacttgcagcctttaatgtcacagcccctaaaaacattgaaatgtacatttttcacctgctagtcatcttcagtattctggagaggaaatattctttcctgtccttacagtggttgtatatcttaaaagacgactatatgacacttgaatattgatattcaaccttaaccaaagcagtcacaagaatacaagccattcgctctggccttttagatatgttcccaacaagttcatgtgtacccaatgaaaaatgttaaataaactgataaactttaaacatttaaaaatattttatttatttacttgccacagctagataagaggaactgggttaattttgaaactctcagtttcctttcctctaaaccagtagctattgctggccactagtatgttgtttcctttgcaggaagttgc

SEQ ID NO: 153050 - DNA, 254 bp, Homo sapiens
atgtctctagatatcacaagtgtcctccgggggcaaaatcgtcgaggtctaataccatcattttagagataaggaaactgaggcctagagagtggaggtgacttgctcaaggccatatggcaagtgaggaccagacaggactgagcccagggctctggtgaaaggatccccaggcctctctgccctgctgctctctcctcacaccctcctcctccatcttccctggatttccaccaaatcagcctgccttctag

SEQ ID NO: 153051 - DNA, 617 bp, Homo sapiens
attatattttaatttaaaaaaaacctttcagtgacatgtcacagagccctgccctttggtgtctgagcacagaagagaatcacagactctgcactcagatataatactcttgtatgccaactacagggcattcatgactcttcaaggagacccactgctttgctggacagcaccagctgagaacagtgctctctcttacagagtgctcaaaactattttttcagagctaattgaaatttgcaatcaaagcagagatacattctgactaatcaacacatgcatgacttagaatcacaggagtaggtggcagaagtttagcacaataaactcttctttatcttgatccaaatcagaagtgaattattttcacagtgctacacaataactggttctcataatgagaacctagtgacaatgttaaggtctcagagaactttacaaatcaaagaaggaatgactttagtgccaagtatgttatagtccagtttgtaacggagcttctttttaataggggggtccctgcttaaaggtcaaagctcattatcaggaactagagatacaaagatgtaaaatcaagtgctggatctcaaaaagctaacatacattacaaatgttaa

SEQ ID NO: 153052 - DNA, 181 bp, Homo sapiens
acaagccgtctccctccagtgaggatgaatcctctgggtcctcaagggcagaaccaggaggaatccatggagcacttctcataagacagcttaacacttttttcagttttacttttgaaattttttaacccccatttttttatttggaaaaattttaaacctacagacaaattgaaagagt

SEQ ID NO: 153053 - DNA, 315 bp, Homo sapiens
cctggttactggtctaggccagtaactgcctgcaagcctacatcaatcaggtgcctgacagtgttcatggaataaactttgacctaattttttcttcctcaaacaagcttaaaagaagccaactaccaaaaagaaggaacctttttggaagaaaaaaaaaaatgtgtcccgtggcagttggctgtggggtggtcattcagcctattgctccgggcaaggttcgagctggcctgttttgaggtctctaacacagtagccacatgggcatcctacccacacatgggcagagcaggtccctgggataggctttccctg

SEQ ID NO: 153054 - DNA, 161 bp, Homo sapiens
  misc_feature (18)..(18): n is a, c, g, or t
catcagctcggtaccagnttcgacggagactctcttcctgatgtcacaaagaccctttgcagactgacatcatgttgcagggaaaactgtataacacagtactggggtagagggataggcgaatgggaatgtagtttattatctttgcagcaattattgat

SEQ ID NO: 153055 - DNA, 228 bp, Homo sapiens
tagtctagaggatctcgaaaactgatagaggcagggcttctgagaaggactctacccttctccctgcagtgggattaattgctgccttggcttcccacgagttctagaaaatgaggcagacagtgtcgggagaggggagtggtggttgtggctcgctgccccggagcctcatttcccatttctcccgagacaggtttgaatggctcttctaaggcagcctgaaccctg

SEQ ID NO: 153056 - DNA, 382 bp, Homo sapiens
gtttctcattgtcactgagaatgaggttgcttcatgatgctcttcttagtaggagtggctgacagaatgtcttccttgctttaggaaatgcaggactcaggcagtgagaatgcattcagttttgattctgtcacacatagcccggaatgcacctctcggacagcacctccttgtctgctgcctctgccattctccttactgctttgagtgtgtaaattgaggggaaaaaagggctttttgttagagtttgggtattttcattttcaaatcatctgacgctgatttttaagaactctgtttcaagagctgtaagcagtaggtgagtatttcactcttcatggttttactacatcctatctcatttgggcttgcatatggtaag

SEQ ID NO: 153057 - DNA, 319 bp, Homo sapiens
tgcagtgcaagggaggacagggaaaaacggggacatgacagcccaaggtggtagtgacagcatctcagtgggaaagttgtctgaaaataaattgcccactgtagtaatagccactttcagttgtgtggcaggcactgtgctgcctgcagtacatcccgtttaatcctcacaacaaccctctaagaatcagtactcccagttttcacatgaggaagctgaggtttaaagagagcacctggcccacgaccagcaagtaaggaatagaggtgggatgtgggtaatttaaacctaaatctctgacgcactcttaacgcacatt

SEQ ID NO: 153058 - DNA, 269 bp, Homo sapiens
gttttaccatggtctcgatttcctgacctcgtgatccgcccacctcggcctcccaaagtgctgggattacaggcgtgagccaccgcgcctggcccaagaaatttttttttaattagctcagcatggtggctttcacctgcagtcccagctactcaggaccctgctctattgtctcagaaaaaaaaaaagttctaagagaattttaaatgatgtgttttttcttctcagaattttttagtaataagcagaagtctcccagttagccgttc

SEQ ID NO: 153059 - DNA, 564 bp, Homo sapiens
tctcctctttaccttcgaaggtccaaatctttccatcctctttccagacataactcaaatgccataatgccttctcaattaaaaacaatctctctcttcccagaatacctgcatgttatttatatgtcttctatagcaccaatccctttcaactttatattttggttatgaactctgcaggttccctgttgaaagatccatgccagttcttatacttactacatactcaaataaatatatgttgaaggccaggcatgatgattcatgcctgtaatcctggcctattcggaggccaaggtgggtggatcacttgagcacaggagttcaagaccagactggacaacatggtgaaactccatctctacaaaaaatataaaaattagccgggcgtggtggtgcacacctgtagtcccagctacttgtagggctgaggcaggaggactgcttgagccagggaggttgaggctgcagtgagctgagatcatgccactgcataccagcctgggtgacagagtgagaccctgtctcaaaataaaaatttaaatttaaatttaaaactgtatg

SEQ ID NO: 153060 - DNA, 764 bp, Homo sapiens
tcttaccagggctgtaaatataatttgtgagccaaacctatattcaaattctgatttcacaatctctagttgtgtatctatgaaccaattacttaatctctttaatccatagttatctcatgtcaaaaagggataataaaattacctcttcacagtgttacagtgaggattaagtgagaaaatgcataatatatttggcacacagtaagcattaactatttaaaaagcattaaacattgactcattaatgccaactcttgttattatgattaccacacaagagacctcctagcagggcatcaagtcatcctcagtggcaaatgcaagaaggtaagtgaaagtaatgtgtggtattgaacagctcaatgactaagtcaaattaggcttcgacagcattgcttcaaaaagggaaaggacaagaatatctagtcaacctcaacagccatattaccattttaagtaatctctctctctggcattttgacccttttccccaatgaaataatatctatctagtaagctttttccaggaaactctggtagccaacatcttaaagaaatggagaaaaaaatgatacgaagaaaagaagccctgtctatggggactgttccagaatcttgcccaggattgttatttttgtccagaaatattctttttttttttaatttttgagatggaatttcactcttgttgcccagactgtagtgcaatggcacaatctcggttcactgcaacctctgcctcccgggtttaagcaattctc

SEQ ID NO: 153061 - DNA, 539 bp, Homo sapiens
tcctgctcactgtcaccatcatcctcttctctagagccggaatcccctaggagcatttccttgttttcctcctctggagaagaagagcccagagccaaggagcagagggctgcagagcatggctcagatttgataaacaggcaggagatttcagcagcaatcaggagaggaaatcacacacattatccccggaattcataatgcaccgctaatgagctggaggggctgggagtggatctccacccacctcttgcagcccaggatcatcagtgtttggagaaggatgcagggaggggcagtgccatagcctgatggtcctctcaggaagggaaggcatttattaggcctccaaatgtggcttggtcacaaaggacgtgaagatgaggggctgcagagacctccagggggcagtggagctgcggaggggtgcatgcaaggtgggggacccacagcgacctccctgttgaataacctttccctgagaaagtcctaacatctgggaaatttctaaatcacattatcattgaattagtatctat

SEQ ID NO: 153062 - DNA, 1197 bp, Homo sapiens
atcataacatacattttacttttttgtagttacttgcataattgtcctttgtctccacttgaatgtcagctttgtgagggtggggatgtctgtctattcatcgtgagtcctcacttcctagcagggtctcacaaaacaatcgatgaataaatgaagaggcgtctggctaagatggggaagcttcattgctcctgggtcctccctcttacaaccaacatagcagcaccctgagaataccagaataatcagaggaggactgtgaaaagtggaaagaagaatgcagactgcctaggaacctctggacttaaattatatgacagtgaagctccaagtaaaacttattcccctagccaaaggactgggaaaaggattgcctaacagaatagaacacaggctttttacttattaatacttgtaccctagacaggcactaatgaaaaacctgacccagagtcaatggagactgataagaagctgaacctcccgcgtcccttggaggtaataaggcaatgtgagtcagtgatttaatttccctgggaagatgccagtgaggccaagggagggggcactgacgttctaccctcctcatctgcaatgagccagtgtgagtcagcgctcttgctggggtggtgacagaaagatccagcaaggagctgaacatctccctccaccagcacctgtatgctatacctaaaaagggtgactaccagctaatagattagataggagccaaagtctaataaagcataaaatgtccaagacataatggaaaaatcactcatcatttcaagagctaaggcaatcacatcttgaatgggaaaatgcaataaacagatgccaacactgagatgagccagacattggaattatgtgacggggattttgaagcagccataatgatattgcttcagtgagcagttacaaacacttagggaatacgtaaaaagtaaaatatctcagcaaagaaataaaagatattaaaaagaaccaaagggaaattgtagaactgaaaaacacagtaacaacaaaaaaaaaaaatacttactggatgggcttaatagtagattggagacaacaaaagaaatgattagccaactcaaaaacaaatcagtggaaattacgaactctgaatgacagaaaaaaagagactgaaaaacatgaacagagcctcagggacctgtgagacaataagactcg

SEQ ID NO: 153063 - DNA, 479 bp, Homo sapiens
ctcatagtgtagaccaggagctgggcaaaggtggggcataactggtgcttgggggttgaggggaaaatcactgatccagtgttgaagatatggggtggtagaatgatctccagtcattgatgcctagggctaaaagttgtcatgggagttgggaggggcagacggaaattccactggccatatggtggtcttgtccttcaaaggaggacagctctcgcactaacaccacttctcctgactgggcatcttgagccccctccccgcattcccacaggtggggccttaggaagctgttgtggaattgtagcatttggatggataatggaaaggggtggatgttcctgagatttcgaggcaaataaaaacatgccagattgtttttgaagcatcaaatgcaaattgtcaacatgaacatatttctggacttaacagttgaatgtgtgaattaattatgggcctattaagatacagaatgatcc

SEQ ID NO: 153064 - DNA, 390 bp, Homo sapiens
aagacagaaactcagtttttcacataaaccttagacttaagtgctatctcttatcacagagaggcttctgttgtaatgtgggcattagtcatttttgataattcagaaaaatcattgctactatgagcgttgagatggatgaaatttttgctgtaattacctgaattgcatgcagccattgaaatcttccttaacttgaaatgaaaaagaactttagaaaaacatgttttatctgtctcaccagttaaatgctcttagtagagctcttctagtattttgtagattcttttggaatcgtgcctgtttcacagaggcagagacatgcaaaccttagaatgggagttgagctgtttgaagtctgccttcataaaaatgtcttattgcagcagt

SEQ ID NO: 153065 - DNA, 370 bp, Homo sapiens
agcactgccacctcttcctgcagacttgaacgtgaccgtggggaggactatttcagatcactaggcctccaggggctccatttttcccctcccaatcctgctcttgatcctgggcagcatgagtgactgtggcttttgcttaaaccaattcaccatcccaaatgaagaagggagtggtagttgagagtgccagctgacagccagactcctgggatccagtcctgccttcgtctgtctgggctgtatgaccctgcacaaaccatttagcttatctgtaaacgtgggataattacaataccttcctcttgagattattatgaggattaaacgagttgattattgtaaagagtttagattcaacccagacacg

SEQ ID NO: 153066 - DNA, 851 bp, Homo sapiens
gacctcaggtgattcgcctgcctcagcctcccaaagtgctgggattacaggtgtgagtcactgcacttagcctttttcatgtttctaattgctctttctcatgtgattctctggaatagagtttctcaacctccatacagttgacattttgggctggataattctttgttgttggaggctgccctttgtattataggatgtttagtaacatccatggtctttacccactagatgctggtagcacctcctgcacctcagttttcacaatggaaaatatcttcaggaattgccaaatgttagaggaggcacaactgcccacttctatagaagtagacgttacccaaagctttgacagtgcccataatttctgtcagggtatttatttcccactcttatcacatatcttttgtctgcccttctgagttccatttccctgtattagacctttggctgatgcattagtgtgggtgtcttgccagaccctgatttcaatatatctgcttacttccatccattctcaccccaaccctatgctgcctactgatttttctgtggtatttagtggcacccaggctgcaggttttgtggttgcctttgactcttcattggctcacccatgctagtgtttgccactcctgtccgtttttcaactgtgatttcttcctaatatgagtcattcctttcttttttccttgtcctacctaagttctcattacctcctgtcagaatagtcgcagaggcctattgtagttccttaccttcagtcttcctctaatttgtccaacaaaacactgtgaactcagtcttcctgaagctcttcttcccggaacccttacctctttccctgcctt

SEQ ID NO: 153067 - DNA, 329 bp, Homo sapiens
cgaaactcccacgatgcttatgatgaggagaggaaaacaaacccttcagcagttgttgcagctcaaagcaattgggaaaaagtggctccagagagcctgggcttccaagaaggcacacatgagctgtgctaaacactgcatgtgcactgatagaccacggccagctgaaccaggccatgaacatcctacaaaaagctgaaggtctttgccaccattcattatcagaagacactgatgagactgaggaagacccacaggcaggactggccatcacttatggtcagatggcctatattctgcagcttcagggtcaaacagaggaggctctg

SEQ ID NO: 153068 - DNA, 447 bp, Homo sapiens
acatttaaagacagatctgtggtgtatcagtagccacaatatttctgtgtagatgtagtggtaggagtagtggatttgcagataagggaaacagaagtgtccaatcagtaaacattcattgatcttacaattaatgtgatgcctaattaaaatggttgctaggcttttattaattacctagaaaatatttgaaatttttttcgtctttaatttctcttacatttcatttatattcctatttattttctgaggttggcttgaaaattttgacttgaatttccttaaatttttcttaaccaaaatctaaaagtaaacagctggcagttgctgtcttgggtgggtggtggtttctcttttatcagcagcagaatgttctaagccttctgccaggagtctgactgcaaaagtctttgggtggtaaagtgggcgagaatgtgactaatgcag

SEQ ID NO: 153069 - DNA, 830 bp, Homo sapiens
aaacactgaaggcagttttgttcttgcagtctgtcagattttctccttttcccagggtagggatcgaggttctgaataagccatttcattttataataaaaagcaaaactccctcacacatgctggttattctagaaaaatttatatatatatcactagggacttaactaagaatgtgattttttatctttttaagggagagtctcactctgttgctcaggttggagtgcaggcatgtgatcatagctcaccgaagcctcaacctcctgagctcaagtgatcctcttgccttaacctcccaagtagctaggaccacaggtgggcatgaccacacctggctaagttttaaaatttttctgtagagatagtgtctcactatgttggccagactggtctcagatgcctgggctcaagcagtcctcctgcctcaacctcccaaagtgctgtatgattgttttaaataggaaaaaatttagaattttataatatcaaggcacttaatttttagttagtgatataccatccaaaaggcatctgaggctgggcacgttggttcatgcctataatcccagcactttgggaggccaaggcaggaggatcgcttgatcccaggagttcaagaccagcctgggcaatgtaacaagatcccatctctaaaaaaataatgattaaaaaaatagagacaaaaggcatctgaaacataggaacctaattaaaacattatatgtatatacatattttcattaagcgtatgtgttaaaatatcatctagaccaatgttttaagggattgtttttctaaatatattaataaaactattaaaaggccaa

SEQ ID NO: 153070 - DNA, 887 bp, Homo sapiens
acatattagtgtaatgaaatttccactgaaactatccctgccaccaaaggaaatatgagaagtctctcaaatcttctttcaggagaaaaatttagcagagaaggtatattacaacatctcccttttgttaaaaatcaccagcaaaaagggacttcatatccctcagagaataggactcacaccacatataacagctgacagtactcacatctctgatttccagcagggaaataagccgggatgaagcctgaagaaccccaatctcaagaactgacgaggtagactttcaaggttacgttccatcaatcactggaaaacttctcctggagcctctgctcctcagctgttttcatgtgaaggattttcttagccctgttcagacagctttactgctgaaaggttggggaacacttccttttaaagactgtctttattaatgtgttttacttcccctgagagatctttagtcccttctggtagtaacctcgactgacatgcatggagatcagcaataactttttctgtgtttcaacattttaatatttcctcctcctcccactccagctctctgtacttttccataggaaatctggttgattgactttcatgagtatccagccagcttgatgcccgatattcttttggcaagaagtaatccttttcataggtaaagagttagttcaagccgctcatttggcttggaagagagaggtgttttgaggaatatctgaaccatatctacttggaagtagagacaaaaatctccaaagtgtctgataaatggtggtagaggtagcttgactatcactctaggtcaggattggtgcttaaaacagaaagccatttgaaaaactgatgaaaactatgggctctctccccaggatatt

SEQ ID NO: 153071 - DNA, 263 bp, Homo sapiens
actgagcatggtggaggctcacaggcgagaggtctttcccctgagcacggtggaggcgcaaggatgagaggtgtttccactgaggatggtggaggtgcaagaacgagaggtgtttcccctgagcacggtggaggctcacagatgagacgtgtttcccctgagcacggtggaggctcatagacgagaggtgtttcccctgagcacggtggaggctcaagaacgagaggtgtttcccctgagcatggtggaggctcaaggacgag

SEQ ID NO: 153072 - DNA, 420 bp, Homo sapiens
caagtcagttttgtagagaagaggctgggtctgttggaggcataagtcagagacaggagcatccggacggtcattggagataagccactggagctgggaggagagaccagagctgtgttgtcagccacccaggcaacccatttcccaggcctcctttctctcggaccttcctgctctctgcatatctttctgagaatttgaatcgttctcctttttcttaattatttttacccattccctccttgtccatcccaacagtaattatgattaggcaaatacacagcccaccccatcctcaaagacaactgtaatttgggccagtctcagcaaagctggagagaggagtcagcattggttgatctagaggcaggcttgtttctggccttccacgttgtagtggaggggaagggaaggagggac

SEQ ID NO: 153073 - DNA, 538 bp, Homo sapiens
tgctgttgtttttgctgttgctgttgttgcggtggttgttgtttacttgtaggagttctttatatattttgaattttatgcttttatcatatgcatggtatgcaaatattttctccagttatgtaggttgctttttactctctttgccatggagaagttcttaagtttgatgtagtcccttttgcctatttctctttttgttgcctgtgctattggtgtcatatgcagaagattattgccaataccaatatcagcaaggtttttctctattttttcttctaggaattttatagttttatgtagtacattttggcctttaattcatttttagttaatttttatgtttttaattaagtgtctaacttgactcttttccaggtgggcatctatttgttggaaagactatcctttccccattttatgacttggcatcattttcaaagatcatctgactacataagtgtgggtttatttctaggttctctattctgttccattagtctctatgcctgtctttatgtgagtaccataccttttt

SEQ ID NO: 153074 - DNA, 191 bp, Homo sapiens
accacccgagacagtgacagacaggtgacagcgagtgcctgcgtcccagatgcaaatcagtaagaaccacccgagacagtgacagacaggtgacagcgagtgcctgcgtcccaggtgcaaatcagtaagaaccacccgagacagtgacagacaggtgacagcgagtgcctgcgtcccgggtgcaaatcagt

SEQ ID NO: 153075 - DNA, 345 bp, Homo sapiens
acagctgatgttacacagaagtttttctgggggagacagaacacaagaagatgatggagcagaatgctgggtaggacgtccagagcgctcacagcacactgtgagtgagaagctagcctttgctaagagagatgccctggagcccaaggaaggagattccatagggcatggccttaattattcaagcaccaggaaaacctgaggagcagtggggaggtgtctcaatgttgccggtccctttatgatcaaaagccaaaagctttaaagtctatttcagatatcaaaatgcatccatttgggaaccgtttcctgggtgcttcccatccattctcgaattctgcaaac

SEQ ID NO: 153076 - DNA, 444 bp, Homo sapiens
ctttctccctaatcatgagttcaagatacaaacatttaggcaaataaatatcaacaaaaaatacatcaatgctactactaaatgctttataatccacaaattgctctgaatttatgctacccaaaataatatttatatatacattttcacaaccagggtgacaggtaaaattggtttagttaattgtttcaaaggaaggatgaaactggtggtaacagaaaaaagataaattatattcatgttatattattgtttacctaagatcaattgactaacaaggaaaaaatgagagagaaaacaagcttccttgtgtgtaagcatttttatgagcatgtgagcattttcgtgagtatgtgtgcgggtccacgggttcgtgcagtgagtaagaggtggaaggtatgtctgtggctgtgtagagcaagaaagagagtgagaaggagatca

SEQ ID NO: 153077 - DNA, 923 bp, Homo sapiens
tacttcaaagctgaagggtttttcttgggagcagaagcagaggtgaccagagtcctaaatcatcaagacaggatggaggtgggtccagccctatggggcttagcaggtgttctccccgtgtgtggagacgagagattgttataaataaagacacaagacaaagagataaagagaaaagagctgggcctggaggactactaccatcaagatgcggaagactggtagtggtcccgaatggatgggctcactgatatttattgcatacaagacaaggggacagggtaaggagggtgaatcttctaaatgactgacaaggtgaagcaagtcacgtgattacaggacaggaggcccttcccttttaggtagccgaagcagagagagaaggcagcatacatcagcgttctcttctctgcacttataagaaagaccaaagactttaagactttcactatttcttctaccactatctactgtgaacttcaaagagggaccagaagtacgggcggagcatgaaagaggacaaggagggtgaccactgaagcacagcaccacagggaggggtttaggcctccggatgactgcgggcaggcctggataatatccagccttccacaagaagctggtggagcagagtgttccctgactcctccaaggaaaggagactccctttcgcggtctgctaagtaacgggtgccgtcccagacactggcgttaccccttgaccaaggagccctcaagtggcccttatgtgggcgtgacagagggctcacctcttgccttctgggtcacttctcacaatgtcccttcagcacctgaccctatacccgccggttattcctaggttatgttagtaatgcaacaaagagtaatattaaaagctaatgattaataatgtttataataatgattgataattgtccatg

SEQ ID NO: 153078 - DNA, 101 bp, Homo sapiens
tcctgagccgtgttttggtttttcatcgtgttgacctgtgaatggagcatttggttttgtttttcacattctattgggtgctggaaagttttaagtcagat

SEQ ID NO: 153079 - DNA, 375 bp, Homo sapiens
atcctaagtcgaaccatcattaagtcagggactatctgtatacactttcagtgctaaaaactacaccaaagaaaaaacaagtgtcaaagttctccatgtaaaacagtgatccagggatatgggtgagaaaacccatctaaaatgcaatgtgatatttaggataaagctgaaacacaccacagcgcctcagcaattgaggctgtgaatacaaccacacaatcagcaaagaaaagcttgttctattcttcatctacaccactcacacacaacaccaaaggtgttctcagcacacctccatccacctcagatctattcttcatctacaccactgacacacaacaccaaaggtgttctcaacacaactccgtccccctc

SEQ ID NO: 153080 - DNA, 412 bp, Homo sapiens
gttgagactggttgcaaaactgcaaaatccaattttgtgtactggattcaatttcttcattagctgacactaaacacagagacggggcccttgtgactagatgaaccataaactggctccaggaccaccaacctggtacctgatggcttgtttctgctccccactctttccctccatgcatctttctctgagcttctgctcaaggcaggtgccaggacaagccagcgtctcgagcggttccccttcagcggtgagaagtaacgtcacaattaaggggcaagaggggccagaggacagaacagtgccagttcctcatccagattgaaatttgcttccagctgcctgtccccacaccagaaagggcactccctgctccccatgcaggcttctcatcctcttttgctggcctcct

SEQ ID NO: 153081 - DNA, 367 bp, Homo sapiens
aggggatagggagggatgaaaagaaaagggagcttaaccaaccacatttctgtttctgcacccgacgtagcaaggactcaacaaatgtttggtgaatgaacgtgtgtcacctgctcttctcatttattgtaagaaactggtactcagatatccaaccatcagcatcactcaaacatcctgcagatcattcaccaaatatttactgactacccgctctgtgtagtagcaaactcccagctattcacaaaggaccacaggggagaagttaaacaatagacgttttccaagagtggtgattcaagaaaactaaagcaggggatgtgatggagagtgatggaggagtatggcttctctgggtgggcgcagc

SEQ ID NO: 153082 - DNA, 391 bp, Homo sapiens
accgacaccttctacatgttaatgatattataatgagacaagtcacatgaaaatgaagaaaacagtaataggagatggaacaacatggcataaataacttctcctgtgatgagggtctgcaagggagtttgggaaagctttgtgcaatgaacaaagtaggaattccctgggggatgggccatggttgcaagtgtgagtgctaagcaatgaaccctagaaaacaacagcacctctagaaagatgggcacgctgtctgaacgcgcatcctgctctccccacaatcacaggaattactgcattttaagcttctgattgaggattgttacacaaaaagactgaataatcaagaatctcctactatttgaggaaaattaacaatataaaaaaggga

SEQ ID NO: 153083 - DNA, 575 bp, Homo sapiens
ttatctttatatacttctatactatttaatttatattcagcttatccctacaatttaaaaaaagcacttgaaacatttgaaaactgacagaaacaaaaggaaaatgtgtttagtatatctgcacacacacagaaacatggaacacagactctgagcaagtctctcccttccctacctcattttcctcatccagttggcctagctacatggtcagggattactccatgtgctggtcatcatctctaattacattaaacattgcaataatgattgctgtcttttaatgacagcctgctatgttaagcagtatgcttgaaaaatgacagcctgctatgttaagcagtatgcttgaaaaataacagactctgggtaaaagtgttctgaaccaactgcaaaacagactcaagagtcagggaggattgccctgtcagctggaccaagaatgagtcaagactgccatttgtgttgaggcttagtattgcttctccccaggtttagacagaaggtagaagcaaatgtccgttcctgctgggatactctggctcctggagtccacaataatctcaaaactatct

SEQ ID NO: 153084 - DNA, 288 bp, Homo sapiens
ctggtcacctccctagggccaagtggccaagaactgcttccttcttccagctggggtggacactaagtcacagggctggaatcttgccttacgtcccgtgggcagggtgacagctggagagagacaaggcctgaggttggaagcacctactgctcagtattagccagaccacagcgggagtccctgccccagatcaggctctgccggaggctgcagggccgtgcgttccctgagcaggaccccagaagtcagtccagtccatgaggattagacccagagcctcaaatg

SEQ ID NO: 153085 - DNA, 365 bp, Homo sapiens
actaaggtctgcaaaccatttacaaagacagggccaattaaaagagcctgcaaatatgtcagtgccgcacttctcaaaatgtgttctttaacatctgccagatctctacttgttacaaacactctcacatgacaataattatacttttatttctaatatgaattgaatactaatagaaaataaggtggtaggccgggcgtggtggctcacgcctgtaatcccagcactttgggaggccgaggcaggcggatcacaaggttaggagatcgagaccatcctggctaacatggtgaaaccctgtctctactaaaaatgcaaaaaattagccgggtgtggtggcaggcgcctttagtcccatctactcc

SEQ ID NO: 153086 - DNA, 219 bp, Homo sapiens
tgttgaccaagatcacttacaaccccaccatctaccctccttaacctctacttctacctacgcctattttacaccaaccccgtgatcgtggggttttagaacccaatgatcactggatatacacttggagagaggaagcactgatgcccagaagtgggttccaaatgaggacccagtggtctctccttggccacagagcaggagtgtggtctcaagatg

SEQ ID NO: 153087 - DNA, 550 bp, Homo sapiens
aaaaagtctaagagtatttcaacttcatatgatgatgtcatacttaaagagtattaaatcacataacattttacaaacaggtttcatagatctttggttttgtatgaggtatttgctgaatttcattttgcaagtttcttccactacattgctgtatgaatatcttaatatttgtcaaatttatgtttcccttttttccatctctttttcagacaagaagcagtactgacatactttcttcctgttccccttaaatgaaattcaatttatgtatgggaggatcccatataaaaaactatggcatagaaatagtcaataactatagataaaaacctctcctgctactgtatcgtataacaaaattaaattgcaatgctgccaatctagttccttattaccttgaaaaagcttgggggaaaaaaagtatggcctactgtattattaaacttgtctcggctataaaaactgaacttgccaaaagacatgacattaataatacaatcttgaacaattataaaaaagttacagctccttgcagataaattctctt

SEQ ID NO: 153088 - DNA, 403 bp, Homo sapiens
tacgccggtcgcaagtccagttaggtatatagtttaagtagatgtcaatctaaacaaaaacattttagaatcagcctttaatgttgtcttagtaatttcagagcattcagccattgctttaccaccttagcatacttaacagtagaaagataaacttttattctcaattccacgtggtaatctttgtttccttttataaattacttataaaagtttaaaatggagaaatgtagtcagatatggaaaaaaatcataatatattgtaaatgaagttacaaatagaacacagacgtgagggacggggtgagaaaccaagagggctacaacatcagaccaatgaatcagttacctatatgaggatactggtgatttttagctgtattttctccaaaggggacaataa

SEQ ID NO: 153089 - DNA, 420 bp, Homo sapiens
cagaaaggtaattggtttgaggagggctgcatttggcacttggctttcctacccccagtctccctcttggtcagattgaccaggaatcacaatggggccatctgaaaaatatgtcctagagatacttgagtggaatatttaagagtggaatatgtaagctttttagacttagtaagtagatttactaaattcatatttatttatatgaagacataatgtcttcagtttcttttttaaaaaacagctgtattgagataaaatttacgtaccatagaattcacccatttaaggtgtgtgattcaatggtctttagtgtattcacaaataagtgcaattattgccagttaatctgagatcatttcatcacttcaaagggaaacgttatctgctcccccatagccccaaacagccatttatcta

SEQ ID NO: 153090 - DNA, 267 bp, Homo sapiens
agcggatgttgggggagggggggaggggggtttgctgcacgctctttattatccccgctcaggttcactgtgctggggaaagtgaatgactcctgactgtgttcgccctggtgatctttccctttttgggtcagatggttctcttcagtttaatgatcttccatctgctgaccagcctgctaagctctgaagaagaaatttcaactaacatcagaccaattctcatctgccactctcccccagtgcagcagggcctgcaatgacatg

SEQ ID NO: 153091 - DNA, 399 bp, Homo sapiens
atggaaatataatgagtaatcaccattaatatttactgcttattcgataaccttaggtccattccagtttgcgtaatattttttatagttataaatccaaactaatatactaccattcacaaaggttacgcgatgcacaggcccgtattctcttgtctttgtctctttcttgtataaaacacaggaaaattgaaatatgaaaatatacagaaaaatcttaggcagtatttatcaattttaagaaacaactatttacaggtttttcaataggcattacattaaaaatgaaatatatagttaataaatatgaaaactgtggatataatcaacacatttattttacttcttgaagtgttaacatgtgctgtctcaaatatcaacagtgtacacgtgagaaaa

SEQ ID NO: 153092 - DNA, 123 bp, Homo sapiens
cagcaaccgcatctgcagagcactccacccagcaaccgcagagcactccacccagcaaccgcagagcactccacccagcaaccgcatccgcagagcactccacccagcaaccgcatccgcaga

SEQ ID NO: 153093 - DNA, 571 bp, Homo sapiens
ccaatcactgtcaactcaatcgcctaatgattagggaaacattaagtttggctaatttggttttctgtggccatcatcacattcccagtgacaggccaatccccaccctgaatctaccctgcctgacagtgccagatgttttaatcatacggcttcattcattaatgtctatcagcatcgctggccgggtttgcagcaaatacctttatttgaaaccaaaactaattaaatactatcttagtaattaccttctgtagttacccttccctaagtgggccaatatgacaagggctgaaaaataaaggcttaaatgggactggagagggagggagcctcaccatcattgaattacatttcccctctgtgtgtttaataaatggtatgcttgtgcggggagccatccctcccatctaaactctgttcagaaaagtgtatcttagttttgccttactccaatcagtttatggaacatactgctttcttagatcatgatgttttaataagactactttacacacacacagcattcagaagatgtcactgaaacttctttaccaacataatcatcctt

SEQ ID NO: 153094 - DNA, 287 bp, Homo sapiens
gcacccgatcccagcagtcctttttattgtcgttttcaagctacacatctaacaccctcctacccccactcccccgggttgtaggtaagctgggcctggatggagtgaagatgcaggataaagccctcctggagcaccagtgagcaccccaaagcggccctccctgcctctgccccaggcctcccgccatgctgtccatcagctcggccttggccaccttgtcctgcctgtggatatctgagaggagtcggatttccctcatccactcatcccagcccctacactgt

SEQ ID NO: 153095 - DNA, 430 bp, Homo sapiens
tttatatgtaaccaagcccccttgtcagtactcacttctactgccaactgagctgaaaattgaaattctggttcagtctgtagagtcagactctgttcttctgttgtgttaactaattcattgctaaccttagctgcagtgttgtgcttactcaagagcatctcatactaaagactttaaatgtcatttacaatctctttattcctttccctcattgatcaaacttatccagagcaacaattatttccttctgggtgctaattttttcctccatttcatggcactttcaaacaaagcttgcaggcacactgcaatccttcattaactgaaaacatgcaaagtgcacaagcccttccaatggaaagtgcaatgcaaaagccaaatgaggtaaattgcattacttgaccggccctgggacagtttaaagagt

SEQ ID NO: 153096 - DNA, 526 bp, Homo sapiens
cgagaggcagagggctaggtctgtttcctgtgccttcagagagcagctctgggagcagagccaggtattccaatgcaaggagatattggatttaagttaaagcctttgataactgaagccttaggcaaatggaactggctgccccataagtagcacgtgagaggtggagctattagagggtggcctgtcatttggtgcagatgcagcagaagtgttgatgggagtgggtaggattcacaggactccagtggtcccttccaagtctgaggttctgtgaacatcctgcacttccaaaggacacaagtagtcatggtgtgcaccacagggtgtgaaaaaacacacaattacactggattatatgaggagccttggaatgtttccgttttcatttcaaattctttttcatttagtaatgcttgcctataaaaaggtaaacatttaaaaatagaaaagtctaagaataaattctctctcaacccaatataattatccagcccagtaggaagatgacaatcaaagacagaga

SEQ ID NO: 153097 - DNA, 411 bp, Homo sapiens
aacaaactggacctaaataagacattaatatgacacagcatccaataattgcaaaatatactctttcaagcagaaagagatcatttacaaaaattgaccatatgttgaaccctaaggcaagtctcacaaattttaaaaaaactgaaataatacacagtatattctctgaccacaatgtggattcctgaggttcaaaaagagctgggaggaaatcactttttccttttttgtttactgctatcccagcctccaggcaatacaacatttatggagcaacagctaaggctagacaggcacctaaaagccttgtctctgaccaaaggaaacagtcccaagagcatggaagaatcccagtgcagataggaagattaaaccaaaaattctgacaaactgctgaagactgaatgtagg

SEQ ID NO: 153098 - DNA, 191 bp, Homo sapiens
catccttggtcctagcagtgttgcagtgctgtgccttgtgtggctttcttgtttgtcttgctttgtgtttgtagagcttcttgaacctgtggatcaatgtgcttcagacagctttggaccaatccatggtcattagttttgtaaatactgcttctcccctgttttggtccattccagctgatacaacaaaa

SEQ ID NO: 153099 - DNA, 595 bp, Homo sapiens
gtgctgggccagatccttcagggatagtgccagcctgtgtgctcacaaaacaaccctggaaggcagacagtgtatccatttgacagatgaggaaactgagactcagggagtcctagctgcagaggcagagcttggatgggaatgcaggcctgagtcctgacctggacatcctcagcagtgtgtccagagcaccctcccctcagcgaaggagcagatggagtgtgtgtgtgtgtgtgtgtgtgtgtgtgtgtgtgtgtggcggggggggtgtccaatcaaagtcttaactaggtcaggcgtggtggctcacacctgtaatcctagcactttggaaggctgagatggaaggatcacttaagcccaggagttcaaggctgtggagagctagtattgtgccactgcattccacctgggtgaaagagcaagaccctctttctaaaaaaacaaaaaacgaaacaccaaccaaaaaaccccaatgtacttaactgcgttgctgaatcacagaaggggtatcctaattaggataccccattatgtgtgtatgtatatatgtagctgtttcagacttgcattttctcccaccacatatctaacg

SEQ ID NO: 153100 - DNA, 431 bp, Homo sapiens
gactattgctcctttttctctcctcttttttagaggaaagtttagaattttggttctgtattacaggggtaatctaaaaattttgacataggtattggtgtttataattgctttgtagtcaagtgtgatattaatactgatttatacaatatcactgtataaaaatatgtgttataaagtagcattattggggaggccgaggtgggtggatcacgaggtcaggagatagagaccatcctggctaacacggtgaaaccccatctctactaaaaatacaaaaaatcagccgggcgtggtggcgggcgcctgtagtcccagctgctggggaggctgaggtaggagaatggcgtgaacctgggaggaggagtttgcagtgagccaagatcgtgccactgcactccagcccaggcgacagagagagactccatctc

SEQ ID NO: 153101 - DNA, 636 bp, Homo sapiens
aaagatcctggaaggtgccagcaagtgaggttaggtttcccactgtagatgtaatggaaacatggtttccccaccaacttcgaggcttgagagcattcagaaaaagtttggtcaaccttgtaggggaaccagcccgctataccacccgcgggttctccccttcccagtggagacgagggaatgagaaaagaaataaagacaaacacacaaagttcaagagttaacaaaagtgggtccaggggtccatcgcaatgtggaaactgcgacagccctgagctctggattccactgatatttactgaataatccttaaagtccaactaattggttaacagaacaggacgtgaaagcagacagcccgtcagaccacaggcctgtgcatcaaaggagcggtccactccaagcaccatcagcagggcagcagagctctctgcctctgggaacgagcgagagatagaagactttccccttatcctcagaggacttctcctcttttacaagcaacctcctgctgttcccttctggggaatggagcaggggtcgcttcccttcccacaagacctttgttcagggactcaagtgggaggttgagcaataagcaagctttcttgcttagaggctccgcacacttcctgt

SEQ ID NO: 153102 - DNA, 484 bp, Homo sapiens
gtcatgaatcatttatgcaacaactggcaatgcaacggattgatttacagacttctgggtgtaggaggagcaccacacatctatggaccatcccctttcccactctcgcctctggtggcagcagatgcaccctggtccccaagagctcactggggaaggcaagtgttagagaggatgtagtgggatgagctcagggccaaacagcatttagagaaccattacaagccagccttggtcaggtagtcaaacttacttccaggatgtctggcaaagagccatcagttgctgctctagaaagtccacaacatggcctaatccagtagttgttatttaagggaaaacaggggcactggggagcagccagatcacatccttgctttttgcacatttggcagaatgtttaaagggagtgggggctattacacttctccctgtggaaatatgccatatccttgttaagttgaagacagccttgtctgtaaag

SEQ ID NO: 153103 - DNA, 393 bp, Homo sapiens
taaaacaaaactatgtgagatggtgacacatcctatagggaaaacaggcagataaggatgaattccagtgcaagaagggaggtgttgcactttatttttatttttagtacagtggccagggaaggcctcatttaataaggccatgattttgcataatgaagacctaaagtcaaagtgaaagcctgtcatgtagatagggattaggcttagtctgactttaaggagtaaaacagtagagaacatggagttgaagcagcaaggaaacaacccaacagttaagtgtagctgccatcttggcaaacagggagttccccttcataccaagggtaagctggaattcaggttagaagaaatttggaagtagggctacacacacatatttatctatggatt

SEQ ID NO: 153104 - DNA, 289 bp, Homo sapiens
ttaatcttctctgtaagcctccagtctagccaacttaaatctagcttgagttttcccctcaagtatgttcatgtaccattccctttgcctaaaatattctatccttagctacctaagccttttccatacttcagtgttggagcaaatccctccccttgtataaagctttttttgtgtgatcactacaactttgggtaagaacttcctactcctcccaaagtacttgctagcttgtttctctttccacatttgtacacttacagttttttttgctctctaaaggcacccc

SEQ ID NO: 153105 - DNA, 236 bp, Homo sapiens
ttcagaaccacaagaaatatatctgaaatgcaattcaaggctaatgtaacaacaaggttacaaatctgagcatatatgtcagaacagaaaagttacagttctcatggtaacattatatcatcagcattatactgcctgcacaataaaatacgtatttagaaacctaactggtaatttaaaataccacatgttatatatattaaatgaggataagttaacattcctaggagagcctt

SEQ ID NO: 153106 - DNA, 310 bp, Homo sapiens
cagtaataacaagcaaaataaacagtcaaaccttaacatgtccctcctcccttaggacctcagctttaccttgtagtttaagaattagtcactcatttggactggggcaagtccctatggattcagagagtttgcaatcaactaatgggttatggcattattgttagtggatgataccccacaggaggctggactattgcatcagtcagggtaaagacatacttgctatgtgtgtgacaaacaaaagcctacccaaggtggttcctcagagaactctgaatgaaagacatgcagtgcttgcttgttccac

SEQ ID NO: 153107 - DNA, 589 bp, Homo sapiens
ctggcatttactaatacaaagaagggtttctatctataagataatttaataggatctttctgcacagattaagttgattaccataaataaactagaactgatgtattcaaggggcatggctgtttgaagaacagaaggtagccacatgaatgtgttctatttagtaattaacagtatgtaaaatgaaagaatacctaaaccaaaatggctccacttaatcaactgttttgttggtagattacctagacccagatcctctatcactatcttctcaggagtcctaagcatattaatgcactgctcttgagtttttagaatttgttcagagtgtttaaaactacatacatgtaacatctgttttatacaagatacttcaaaaaccaaagtgattactataatacattctattaaacctaaaccaacatgtgttcaaatgcagagaacaaaaaggaatgttttgtcagatgttgcatctgatggattgaaagagttctataaaatagctcctctatagcttgtgctttctgtatttttgagtctttaggaaagtttaatgctggggaatatctgtgatgtgtgtgtgtgccta

SEQ ID NO: 153108 - DNA, 449 bp, Homo sapiens
gctcccaaatcccgaccatcacacacacacacacacacacacacacacgtgtgcacgcaaattaggaaacatgaaacgaaccatttgctgattggaagaaaagtgttgtcagcagcagatgaaacaaaccgaagcagaaaggaagggggaagagaagacactgttagttattaagcccagtagacatacaaagaggacaatgctaatccatggtaagtttgtacagtgttgaatcgttttgtgcccctcaaaggaggtgtctggcaactaacatctcaaggtgagtttttcttttatttaaatataaaatgtggcttttgtacttttgaattttgaacatgactaatacatacaaagtatattaaaattaaaagacagatgtttgttgctatatacaattatatttccaagtacagaatagtttgcctttatataatccctttttacaa

SEQ ID NO: 153109 - DNA, 625 bp, Homo sapiens
tattctctaattcatagtaccccccccttttgttctcctttctcctttttgcctttgttagatgcccaggcacgccacggtagcaagcgttatcagtaccagctcacattcctttccttatttgaaaagaggactaactttctagctcattacagacaccccttccccttcctctccactttctcttacatgcccaccctatctaaaaagaaaaaaaggaaatgtttagccaaccggaattagattgtacgacccgaccccggccaatggggaaagggtacaggggcaggacttgcgtcaggaataaaggccctcgtgcccctttgttcaggtgtgctctcatggcaactggccaaggaggtacccctctgcgcagaagaagtcctattcataccccaaaaggtcagcttagggttccaaggtacacttaggacatctctgcctcatttcctttgagatttttatctcctttcccctgcttcctgttatctgcagaagttggcgtatcaacaggtcaagtggggttatatgcagaacgaaatatatacggtttgcataaacacagtccttaattccccctgcaaacactttaaagtccctgagaggagtctgggaaagcctggag

SEQ ID NO: 153110 - DNA, 465 bp, Homo sapiens
ctcctgctctctgggaatgcacactggtatggtcggaagtggatacaagcccttgccctcattacccacatcttacgtgtcagtaaatgctctcagctctgtctccaaattacaccccaacccattacatctctatcttctgtccactgtgctagtcctggccactatcactaccaccaaccatatcatgtgtccactctgtaagccattactcactcagcaaccagaatcatcttttaggtcacgtccctgcttaaaatgttttggtggcttcctgttccacataggatagaaccctgactgcttatcacaactgggagagcctgccttcctcttcagcctgtgtcttgctatgctgttacggctcgggatgatgtagcctcctggcccctcttgctattcctcacatccatcaaactcactcccacttaagactttcacgcatgcttttccctccacaggtga

SEQ ID NO: 153111 - DNA, 405 bp, Homo sapiens
gaaggtggacggggagtgctggattggtttacgctccctgtgagcaatgtgaaggcagacggggagtgctggattggtttacgctccctgtgagcaatgtgaaggctgacggggagtgctggattggtttacgctccctgtgagccacgtgaaggtggacggggagtgctgggttggtttacgctccctgtgagcaatgtgaaggcagacggggagtgctggattggtttacactccctgtgagccacgtgaaggtggacggggagtgctgggttggtttacactccctctgagcaatgcgaaggtggacggggagggctgggttgatttacattccctgcgaacaatgtgaaggtggacgaggagtgctgggttggtttacactccctgtgagccacgcgaagg

SEQ ID NO: 153112 - DNA, 407 bp, Homo sapiens
cacatggtattttattttccattcctgagttacttcacttaggataattgccccccgttctatccaagttgcacaaaagacactattttgttctttttaatgcctgagtagtagtattccattatatatctatatctggatcatctatctgtccctctctctatctatctatccatatatatctcacattttctttatccactcatggatgggtatttaggttgattctgtatctttgcaattgtgaattgggccgtgataaacatatgagtgtaggtgtcttttttatataatgacttcttttcctttggatagatacccagtagtgggttgtttggatctatgtatttaataaatagaacaattgagtatttcttttggcctagagcataaaatagttgctgaga

SEQ ID NO: 153113 - DNA, 777 bp, Homo sapiens
ttctatacaaccattttattctattcaggcctacagtggattggagggagcaagcttctacattcactctgccaattcaaatgtcaatctcatcagaaacaccctcacagatacatccagaaacaatgttaaatcaaatatctgaccaccccattgcctagtcgtgttgacacattaaaattaaccatcaaaatagatgcagaagagtttcctggcctagaatccttagatctgcatgttcatgagaaagattatattagctcagctaatggtcattagaattaagagtatagatttttagtagccaaacttgaaataaacaaatatgtaaaccaaaaggccaattagttaattcccactagttgctcctatttattttatttgttatgtattcaacaatttccctatgaaataattattgatgacagaaacataagtataaaattttaaaattaaaaaatatacacatatagaacagtgagatactcaaaagacatcttcaaagctctgtgtgtatgaatggagcaaataaataggtaggcaagccaggcacagtggctcacatctgtaaccccagcactttgggaggttgaggtgcaaatcagttgcggtcagaagtttgagaccagcctgaccaacatggaaaaaccccatctctgctaaaaatataaacaacaaaaaaaaattagccggatgtagtggcacatgtctgtagtcccagctactcgagaggctgaggcaggagaatctcttgaacgtgggaggtggcagttgcag

SEQ ID NO: 153114 - DNA, 484 bp, Homo sapiens
  misc_feature (127)..(127): n is a, c, g, or t
  misc_feature (459)..(459): n is a, c, g, or t
  misc_feature (466)..(466): n is a, c, g, or t
caactgcattgttttaagccactgcatttgtggcaatttgtcacagcagccataggaaactgacagagcaaccaatttcaatgtttagaaagaggcacaaacaaaacacatctgtgagctcaatccnacctaaggaccacttttctagtccagactgggcagagtcaagggcaaggactatttcctgggtgcccagcacggagcctagcacacagcagctctctgacattcaccccaagttaacgcaaggtcccttacctttaccacatggtcataaaattatccagggatttctggaaaatagagctgcttaactgaaaggagttctattcccaagagactgtttaatcacatagacattacccagaggccttgggaaactggcctggagtagaggagggaacatccattctcactgcaaacagaaaaaagtgagggctcttcaggtcctctggaagnaaacctnccaaacctctccctccca

SEQ ID NO: 153115 - DNA, 198 bp, Homo sapiens
gattatggagattcttaaatgtcagactaaagattttatatatgatttttagttaagaagaaactctctttatggataataatttgtgaacaggtccaatggaagagtggaagcctgtaatctcagcccctggggaggctgaggcagggagaattgcttgagcccaggaggcagaagctgcagtgagctgagattgca

SEQ ID NO: 153116 - DNA, 729 bp, Homo sapiens
tccccaacggagaagcttgctctgttccctgacccctggtaggggtggagcccagccttaaagacccaggcaagctgaacaccaggcctggaaaggtgatcttcttctcagagtctggctgccaaggcagtggcagggaggtctggggagacatcgttgatgcctcaggctgggcccccgtagcctccataagggtagttcgaggctgctgggtgctgtacgaagagccagagttccggggtcagaagctggtcctgcctgaaggagacatggaactcagaaccccagggacaaagtggagtccccaaggcatcggctccctaaggagggttgtctgggactacagcaccccggaaatcagcctcttctctgaggagggcctcaagggggagcaagtgaagctaacagaggccttgaagaattcccagggtctggagaagcccctgcaggtggcatctgccaccgtctctgcaggactatggctactgtaccccaaaccattattcgaagacactccctacatcctggaacctggagagtaccccacctcagaggcctggggcacatcggaccccagcgtgggctccctgaagcccatgagattgggctgccaagtgtggagaagccaggggagcccaggctgtggtgtatgaggcccaggctttcagggccgcagctggaagtgagccgagaatctacaacttcagagcagaggacagcagagcccca

SEQ ID NO: 153117 - DNA, 149 bp, Homo sapiens
tccctggactgtttgacagtagcccttcaattctgcaggccttgggtcaggcaggatcctggagacagggctgccttatctgggctcgaggcaggagtttgtgtggggagcagaggtgtcccatctgtagcactggcagcaggcaccag

SEQ ID NO: 153118 - DNA, 504 bp, Homo sapiens
gaaaaataacgcagagagctagggtaaaaagaaagaagagtaaaagcactattttattaaggcaatagataaatttagtgggattttgattcagtaggcctggggcggtgtccaggaaacttcatttttaactatcagcccataggattctgatgcaggtggcctgggaagaccttttagaaacttagcagtagatactgttaagaataacaagcaaaaggccaggcgtggtggctcacgcctgtaatcccagcacttttgggggccgaggtgggcagatcatgaggtcaggatatcgacaccatgctggctaacacagtgaaaccccgtctctaccaaaaattcaaaaaatttagccaggcacggtggcgggtgcctgtagtcccagctactcgggaggctgaggcaggagaatggcgtgaacctgggaggtggagcttgcagtgagccgagatcgcgccactgcactccagcctgggcaacacagtgagactctgtctcaaa

SEQ ID NO: 153119 - DNA, 271 bp, Homo sapiens
ctaaaatttaaaatatccaagtctacatattgaaaggacacacactgtgtcagagaaaactgataaggaatggacaagcaaaagtattgtcacaaaaagagaagaaaattaggctagcttcagacttcaactctagaacagaatggatcatcatttttaaagttctcaaggcagggaaattaaattttatttgagtgaagtgggaagccaatcgtagggcgttttttgttttttttttcttttttggggagacaaagacttgggccccccc

SEQ ID NO: 153120 - DNA, 723 bp, Homo sapiens
acagataaaaaataaatttggagaagctgaatgttttctctaaggacacacagcaagttagtgggaggctgcttcctgcaactgaaggtcattcctctttgttagaagactaagggtccctgacctgatctgtggagcaccagggtggagagagtggaataagcagcaaaacgaaaaattggatgctgttttcaaaagttttgttctcattcttggattatagattatctaaagggaaaatttaactcaaccaaaaaattcgttcagctccatgaagctaaagatgctataaactgactctttcctaaagagcaccaaacctgaaatttttcctgctagagaggaactaatcttcaaggacacctgtctattgctagacattaagaaggaaggtgaactccgttctgtcttcataaaacacatttttgtctttccccctcactcctccactgaacccactatgtttacaagtacaagctatgactgtggaggtggaaaatctgatactgtcagcacaagtggaacaaaatgaaaagagaaaaaaatctacacacccatctggacttccatatgctctgtagcccagaggctaatataattccttgaatgttggttataaagcaatgtgatatggatgactgctatgcactgagcttatttagacaagtgttctttctactcaataaacctttgaaaggattaaagtacaatcactcccaatta

SEQ ID NO: 153121 - DNA, 329 bp, Homo sapiens
  misc_feature (12)..(12): n is a, c, g, or t
  misc_feature (22)..(22): n is a, c, g, or t
caggagccccgnaacaggacangcaagaggtaagcaccatataaggacacctgtgtgccagtggctggcccatggggtagggaggagcgatgaaggagcagcccctcggggccatcatggtgacatgaccttcacgtgcactcccgtggcctcccactgacctccgaatgtccagtgatgggggtggaggcagaggaagccccagcccaggggcctgtgcaccactttccaagatcacgggactcgcgcatttgagatgagcgacttggccggcgtgtgtgtggacctgcctgccgagcaccccggtggcagctgtgcccagttgcgcc

SEQ ID NO: 153122 - DNA, 256 bp, Homo sapiens
acccatgtggttcaagggtcaactgtgtatcactttgataggctatttataagagaagattttaaaaatattgctccatgtctgtacttgaataagatttagaaaatcttaggggtattttagaaccagataaattagtaaaaataatgatactgtaaattggaaaataaatgaataatagtagggcatctttctccatgaacctgaattgctttgctttcctctcttttgatgtctgtaagctgttgcgttttgt

SEQ ID NO: 153123 - DNA, 464 bp, Homo sapiens
ggctcccaccgtctataggcccatgctcagcagggtcagaagtagagaagggctctggagccctggggagctgattggaatcccaggtgtggctctcatgtgtgacccctgggcaagtcacttcctctcagagcttcagtttctctcatttgtaaaatggagatactgacatccactccagaaggttctgtggaggactggcgatgagaagagtgtgcctaggtcagtgctgcacccgataaaggcacccgcatcgcctgctcgcccccacccccactgcctctggctcctatgcccccctcgctgctcccaggacttcagggcacctgggtgagtaggacttgaggagtgaccttggctggtaaggacttgctgccaggcctgccctgggatgccctttgtgcccgctgagaagagaacgccacctgggccagctgtcaggtgtgtctgctcaggctggggcc

SEQ ID NO: 153124 - DNA, 287 bp, Homo sapiens
cgcctggcccctaaaagtatttttttaatatataattcacacagtactgggaaggtaagtatgttaggaaaacactgtcatccatttccacaccaaacagaaatagctgttcagtgatccacttccaggattggacctacagtgaggtagaaaaatcagtaacacccattctgtcctattttgttcatcacggatttcttgacattaatttttattttgtaaaatattacactgaaacatgattatggccgggcacagtggctcacacctgtaattccagtgttttg

SEQ ID NO: 153125 - DNA, 308 bp, Homo sapiens
tgccctcctagtccaccaaaactgctcttgtctaggccactaaagactttcatgttgcaaagtccaacggtccagcctcaggtctctgcttactcaaactttctgcagcatttgttcatttaatccttgaaacactttctgctctttgattcagcctatttgaaccaaagcgcagctgctcatcctggcattcgcaaacagaagtaatcaccaaagaaacttctctcggccgggcgtcgtggctcatgcctgtaatccccactttgggaggccaaggcgggtggatcacctgaggtcaggagttcaag

SEQ ID NO: 153126 - DNA, 258 bp, Homo sapiens
cctttagttgatcatacattcatcatgaaaaaagtatgcctacagacatacaaataaatacgtttcttataagtaataaagatcaaaatttgaccttcagccagtagatggagaagtttattcacaatgctattaaaagtctctgttatttgcagaagcatggagtaaaattgctgctgattcaggtattcgaggattgttttcatggttattttctggctgctctgcaaaaaacagctcttagagttactctctggc

SEQ ID NO: 153127 - DNA, 197 bp, Homo sapiens
ctcctcaaagttggctcttgtgtccttttaagatgacaccactggtcttgcttatagcataagttctgagctttaaaatcttataaatgcctgtcccacacttggaatcaactatttctctaaggagtcctggttctttttcattagaaattgtctttaaaggctgggcatggtagctcacacctgtaatcccaaca

SEQ ID NO: 153128 - DNA, 544 bp, Homo sapiens
aagcagatccctgaatatacacctagcatgtttctcatagtgagaatgaccttaggaagccgacctgggagattcatgacctcttgagatcaatgaccttggactccacattaacccacaacttctcccagtcattagtccacaggaagcccatatcccttgctcacaatttacttacttgttgagattttttctcataacatggaaaaataatcttctgaaggcatttcccttaatgaagcccacatgtctgatacagatttctttcccaaggtcctggagtgtttggttatgttttaacacatctttgcccttgagatccccgcatatcaggcatgtgattgctaatattttacttattaactggtaagcacgttgtaaaccataatcgcaatactgtcttccccagcctggtgtttatatcctaaaagtaacagcctcttaggagaaggctcttactgccattatcctaaggtgtcatatttctgaatgtgtccaaatgtcacatatccaaagtgtcacatctcatttatgactctcatta

SEQ ID NO: 153129 - DNA, 141 bp, Homo sapiens
aatgtcgattcactggctagggcagatggggaggtcattgtaagaagagaccacagagactagacaatgacaggccctggggagtcatggtaaactcgagagtggcgagagcagtgtgtttgtggaaagcaagtttagatg

SEQ ID NO: 153130 - DNA, 287 bp, Homo sapiens
tttaaactgtacgtgctggaatttaactgcctccaacagttctttttccctttgccaagacagccatcaatactcctatcacggctgctcctttggttggagtaagaatgatgcagagcctctagaaaacccatgctctttttgaccactttgaggttattggttactacagcataacctagcttattctgtctgatagtgcttgaagattcaccacctgaaaatctatgtttcaaaagaaacagactagtctgaaatccctcttttaaaaacatttaaataaaact

SEQ ID NO: 153131 - DNA, 524 bp, Homo sapiens
attcgattctcctcagctcttcttgatccagcctctgtttatccattttgtacagaaacattgtagtggctgttgagagaaaggagcatcccttttagccagggcttggggagctccttagaggaacaggcatttgagagaggctttcaatgatgagcatgttggggatgtggggctggtgataggcaggacagttagggacatccttccagaagacatcctggggaaagacatagaggggggaagtcaccaggctgacttggtaggattctgcacactgctcatttgggttgcaccaagagctttagttggaattactgggttgcaccaaagagttttagctggaaatattggatgggaggattcctacatattttgttgggggaagggtcgtctagtgctgttggatttcttttctagtttttctttttttgagacagggtcttgctctgttgaccaggctggagtgtagtggcaccatcatggctcactgcagcctcaaccttttggactcaactggtcat

SEQ ID NO: 153132 - DNA, 658 bp, Homo sapiens
tgctgaggaagggctggtgacaggaagaggggtggtgtcccctgtggataatgaggaagcatcggtgacatgaagagcggtggcgtgacctgtggatactgaggaagcgtcggtgacaagaagagaggtggcgtgacctgtggatactgaggaagcgtcggtgacaagaagaggggtggcgtgacctgtggatgctgaggaagggctagtgacaggaagaggcgtggtgtcacctgtggatactgaggaaaggctggtgacaggaagaggggtgtcctgacctgtggatgctgaggaagtatcggtgacaggaagcggcgtggtgtcaccagtggatgctgaggaaaggctggtgacaggaagaggggtggcctgtcctgtagatactgaggaagtgtcggtgaccggaagaggggtggcatgacctgtggacactgaggaagcgtcggtgacaggaagaggggtggcgtgacctgtggacactgaggaagcgtcggtgacaggaagagaggtggcgtgacctgtgacactgagaaggtgatgtgacatgaagaggggtggtgtacctgtagatgctgagaagggctagtgaccggaagagcgtgttcacctgtggatgctgaggaaaggctggtgtccggaagaacccgcgactagg

SEQ ID NO: 153133 - DNA, 352 bp, Homo sapiens
tgctgaggaagggctggtgacaggaagaggggtggtgtcccctgtggataatgaggaagcatcggtgacatgaagagcggtggcgtgacctgtggatactgaggaagcgtcggtgacaagaagagaggtggcgtgacctgtggatactgaggaagcgtcggtgacaagaagaggggtggcgtgacctgtggatgctgaggaagggctagtgacaggaagaggcgtggtgtcacctgtggatactgaggaaaggctggtgacaggaagaggggtgtcctgacctgtggatgctgaggaagtatcggtgacaggaagcgggtcgacgcggccgcgaatttagtagtagtcgacc

SEQ ID NO: 153134 - DNA, 607 bp, Homo sapiens
  misc_feature (446)..(446): n is a, c, g, or t
aaagactagccgggtagagaagcttctgttttgagatggtgcttaacagggaccagggatgagaggcatggtggcaaccacaaggtggccaagacaatttgtctccagttggatgggatgtctgcctggacacagtctgtgcttgcattggttgcaattctgagagtcatctctgatggatggacatagataccttggccttggacaatttgtgctgactgtggagcatctgtgggtcctgtggctggcagtggaggcggtaaggagatgactagcagtgagctaccctaaggcccccttgtctaccgcctctcgtctcaaagtcctcatcctcctgtacacatgactgcatggacagccagtaggtgcaagcagtccttttggtacgcttcacaggacccacagttaaaaacacaaaactagtcatcatgatagtggtcgtttgnccagagaattctctagaaatcacatcccccctccaaatttatatttccacttccacacttcctttaaatctgaatatatatgaatccactgagtgggtgctcacaccttaatcccatactttgaagctgagtggtgataactgagccagagatcactgagc

SEQ ID NO: 153135 - DNA, 517 bp, Homo sapiens
tgccaacagacattctgagaacaggaacagcaaaaaatgtctgtgattaaagatgtgtatgatgtgagcttttgatgtttccaagtcctgcaggggaaaaaaacctgtctaaccttgatccaaatctagctttttcacaaaatacctattaaaagcgtcactccaaggcgtacagcttagaaaatgctgctctgtatttctcatcccctaatcagtttgcctacgccaagtcctctagggagcagcacatttctggcacttgacggatgggccaggtggtcaacacctggagagcatctctgtgccccacagggcccagcccactgcaggtgttcaggctgtttgaatgaacccaacaagaccgaaacattctgtacatttcattgttcaagtggtatctgagttttagtcctaggaagggcaggacatggaatggagggatgggggaggaaagcctgcccatgcaacttactccttgcaaatggaccaagcctgtcctatcttttcttttcttctc

SEQ ID NO: 153136 - DNA, 417 bp, Homo sapiens
gtggagaggtaaggcctggtgagagctaaggggctgttcttttactacctgctcgtgcctggtgtctacctcccagtcctgatctctcacagttcaaaggccctgatcctcatgggctgaggagagatgagaggtttaggggaacataagagcgttggaaaggtgcgtccacagacgaaagctgcaggcatcagagaggaaggttgcctagaaggttgatcccctaagtgccttgctgatgacctgtctgggccctgcctttggcttctacaatacaatgtcagcaggaggcggggaagggataaaaccaagcagtaataatacaacacagacctcaagcactaggagcagagcaactataacctttctaaggagaagtccagccgtgtatgaatgcacccacacatacatgcccat

SEQ ID NO: 153137 - DNA, 315 bp, Homo sapiens
tcaatatactcaaagccagcattccttttccttttgaaactgcctgttctttataactacccaattttagcatgttttctagacttaatcacacgacatgttggactcaactttgacttaattttcagattacaagctgttgatgtttcccatatcattggttccctatcctttacattcacgctgaattgtatagttcccaggattatactcagaaaagtgcacattgccaaataggaaaatgatactgtatggataaacttgatgtgcttttaatggacaaaagctaaattataaacatctttttactgctgc

SEQ ID NO: 153138 - DNA, 288 bp, Homo sapiens
ctatgtgggggagctctcagagggtcaatcgcagaaattgctcagccccactcctccatctcttccagagaaactcgctcaaccacctgccacaagcaggtggcgagaatgtggccgctgatggggaggggtggacggagggccccatgctctgggggacttcacggcagtttccaggaatgagcttcataagaatgaccttaaatagatatttccctcctagtttcttcttcttcttttttttttttttttgattaaacagcttcattgagttgtggattcaacgtt

SEQ ID NO: 153139 - DNA, 257 bp, Homo sapiens
ttaagataaagatagtaagccctacaactaccactaagaaaataacccaagaaaaatagttttaaaaatcataaaggccaggccagtgagccaaacacctgtagttcccagcactttgggagactaaagcaggaggatagcttgagcccaggagtttgacaccagcctgggcaacatacccagtcactataaacaataaaaaacttaggcatgatggcatatggctgtagtccctgctgcttgcgaggctgagcggg

SEQ ID NO: 153140 - DNA, 419 bp, Homo sapiens
cgtctgtaatctcagctactcgggagactgaggcaggagaattgcttgaacccgggaggtggagtttgcagtgagttgagattgcaccgctgtattccaacctggacaacagtgccaaaccctgtctcaaaagaaaaaaataataataatataaagtggccaggtgtgttgactcatgcctgtaatcccaccactttgggtcgaggcaggaggatcactggagcccaggagtttgaaacgagcctaggcaacagagtgagaccctgtctctatattaaacacacacacacacacacacacacacacacacacacacacacacaaaggcagccagactatgcactaggaactgccctgggaatccctttgtgttctcacaacaatcccatttcacagatgaagaaacctaggcacagaaa

SEQ ID NO: 153141 - DNA, 199 bp, Homo sapiens
caatactatgattatggtttgattgtctgtaaagctagtgtcatatttaataggaacacatgagagacatttccactgacatcaggaactagccaaggatgttcactctttccacattgtattagaggtacagtgcaattagaagcataagaaaggataaaaaagtgaaatgtttaaatgtcagtacctttcacatata

SEQ ID NO: 153142 - DNA, 728 bp, Homo sapiens
tatgaaccagaaagtgggcccttaccagacactgaatctgctggcacctggacactggacttcccagcatccagaaccatgagaaatgaaactctgttgtttataagccactcagtttacggtatcttgttgtagctgcccaaatgggctaagacagtggggcattctttattctacatattagtgaataataccactttacatttggatcacacactacagtctaaaacactcgtgagtgaatctggaaatctgtaactaaatttgtaaatttcacacagtaggctaggaagagcagctaccatcattcccattttagagataaggaaaaactgaggtttagaaaggtaatgggagtatgtggaactggaacaaaagccccgagttctggctttttcaaggccctgtgaacagagcgcctgctgacaagcagcactggccatgtggcacgattagaaacagaccttcattatctgtccatcatataacctagcttttcccaacacataatttcctttttaaaaatgccgtggtgaagataagggtaatgcatatttagtataagcaacttcaaaaatacaaaaaggtatgaagaaaacgagctgagatctcattggatttataaattaatactttgctctttttacttaacaggatatcccattaagaattctttcaaaatattcataatagccagcaatatcacatcatgtggctgaaccacaatg

SEQ ID NO: 153143 - DNA, 134 bp, Homo sapiens
tattgtttcttttaggactcctcttattgcaaataacagaaaaaaatgaactaattccatcaggtttcatcaaggaagaagatttatggactcaggtcagcaaccttcaagggtagttggtcctgtgactgaac

SEQ ID NO: 153144 - DNA, 330 bp, Homo sapiens
acttggatgaaaaaaaaaataagacatagaaccaaatctccacgtatcggcttaaagacttcagtgaggaatacatttgaagtgaatcccttggtaaaaccaggacagagagatggacgggggttgaaacattgctgatgatgggtgccactgcaaacataaccctgaattaccttccatgtgtgccaactttaggagcactgcatgtaaacacccccatttctgaagaggtcattttctattactgacacacttgaacaagtattctaaagccaactcttactgtagaataattatctgagtctgggaatgggatgtggggcatcagta

SEQ ID NO: 153145 - DNA, 561 bp, Homo sapiens
agaattgagtgagggtgtaggatgagtgtggctgtagtgggaattcgaggagatggttagggaatttgtgctggtgttgcagtttgatttgtagcaagaaaacttggtacaaagaggttgtgaccctgtgtgaccccgagggagaatttggatttgtgctagatgaaagggccattacagtgaggaacttggccttcaatctgaaggcacatgaaaggctctgatgtgtctggtcatgtttgttcctgcaagaatttaaaacaaaggaagctgggaggcaaacaatgcttctgctttataattccagttccaaacctcagagggggagctgtaaagggtgaccctgtctacggcaccaccccgcgttccagtgtattggaagtggatggtctctgttttgcatgagaaagtgacctggtctccttccttgtcatgtttcagttgaaacagagttcctcaaaattggaaatgcacacacacatacacacagacttttgcccactttggaatagaaattaattgcactcggaaaataaattgcagagcatggctgagtacaga

SEQ ID NO: 153146 - DNA, 546 bp, Homo sapiens
actcccactatccttctcttctaactcaccaagattttgaatccatggagccctaatttttcttccaatccattatttctcttatatacccttacttcctctctatcacttgaaatatccctatcttcttaatctctactgccgctacctgcaaccaactgtcttctctcccggcttacctgaacagataagcgctattggaggaaaatctcacaaccaccagatcaaccctactctgagtttatggtctccacattcagcactgctgagcaattcctctctctccctctctctcttgctctttctttcccatggctcactgcagcatcagcctcctgagctcaagggatcctcccacctcagtctcccaagtggctgggactacaggtgcgtaccaccatgccaggcttttgttttgttttgttttttggtagagacggtgtttcaccatgttgcccaggctggtcttgaactcctgagctcaagcagttcacctgcgtcagtctcccagtgtaccgggattacatatgtgagccactgcaccca

SEQ ID NO: 153147 - DNA, 535 bp, Homo sapiens
ttgatgcgaagtgtcacaattatatacctcactgcagtggtgaactcctgggctcaagcaatcctcctgcctcagcctcccacgtagctgggtcacctgggcctgggacaggacaggctgctttctgcaggagggaggaagggggacccactgagggacaggtcttcttgtgttcccagaggccagcaggggggcttgaccccagagacacgcctatccatgagtacccaaaggggatcctgagttgggggctggaagaaggccagtctctccaccaagggaaaggggctgagggaccctgccctttgctgcctttctaagaagcccccaaatgccccccgcttccagcacccaggccctgtgcacagccgcagcctgagtcatcattctcatttgaatggtggccgagaaatcagccagggggctgcccagggctgagggccaaggctaggaaaaacaaggctgttctgttacctccaagctttggaacgtcaagcccggctagggagtggggggcagagggcaggcagaagca

SEQ ID NO: 153148 - DNA, 518 bp, Homo sapiens
cattctgtcttcactgctttctcagcttccccttcccccatctgcatccctatgggtgtgatccttgggccaagaaaaacagctggaaaagtccacagatggtggtgggagaaacagtccttgagtgctggggcccccgctggcctttggtctgtgatggtttctcctgtgggagctacagagcaggatctggccccagggagccagaaatgtcctagaccagatagtgtaacagcattagttaccaaattgccagagattataatgattggacattgatttgcatgtaatttagcatatattttgcacatgagtactaaggaacacattctggttcctgagctgctcctgtttttccaggtccatctctttccaggcaggttcttcacaattaccaactggctaccttcatccctgggctggaaacaagggttctgccaatgggatgccttctttttgagacggagtctcgctctgtcgcccaggccggactgcggactgcagtggcgcaatctcgg

SEQ ID NO: 153149 - DNA, 308 bp, Homo sapiens
ttaaagtcagaatgtcaaatgggaagactatgcttatctgggtcttatgaacagaaaaatacagctgggtctttaagaatactttctgctagggttttctacgggtttttagattttactatttgaccgtctctgtgctccttttcaaggctctgccaaagtgagtgaacaggaacactgtacctttattgtggctggagagctccaagaaacttctactagagatgggtccaaaacagctcactgccctgaaacaggagatgtgtagatctaaacccacctttcatctggagactcacaggcctacg

SEQ ID NO: 153150 - DNA, 244 bp, Homo sapiens
tggatactttgtcttttgatgcacatagtctgttttcatcgctaatttattcctttaatagattcagtactttctccctgtgtgtaaatgataaaagtatttaccttgaccataacagctcctgtgtcacccctagggctcactccaggtgggctccaatggaaacaggtttaaggactatggcagaaactgccaattttcctcagcatcctttttctcctttatccttttagtcattgacact

SEQ ID NO: 153151 - DNA, 501 bp, Homo sapiens
gttctttgtgttctgtatatattttagatattaactccttattaattgtatggttcacatatattttcttccattctatagattgtctcttcactctattgtttcttttgctgtacagaagtgctttttagtttgatataattccatttatctatttttactttttgttgtctgtgctttctgtttgcatttgcctgatatatctttatgtatctgtgtattttccttcacttttaacctttgcctagaaattgctaaggtgcaagtattataagcaacacaaaattacattttgtttcctagactgggctaaaagtcatgtatttctagacaaagtacagaatgatctcactgttactgggagaaaaatacacatttgttctcattttatgctgttttttacacttctttttagaaaacatttctctttgtttctttattgtctcatttcctattgaaatcacctttgcaaaaattatgacagtgagagaaatctgacag

SEQ ID NO: 153152 - DNA, 317 bp, Homo sapiens
tgccatttactccatggcccgccttacatccccacaacacagatatgacacagattatttataagccgtttttattcacatacaaccctaatgtttttttttcttgtcaccaatgggaagagataccctggatgtgaggcgggccctgagatggaggttagcatgcaggatgtttgttaggtgtggttattagaatcaagagaagtgaaagaacagaaaagcaggagtgggtacagggaggagttgagtgaggctacagtgcctgtgacagcctctgtgtactccatggagagccattgcgaggtgggatggctctt

SEQ ID NO: 153153 - DNA, 310 bp, Homo sapiens
tgagagaggatccgggtgctttaggaatgattaatagacacagacaaaaaaaggaaaataaaatgggcagaaagaaacattaattttgcatgtacttgagcaatcacagtggaaaggggcaagaggttaagaaaacactccaatatcctccgtctccctacattgttttcagtatccaggataaatcagattatatcaaaatataaagtgctcttagctatcctataccaacccctgttttatacttgacatcaaggttctacttacctaaagaactggcttgacttcctacagcaaagggataaagcag

SEQ ID NO: 153154 - DNA, 244 bp, Homo sapiens
tttcttgtaaatactacaactctgtgtatgatttcatttgataaaagatctataatcaaatagtttaaaaaccacagacctctacatagcacctaacactgaccatacagtagatgtaaaacttggtattacattaaaggatggggggataacacgttcgcgagggataacacgttcgcgagagataatcgcgagggataacacgttcgcgagggataatcgcgagggataacacgttcgcgag

SEQ ID NO: 153155 - DNA, 261 bp, Homo sapiens
caagtgatctcccagtcaccctcccaagtaccagggactagagacgcacactaccatgcccagctaattttttgtatttttagtggagatggggtttcgccatgttgcccagcctggtctcgaactcctgggttcagtctgcctgcctcggcctctcaaagtgctgagattacaggtgtgagcccccatgcctggactgctttcctttcaagcagttcccatggctagatttaatctctttccttctctatctcctaatgg

SEQ ID NO: 153156 - DNA, 531 bp, Homo sapiens
catgaaccgattttaaagaagtaagttaggccgggcaaggtggctcacacctgtaatcccagcactttgggaggcccaggcaggcggatcacgaggtcaggagatcgagaccatcctggctaacacggtgaagccctgtctctagtaaaaatacaaaaaattagccaggcgtggtggtgggcgcctgtagtcccagctactcgagaggctgaggcaggagaatggcatgaacccgggaggcggagcttgcagtgagccgagatcgtgccagtgcactccagcctgggcaacagagcgagactccgtctcaaaaaataaaaaatagaagaagtaagttagcagcgtaaaagctcaatttgtccatcagcttcagtagtaaaatcataaagatttcaaatatctacatagcattaattattatggaaacatttgtgcctcgggtggcattgcagttggattcagtaagtgctgctcactaacaggctctactgtcttctttctgggtggtctcttactgtattttctctctac

SEQ ID NO: 153157 - DNA, 308 bp, Homo sapiens
cagtaagattgggcaagtcaagttccattttcatgctgcatccttacagggtaatctcaaataacacacaagaaaatgagcagatagtactggctgtaatctaatattactaaaattgtctttggaaaaaatgggttgtgccatagaacaaaagttgtaatatcccatgtgtacttgcctaattttccttcaatattcctttttagttggggtacccaatagggtgataaattataacactaaagaactcatctatcaaaattagcatgaagtccagtgttaacctctgctcacaccacccctgtctt

SEQ ID NO: 153158 - DNA, 206 bp, Homo sapiens
taagcaggggcaaacacataggcagatcccctcggttcccatcagagaaacaaatgagtaaatgaattaaagtcaaacaacttgacctcacctgccagcctcaaggtcatgagcagtgactggtggaacagaagagtgtcacgctgtaaaccatgtctgtcatatgaactatgtccccgctagcactgggaacactgtgacctaag

SEQ ID NO: 153159 - DNA, 516 bp, Homo sapiens
taaaatctacccacagggtgggaagaacacaaatggaatacaaacagtaatgatggacagaagtttattctaaataaatgacagccacttaaagagagtggagaagaaaagaattaaccaaaataactttcaaaaacagtattttaactaaataagatgaaaaacaaaataaacatagcaaatattgtacactagttagcaaatttttttccacagaggtatgtgttaacaattatgaaactacctttatgttcattccaggactgaacaagaaaataaatatgtcatgagtaagaagaaccaggtttctcactgtcactatcaaaggcaatggggagggctagaatgagccatgtggtgttggcttagattggaggtactcatatgaattcatattttgtaacatatatgcagatacatcaatacggaaatagaagtaggtatatgtatttcctagctctgtcactagagggggcctacaagtaatgatatccctgtggaaagtaggtatactca

SEQ ID NO: 153160 - DNA, 2225 bp, Homo sapiens
  misc_feature (1)..(3): n is a, c, g, or t
nnntgagaagggagaagtgcttcaaatagctgccaaccaatgctgtcctgagtgtgttttgaggactccaggatcttgccatcatgaaaagaaaatccatgagcatgggacagaatgggcctcttctccatgtagtgtgtgctcttgcaatcatggggaagtccgatgtaccccccaaccatgcccaccgctgtcatgtggacaccaggagctggcattcatccctgaaggaagctgctgcccagtttgtgtgggccttgggaaaccctgttcctatgaaggccatgtgtttcaggatggggaggactggcggctgagccggtgtgccaaatgtctgtgtagaaatggggttgcccagtgcttcacagctcagtgtcagcctctattttgtaaccaggatgagactgtagtccgagtccctggaaaatgttgcccgcagtgctctgcaagatcctgctctgcagctggccaagtatacgagcatggtgagcagtggagcgaaaatgcctgcaccacgtgtatatgtgaccggggtgaggtcaggtgtcacaagcaggcctgcctgcccctgagatgcggaaagggtcagagcagggctcggcgtcatgggcaatgctgtgaggaatgtgtgtctcctgccgggagctgctcctatgatggagttgtgcggtaccaggacgaaatgtggaagggctcggcctgtgagttctgcatgtgtgatcatggccaagtgacctgccagactggagagtgtgccaaagtggagtgtgcccgggatgaagaattaattcacttagatggaaagtgttgtcctgaatgcatttcaaggaatggttattgtgtttatgaagaaactggagaatttatgtcatcaaatgctagtgaagttaaacgtattccagagggagagaagtgggaagatggcccttgcaaggtgtgtgagtgccgaggggctcaggtaacttgctacgagccctcttgcccaccatgtccagtgggcacactggccttagaggtgaagggacagtgctgtccagactgcacatcagttcattgccatccagattgtttgacatgctctcagtctccagaccactgtgacctctgccaagatcctaccaagttactgcagaatggatggtgtgtgcacagctgtggactgggtttttaccaagctggcagtctctgtatagcctgccagccccagtgctccacgtgtaccagtgggctggagtgctcatcctgccagcctcccctgctgatgcggcacgggcagtgtgtgcctacctgtggggacggcttctaccaagatcgccattcctgtgcagtctgccatgagtcctgtgcaggttgctggggcccaacggagaagcactgcttggcctgcagagatcccctccacgtgctgagagatggcggctgtgagagcagctgtggaaaaggcttctacaacaggcagggcacctgtagcgcttgtgaccaatcctgtgacagttgtggccccagtagccccaggtgtcttacctgtactgagaagacagtgctgcatgatgggaaatgcatgtctgaatgccctggcgggtactatgctgatgccactggcaggtgcaaagtttgtcataactcatgtgccagctgctctgggcccacaccctctcactgtacagcctgcagcccccccaaggctctgcgtcaaggccactgtctgccccgctgtggagagggtttctactctgaccacggagtctgcaaagcctgtcactcctcctgcctggcttgtatgggtcccgcaccctctcactgtactgggtgtaagaagccagaggaaggactgcaagtggagcagctgtctgacgtgggcatcccctctggcgagtgtctagcccagtgtagagcccatttttacttggagagcactggcatatgtgaagggcaaaatctggacttctgtcagaatttagaagtgatttctgctgtttgccttggcatatcatctacagagaattgatgacatcctgaataaataatttgactcaatagccaggccatctatgagtggttgaggagatgaaagggaagtattatagtttcctttctgttcccacaagtagccttgctgttgggtgaatagtttgactctaaagctacgtgaaaaaaaaatcattagtttgtatttttcattgtaaacatatgttcattaaaaaaattttataatacacccacta

SEQ ID NO: 153161 - DNA, 3514 bp, Homo sapiens
  misc_feature (1)..(3): n is a, c, g, or t
nnntgagaagggagaagtgcttcaaatagctgccaaccaatgctgtcctgagtgtgttttgaggactccaggatcttgccatcatgaaaagaaaatccatgagcatgggacagaatgggcctcttctccatgtagtgtgtgctcttgcaatcatggggaagtccgatgtaccccccaaccatgcccaccgctgtcatgtggacaccaggagctggcattcatccctgaaggaagctgctgcccagtttgtgtgggccttgggaaaccctgttcctatgaaggccatgtgtttcaggatggggaggactggcggctgagccggtgtgccaaatgtctgtgtagaaatggggttgcccagtgcttcacagctcagtgtcagcctctattttgtaaccaggatgagactgtagtccgagtccctggaaaatgttgcccgcagtgctctgcaagatcctgctctgcagctggccaagtatacgagcatggtgagcagtggagcgaaaatgcctgcaccacgtgtatatgtgaccggggtgaggtcaggtgtcacaagcaggcctgcctgcccctgagatgcggaaagggtcagagcagggctcggcgtcatgggcaatgctgtgaggaatgtgtgtctcctgccgggagctgctcctatgatggagttgtgcggtaccaggacgaaatgtggaagggctcggcctgtgagttctgcatgtgtgatcatggccaagtgacctgccagactggagagtgtgccaaagtggagtgtgcccgggatgaagaattaattcacttagatggaaagtgttgtcctgaatgcatttcaaggaatggttattgtgtttatgaagaaactggagaatttatgtcatcaaatgctagtgaagttaaacgtattccagagggagagaagtgggaagatggcccttgcaaggtgtgtgagtgccgaggggctcaggtaacttgctacgagccctcttgcccaccatgtccagtgggcacactggccttagaggtgaagggacagtgctgtccagactgcacatcagttcattgccatccagattgtttgacatgctctcagtctccagaccactgtgacctctgccaagatcctaccaagttactgcagaatggatggtgtgtgcacagctgtggactgggtttttaccaagctggcagtctctgtatagcctgccagccccagtgctccacgtgtaccagtgggctggagtgctcatcctgccagcctcccctgctgatgcggcacgggcagtgtgtgcctacctgtggggacggcttctaccaagatcgccattcctgtgcagtctgccatgagtcctgtgcaggttgctggggcccaacggagaagcactgcttggcctgcagagatcccctccacgtgctgagagatggcggctgtgagagcagctgtggaaaaggcttctacaacaggcagggcacctgtagcgcttgtgaccaatcctgtgacagttgtggccccagtagccccaggtgtcttacctgtactgagaagacagtgctgcatgatgggaaatgcatgtctgaatgccctggcgggtactatgctgatgccactggcaggtgcaaagtttgtcataactcatgtgccagctgctctgggcccacaccctctcactgtacagcctgcagcccccccaaggctctgcgtcaaggccactgtctgccccgctgtggagagggtttctactctgaccacggagtctgcaaagcctgtcactcctcctgcctggcttgtatgggtcccgcaccctctcactgtactgggtgtaagaagccagaggaaggactgcaagtggagcagctgtctgacgtgggcatcccctctggcgagtgtctagcccagtgtagagcccatttttacttggagagcactggcatatgtgaagggcaaaatctggacttctgtcagaatttagaagtgatttctgctgtttgccttggcatatcatctacagagaattgatgacatcctgaataaataatttgactcaatagccaggccatctatgagtggttgaggagatgaaagggaagtattatagtttcctttctgttcccacaagtagccttgctgttgggtgaatagtttgactctaaagctacgtgaaaaaaaaatcattagtttgtatttttcattgtaaacatatgttcattaaaaaaattttataatacacccactaaaaaaaaaaaaaaaaaactcgagactagttctctctctctctccttttgcgtcgccagccgagccacatcgctcagacaccatggggaaggtgaaggtcggagtcaacggatttggtcgtattgggcgcctggtcaccagggctgcttttaactctggtaaagtggatattgttgccatcaatgaccccttcattgacctcaactacatggtttacatgttccaatatgattccacccatggcaaattccatggcaccgtcaaggctgagaacgggaagcttgtcatcaatggaaatcccatcaccatcttccaggagcgagatccctccaaaatcaagtggggcgatgctggcgctgagtacgtcgtggagtccactggcgtcttcaccaccatggagaaggctggggctcatttgcaggggggagccaaaagggtcatcatctctgccccctctgctgatgcccccatgttcgtcatgggtgtgaaccatgagaagtatgacaacagcctcaagatcatcagcaatgcctcctgcaccaccaactgcttagcacccctggccaaggtcatccatgacaactttggtatcgtggaaggactcatgaccacagtccatgccatcactgccacccagaagactgtggatggcccctccgggaaactgtggcgtgatggccgcggggctctccagaacatcatccctgcctctactggcgctgccaaggctgtgggcaaggtcatccctgagctgaacgggaagctcactggcatggccttccgtgtccccactgccaacgtgtcagtggtggacctgacctgccgtctagaaaaacctgccaaatatgatgacatcaagaaggtggtgaagcaggcgtcggagggccccctcaagggcatcctgggctacactgagcaccaggtggtctcctctgacttcaacagcgacacccactcctccacctttgacgctggggctggcattgccctcaacgaccactttgtcaagctcatttcctggtatgacaacgaatttggctacagcaacagggtggtggacctcatggcccacatggcctccaaggagtaagacccctggaccaccagccccagcaagagcacaagaggaagagagagaccctcactgctggggagtccctgccacactcagtcccccaccacactgaatctcccctcctcacagttgccatgtagaccccttgaagaggggaggggcctagggagccgcaccttgtcatgtaccatcaataaagtaccctgtgctcaacc

SEQ ID NO: 153162 - DNA, 537 bp, Homo sapiens
gttccacatttagtcaacactgtagaatgaatagctatttcatgttcaaacgacttggcttcacttttaaatcttagtaataaactttcaaaacaatttcatttcaagcaagtagctgaaatttcaaatatattaataattctacttttcacttttttttttttttattttgacacagtctcactctgtcacccaggcgggtctcaaactcctgacctcgtgatccgcccgcctgtgactcccagagtgcggggattacaggcgtgacccaccaggcctggcccttggttggtattcttaccagtagtcggggtcataaattatagaggaggacgatcaaatacgtggctaaatggcctgttagcactcagtaaaatttcttcctaagggtagcccagtctgttctctgaccttgctcctgtgaagtacccagtgttttcagcacaggaaagtctggccttaagcttggaagacccgccaggaaaatgaaggtgaactaaccctctaatttgccggcaaatattcttaactgtcatg

SEQ ID NO: 153163 - DNA, 465 bp, Homo sapiens
aaccgctcacagacacgccttcccctctccctgctatttacatgccaaagaccaccacaggttaagaggacagccctattagaagcccctgctctttctatattgtgttcttgaaaagttttacttccttaggaactggagctttttactgctgaactgaacccagggactgcaatcccagcgaagtctgaacaaatctgtgtctaaaatacgggctgttatgatacccaacggtgtcctaggagaaatccaagccaatctccaggtccagccctcaacggccgcctgatgggaagggacataacaattaatggcaaatttcttacaaggattacccacacgtcttctttcctctaaccaccccctcttcggcctgcaactgctgtgatttggcctctgcccagcttctctcacaaggctgctcacccctgtgtggtgaacccaagggctacctcttgaccctca

SEQ ID NO: 153164 - DNA, 360 bp, Homo sapiens
ccaattgtggccctcacatcctatcttatcctcacactttaataccgtgcaaaaatggtatctgtccctactaggccaccaatgctattctctctccctttgagatttaatgacttcctaatagtgtaattcaatgctcttccctgtggccataacactgtcttgtagacactgctgaactccattcttttcctttagctctttccaaatctgtgtccacaatatttctcctcctacctctcttgtccttctgtgtcctccaactgttctttgctctgcctccacgataaatgtgactgctcccagcccagtacacattctcagctcactagacactgttgccctgagtgaacacacctt

SEQ ID NO: 153165 - DNA, 506 bp, Homo sapiens
agagaaattttcctgtttttttccctctaaaatattaaacataaaatttatttttacaactaactaggactgatcttaattttagatttataccagatattggttataagatgatttcataacaccatattagatctgaataagtgaatgctatttgctcctagctaattgcagcatgtttcttgatatgaagaccttaaaatatatcacttcaaaggaaatgaatatctgttaaaatgagtagaaaaggctatgctttcaatctcctacacaaattttacatctggaatgatctgaaggttcttcaaagacattcaaaattaggcttttttatgtcctgttttaagtgaaaatatttattcttctaagggtccattttatttgtattcattcttttgtaaacctctttacatttctctttacattttattctttgcccaaatcaaaagtgattcctaaattttaattatatttgtaggacaattaaaagcttttgataacttaaa

SEQ ID NO: 153166 - DNA, 160 bp, Homo sapiens
gaggaatgatgaagcatcctccaaagtccccgatttactgttcatgcttggtagattatagtactaattactttttctgggttgtttctttcttaggacagtaaaacactatatgagaggagctaccttcctaaaatgactgaaaaaaaatttacctttg

SEQ ID NO: 153167 - DNA, 265 bp, Homo sapiens
aagagactttttaacacagtagatagctgaaatactcaaagggatctcacacaaagagggatgaaattcatttggaatggttccagagagctaaacaagatccaatgtatagatgaagttagccaatgggaggtggatccagcctagaatgagactgctttaatgattagagctgtccaaatacagaatggactgccttttacaatctccactgctttacaaggagctgtagagcattgggaagttggctggggcctcttttaca

SEQ ID NO: 153168 - DNA, 346 bp, Homo sapiens
tgcaaactagagaaagtaagctacttgctcaaagtcacagggctggcagcagcagcaccaccacttcatcttgatgacagtgacagagatccttccaggagccctcgctgctggacaagggtggcctgtgacacaagtccggtgactgcagcaatgcctagcacagaggaggagcttaacaagtatctgttagccagtgtctggtttaaagaacatgcgcaggctgggcgcagtggctcacgcctgtaatcccagcacttggggaggccaaggcaggtggatcacatgaggtcaggagttcgagaccagcctggccaacatggtgaaaccctgtctctactaaaaa

SEQ ID NO: 153169 - DNA, 399 bp, Homo sapiens
tgtttgcaatgacttctgacttctctcttgtttacttctcctttcacttttaacccccctttaccctacttgctgatacttagttctcatctgctatcttgtagcacacagagtttgctactatagtttgggccaaagttggatcccctgatgactctgtacattctcctggctgtacttttcttcacataatgtctatgaaacattacttttatgtgttctgttctccgagaatcctgctgactagagaaacattatacatactcataactgagtattaatagttgttaagggttgaatggtttcactctcccagattgtgtgtgtgtgtgtgtgtgtgtgtgtgtgtataatttcattatataacaactaaaaaatgtgtgaagagatatttagata

SEQ ID NO: 153170 - DNA, 344 bp, Homo sapiens
tgggggttatgttgttggatgcacgtatctttattattgttatatcttcctgatggattgacagtttaatcatcatgaaatgtcctttgtctctaccaacaatttttttttttttgagatggagtctcgctctgttgcccaggctggagtgcagtggcaccatctctgctcaccacaagctccgcctcctgggttcacaccattctcctgcctcagcctcccgagtagctgggattacaggcacctgtcaccacgcctggctaattttttgtatttttagtagagacggggtttcaccatgttagccaggatggtctcgatctcctgacctcgtgatccaccca

SEQ ID NO: 153171 - DNA, 362 bp, Homo sapiens
tccctggtgtatcactgtttctggtggcatacaggttgtggttgtattcccggcccttccacttgttactgattgacaagggcaagttagttaatctctctaggcctgtttcctcttctctttaatggggttaattacctagttcatagggcggttgtatgaattcttttgttcagtaaatatatgccatgtatgagatatgatgctggggatatagtggagacaccagttgctatacaggatccagatgtgaaacaggtcagcagagctgaatagatgagtgtttgaaaagtgatgggaaggaaacaaataggatgtagtggtagcgaatccatattgaattgggcctctattctgtgcag

SEQ ID NO: 153172 - DNA, 256 bp, Homo sapiens
tttccccatctgcaaaatgagaccgtgcccagtgagtctaaatcatgtgtgtgtacgtacatgtgtgtatgagtgtatcagtctcaggttatggcctctgcaacttacaaccattaattagagctttctccttaatctgattgttcttgaatgttatgaacctataatactttgtccaggccaatttctgaattttcctatgaaatttaaaatgatttaacttggaactcctagcagcctcttgcaggaaaacatc

SEQ ID NO: 153173 - DNA, 525 bp, Homo sapiens
agcttgcacagtagaggcaagtgttataggaggccagaaaagggagatgaacatgggaagcatagtcagagaaggcttcatggaggaagcagggcccagaattgggtttaatttgagtttcttcatccaaagcctggtgctccctttcttgattgcaacccttatgcagtactgccagggcctcaggttaagagtcactgaaggtgactagtcttcaggaaaatttcataataatgaataaagaaaaagatgggaagcagactctggtcccattctattgcagtgtaaaggagccagccaaggcttaatgtctaaataagcagagcctctggcatgggcagcaattttgccaagcagcaaataatttgtaggaccaatgaaaagtaccccaatcatagttctgtaacctgaaattattggaaaagcaagatttagcaaagaatctttactttatagttgactttaatttaatatatagaaggatagcaatgagagccaggcatgatggctcacacctgtaatccc

SEQ ID NO: 153174 - DNA, 328 bp, Homo sapiens
tgccatatccacctaacagagtattttatgtagccactaaaataataagaatatttatcattgtagttacagagtgatcggagtatgtagaagcagagaatcaaaatctatgcttaaagacagaggaaatacatggtaactctagttgtgtctctctggatgatgatattatcggtgattttcttttttagtttttttatcctactgttttctatttccatattttgtgtaatgaacatatttggctcctatcatgtgtgaaaagattttttttaataaaaatgcctgggacccaggctagttaggaaagatgggatacatacagtaa

SEQ ID NO: 153175 - DNA, 168 bp, Homo sapiens
tatgcataggaatgttgtgttgcatgtgtgcatgttaatctacctgtatatgcatgtatatgcatgtgcatgtgtgtgtacgtgtgagtgtgaacatctgtgtgcagtgtgtgtatgagtgtgcatgcatgtgaatgtatgtggatgtatgactacattgagtgcatg

SEQ ID NO: 153176 - DNA, 475 bp, Homo sapiens
gctgactgttcctttgctgtttgtctactttttcccattttgtgctgagactcatctttccagcacaaacaccaggatgaggaattggaattttagtgctggaagtctccggaactatgatctagtgctcattccctctgatcccattgccctgacattatctgatgcttccacagctccttgtacagggaggtgtggagtcgggagagcatcagcctgtggtacagcgctgcccacagggaaggaagaagacatggcggggacatggcctgactcccgatgtgctccttcctgtagggtcttccacatggctgggctccctcccgtcccagcacacatcctgggtccatgtgaccttgaacttcacaaggtcaaatctgtgcagatccaaatggtgtgtggatctaattttcttcctcaagaagccttgcacaatctggccctgcatgcttcctctgagcccacacttcctgtg

SEQ ID NO: 153177 - DNA, 416 bp, Homo sapiens
gaggcgagttgcggggaagctggtggtagtgaggtgtggtgggagcagagtctgtcccgccgtggcctaccccactccaccctgccctcgccgtgcggctatgtctagcagcagcctctgtaggtgtctggcaggacgggaacaccaggcctcatctggcctcccaaaagcttgggctcctggaggtgctactgtggggatctgtcttaggctgagtgtcagccggcggcaggtgaccgcctggcccttgcagtccctccaggaccaccacgaagcacgacgcacatcctggagctcgccataccggctcccaggcctcaccctaggctctagggtgttgggcgccgcctcttcagggacctctggcccaggctccagttccctgcggatctgatgtggaggaaacagctgtttcc

SEQ ID NO: 153178 - DNA, 163 bp, Homo sapiens
ttagatttgagcaaggggtttttgtctttttgtttttttccttttaaatacaaagtcttgttatgttgcctagactggtctccaactcctgggccccaagccatcccagagtgttgggattacaggtgtgagccaccatgcccagccatccttttcttacttt

SEQ ID NO: 153179 - DNA, 475 bp, Homo sapiens
gtataggttgcaaatatattctcccattctgtaggttgttgtgctctcttgattgtttcctttgctgtgcagaagctttttagtttaatttaatgccatgtgtctatagttgcttttgttctctgtgctttcaaggtttaagccttgtctagaccaatgtcacagagcttttctcctatgtttttttcctactattttcatagtttccgatcttacatttaaatctctaattcactttgaatttagatatttcttaaaagaagacatacatacggctagcagatatatgaaaaaatgttcaacatcactaataataagggaaatgcaaatcaatcaaaactacagtgagaaatcacctcactccagttagaatggctactgtcaaaaaatcaagacagctgggcacagtggatcacacttgtaattccagtgactcaggagactgaggtgggaggatcgcttgaggcgaggagtt

SEQ ID NO: 153180 - DNA, 250 bp, Homo sapiens
tagaaacgtttttttcctctctacatgcacaacccgcttacagcatttttcacccaggactatagttatcttttgatgcattaatttccttacccatgtcaagctcctaaattgcaggaactgtaggaactgtatcttgtactcatctctggtatctaatatgattcccagcacacagcagggactcccaaaatgcctgtggaatgaaggaatgaatgaatgaacatttcaacatacagctagatatttc

SEQ ID NO: 153181 - DNA, 382 bp, Homo sapiens
agattttctggcagagtaaagttttaagaaaaacagttattgactttcaaagacttttcctggctgtcttctattgtatgagtatcttcatatagaatctcaaagataagaagaaaagaagcaattattgaagatatagtagatttttttaactagctaacaagctgtgcaagtagtggaatatcttgaaactaacaatgagaagaggaagtcattatctcagatagctaatcaaagtgaccacacttctaaactgaccacgcttaattagttatggaaagcatatttttcaacccgctatgttaacttttacagaaaaaatatcattcagttaggaccctgtggcacataagaatattttttacaacagttaaacaaagca

SEQ ID NO: 153182 - DNA, 430 bp, Homo sapiens
taaggaaaccttgtgtcaaggatcatggaaagtatttgctttaaaggtctcttatcgcatattgagtgatattaatatacattgttattatttatttaagggatgtgatttattatactacttttttccatcttcattctgcacctccttttgtgtaaacaaatgttctggtaaactctaaatcagaaacttatgtaatagttttgaataattccttcttcatagtatacctttctattggagaatagacacgtttcttcttttttttttttttttccgagacacagtccccgctgtcagccaggctggagtgcagtagtgtgatctccgctcattgcaacctctgcctcctgagttcaagtgattcttccacctcagcctcccgagtagctgggattacaggcatgtgccaccacacctggctaatttt

SEQ ID NO: 153183 - DNA, 237 bp, Homo sapiens
ggccccacctccaacatgagggattacaattcaacatgagatttggtggggacacatattcaaacgatatcaagtacatttttaaaaattaccattttcaggtggcagagagaaacatttgcaaaagagaatagacaaatagctaggaggtgagatcaggtagagatagcttgctggcttagcctggaaaaatctgtattaataacgccatcaacaacagtgtctcttctgcttccc

SEQ ID NO: 153184 - DNA, 761 bp, Homo sapiens
gctggaaatgctggacgcagggatgtgcggcagaaatgcatttcaggctccctttcttgtgattgcttcctctcaaaagttccagcctggtcagggtgagggaggtaagcacagcctctgactctttagacacagttggcttggcctcccttaagaaggtagaaactacattttaaagctattgaagggatttcaagccttggagagcagatgaaaccaagtatgtggatgctcctctgtccacagatcaagatcaagctgaccctacctattcagataaaacaagcaaaaacttgcaggcaaattcccaaggtgcaagggtcacagtagaagaatgtgggtccttcatcctttcctgtaccttgggacatggttcaggcatgattgaggcaccctgggcactgaatccctaccttgggttaggccctgtgcaaatactggaaacacaaaaatgaattgaaaatgactcatacctagccgggtgcagtggcttacgcctgtaatcccagcactttgggaggccgaggcaggctgatcacttgaggttgggagttggagaccagcctgaccaacatagtgaaaccctgtctctactaaaaatacaaaattagccaggcgtggtggcgcatgcctgtaatcccagctacttgagaggctgaagcaggagaatcgcttgtacccgggaggcagaggttgtggtgagcagagatcgcaccattgcactccagcctgagcaacaagagtgaaactctgtctcggaa

SEQ ID NO: 153185 - DNA, 400 bp, Homo sapiens
cctccctctttctctccctctctccctctctgtctcttctttctttgtttttttgagacaggatctcagtctgtcacccaggttggagtgtagtggcatgatctcggctcgctgcaacctctgcctcccaggttcagatgatcctcccacctcagcctcctgagtagctgggaccacaagtgtgtgccaccacactcggctaattttttgtatttttgttcgagatggagtttcaccatgtggcccaggctggtcttaaactcctgagctcaggcaagtcacctgcctcggcctctcaaagtgctgggattacaggcctgagccacggtgcccagcctttcccacgatttatatgtgtggtttaaacctaggctccttcccgtacggtccccttatctca

SEQ ID NO: 153186 - DNA, 578 bp, Homo sapiens
aaactcctactgatgggcccagttgggcctcatttctaggtggatgattgggcaagacccctactgacaactgattccaagggtccccatccagagagctccctgggccacagacaacccgttaatttcacacacaagggttagctctctttcatgttgagattcttttccaggtaaatttgcagcatatttagtcacggggaaacccggtctcttccggcaattagcccccagttcagcttcggtgactgtcagtgccccattcaccctcagcctgagtaatcacgtgtcgtcatgcacaagggttatctaacccttttccaacaatggcacatgtggtgacctccctttatcacttagaataataatttataccagttggcacaagggatgcactagtccctgctcttttgatcttcagactgaaaataatttttcttctaaaccatcactgattgatttttttctttcattgttttatatcattgagataagacaatggtttgagttcaagtcctaactctactatttactaagtacgtgaccttggccaagttatttaacttctcagcaattca

SEQ ID NO: 153187 - DNA, 283 bp, Homo sapiens
ggtggctggagacgactggataacaccagtccccttggcatgacatcaggcagcatgcgtggcatttgtgtatgtgttgggcagcacactttctatgctgggaggcccacagctgggatgagcccatgtgacctgacagctgccctgtgggcaggcagagtgggggggctattgccttcaatcataaacgaggcttctgaggctcagggagaggaacagacttgcccagggtctcatttccagttagtgatggagttgggttccaatcccagtgctcttggct

SEQ ID NO: 153188 - DNA, 501 bp, Homo sapiens
tgttaatcgatgccacctgcatcgcccgtgtgccaaatggagttcaagactctgcactgttccccattcatccccacgagaggttcagcagccactgccgctaaaacaaaagacggatgacaggaaaacccgctggcctttggcccattccctagcaaaggggaagtgtaaaagtgcaaaggggaaagtgggccagctgcactaatccctctttgtccagcagtaattaatagtataatccacatttcagatgcattaaagcgaaaatgctgcattatcagagagcccggcacacagcctcagggcagagcctccctgctgacctgcagaaccaggttacctcatctcagcctcctcctctcaggggagctgactctagacacctcataaaaggaccgagctggcagccagaagtctccactctgcctgatgtgctgtgtctgtcttcagaaaccacccactccagagccagtcctttggagtgggtggcatcgataaaca

SEQ ID NO: 153189 - DNA, 491 bp, Homo sapiens
aaacatccacataaagggattgcaaatggcatatttctttggaaagataaaaattaaacaaatatttttacatgaatcagggcataatcttcagtgtgagcctccatctatcactttgttcaagatgatttttcaactatcttcttaaaatcacttgcatgctaaaattgattcattgtgttcataatagactttgtgttaattcaaggagtagttcttctaatatatgtctaatttttgttgtatcaaaacatattcagaatctccaaggcaaagtaaattgacatcttttccttttatttatttattttgtgacatcatgcaagaaaaaggcccagaattgtgactattttttagtgttttcccctcaagagaatataatctgttcaactgtatattgttatgcttgttagtgtttctgttgaaaataagattaacattttcatagataacaatgtatggggtgattttctttttcagttgtttatata

SEQ ID NO: 153190 - DNA, 393 bp, Homo sapiens
gagtggcagttttctactgatagtttagccacactttacaaagaggctccctgcttttttctcttccttagttcagtctgggaaggcgatggtccgacagggctggtggggtcttcggagcccaccaagtactgtgctgtatggacaggcctgcttgggaagggggccgcggctggcagactggggcgtgcggtgggcgttgggggagaggccaccagttagcccgctcccccgccccttgcttgtgcgtggccttttcgaactcacctcacgtctcacaccgaagtcatctgccctggtattggtggtaaatattggatgtatgggcttgctgtctgcaaagcgcccgtgctctgtgcgtctctttgcacatctgcacggccctgcggccgc

SEQ ID NO: 153191 - DNA, 407 bp, Homo sapiens
tggtgtcagaacagtttacaaggatgcagaggtggaaagtgcaggtgcaagtctcagatccacagatgtgcaaggctgctggaaaacaggatgggggcttctgtggaagcaccaagtggtccctgtcactggcaccttccaggcagacatcactggggatactgtagacgtcatctctctaaaatcagttctgatttgaaaactccattctatgtgaagaatgtcaataagtatttcttcactatccattagttttctgctcaacttttgttctttataatgttcaacaaattttgagcacctaagagcatagctgctagaatgaaactccctagactgtattgttttgtttgagacagggtctggctctgttgcccaggatggagtgcagcggcgcaatcatggct

SEQ ID NO: 153192 - DNA, 288 bp, Homo sapiens
ggggcctgaaattctgcataatctgctgctggcttgtggactccagtttgatttgcaagactctagactccagagatagagcacttatgcaagtgcttgggagttctttgatttgaaggggtgtgagcatagtcgagtagaatttccttaaatgctttctaaaggccacattcagacttgtggtaaaaggattactagcagtttttcattgtgtcttgttcacatgtgtgctgcatgagtttttacacttttttttcaatctgctttaggatttttagaattaaaata

SEQ ID NO: 153193 - DNA, 350 bp, Homo sapiens
tccagtgtgcggttgccaagcatgtgaatgaggctttcctgagccacagcttccatggcgcatgccggaggaaccctcgcatggaacctaagggcgccagaggcggagttggaggcgtggtattgggggatcctggggatgcgtgttgggggctgggtgggtgctaggagagaggaaagaactggacccacctggaagaccagccaggtgtgggtcagaagctataaacatgagagggctcgaggaattctcatagtgctttctggagccggggaaaagagggctggccaggaggcccccacgtttctctccaccatcctgcagtcttcattttccctccaaatgggagg

SEQ ID NO: 153194 - DNA, 156 bp, Homo sapiens
ccgaggttgtgccactgcactccagtctgggtgacaaaatgagcccctgtatcaaaataaggaaaagaaaaaaaaaattgtcccatccagtaaaacatgtcactagctgccatttccccaggtggatggctaacggaaatacgggcctgctaaaaa

SEQ ID NO: 153195 - DNA, 355 bp, Homo sapiens
aaaaagaggttttcttgtgcattgggcacggttaaagtaggagtaggaaaagatgcttggctaaggataaggagaaggtgggtttccaaaccattggacactgccacattctttagcctttttttttttttttgagatggagtctcactctattactcaggctggagtgcagtggtacgatcctacctaactgcaacccctgcctcctgggttcaagcgattctcctgtctcagcctccagagtagctgggattgtaggtgtgcaccaccatgcccagttaatttttgtattttagtagagacagggttttgccgtgttggccaggctggtctcaagaactcctgacctcaggtg

SEQ ID NO: 153196 - DNA, 173 bp, Homo sapiens
ttttactttgtggtgctctcatctgatctacccaggtcagccatgaatttaagccactggtggactgtacatcatattaatgctatcagtttctgagctcagcacttccttaatggtgttgttcttcagctctgtagaaaaaagctggaaggccagtaaaatgagtagagaca

SEQ ID NO: 153197 - DNA, 957 bp, Homo sapiens
  misc_feature (163)..(163): n is a, c, g, or t
  misc_feature (167)..(167): n is a, c, g, or t
  misc_feature (170)..(170): n is a, c, g, or t
  misc_feature (175)..(175): n is a, c, g, or t
  misc_feature (177)..(177): n is a, c, g, or t
  misc_feature (179)..(179): n is a, c, g, or t
  misc_feature (184)..(184): n is a, c, g, or t
  misc_feature (186)..(187): n is a, c, g, or t
  misc_feature (192)..(192): n is a, c, g, or t
  misc_feature (197)..(197): n is a, c, g, or t
  misc_feature (203)..(204): n is a, c, g, or t
  misc_feature (207)..(207): n is a, c, g, or t
  misc_feature (218)..(218): n is a, c, g, or t
  misc_feature (221)..(221): n is a, c, g, or t
  misc_feature (224)..(224): n is a, c, g, or t
  misc_feature (229)..(229): n is a, c, g, or t
  misc_feature (239)..(239): n is a, c, g, or t
  misc_feature (247)..(247): n is a, c, g, or t
  misc_feature (264)..(264): n is a, c, g, or t
  misc_feature (274)..(274): n is a, c, g, or t
  misc_feature (281)..(281): n is a, c, g, or t
ctgaccttaggtgatccgcctgtcttggcctcccaaggtgtgggattacaggcgtgagccaccaatcccggccaccagctaaatactttcgagtggttctataattctgtaatgaacagttacccaagactccgtctcaaaaaaaaaaaaaaaaaaaaaagantttnttnctttnantntgggntnngaaanacagnttgggnnccnttttttttctnttntcnttttnccccgaattnccgagaantgggggcccaaaggttnggggcctttnaaagggngcttatattaattcgggcgccggggggggggggggcaggacgggcgggataatccccaggccttgggaggagggtcgtaagagccgggggggtcaccacagagggtccgaggagagttcaaacgacaccaagccgtggaacccaagggggtgggagtgaaaacctcccggctgcttcatactaaacaaagtggccaaacaacatttacgagcgcgggggggggtggggggcgtgtgccagcctgtgggtggtcccccaggggtgtactccaaggagacgccgagcaggcagaaggaaaaaaaccccgttggaaatcccatgggaacacagggagggttggcgagtggagacgcgaaaaatcccccccgggggacctcccaaggcgttgggcgcgaaacaacaggggcgaggcgcgggggctcttcaaaaaaacaaagcggggtggtaattcaccgggggggcggcgagcgggcggcggcaacagaggaatcatttcggcggacaaacattacaacttaaaatataaggaggtaaccaattactgagcgaggggaacaacaacttggaactcctgtgtattttaatattataaccctttggagaagagtttcttttgtgtacgagacacaccctttacgggggtatatactataaggggtttccttttaatcgggct

SEQ ID NO: 153198 - DNA, 120 bp, Homo sapiens
ccctgtttacatttttgtgctctcttatttttgtcaaaaaataaggacagatcttaaaagagtatgagaaataaatgttgagtgttttggctgcttctctaatcatgtgcttgccatgtt

SEQ ID NO: 153199 - DNA, 142 bp, Homo sapiens
tagacacacgcatacatacacaaacacacgcacgtgcgcacacacgtcagctcacactagcaaaggggtgtgagctcaagcattatcggacacagactcctacacaccgccactggctcgaaagcgcccacaacctcttcca

SEQ ID NO: 153200 - DNA, 205 bp, Homo sapiens
agccccctcccaggataaggccttagacttagggactgggcaagtctagggtcccttaccaacctcacagactcattgtgctactagcaaagcttctcatccctcagagactcaattttaccatctgggcagggtgggcttgttcctgtaccatacttggtgcaaagactctgctagcaaatgactttcttgggtatcttggcat

SEQ ID NO: 153201 - DNA, 264 bp, Homo sapiens
gtaaaatattcagttcttatctaggcatactgacaaactggcatgagaccatagaaagacaactaaaatagtaactattctggggactggagggaagcagatataacattaagttcctatatatttgaaaggctgtctcataaaaaaaaaaaaagattgagttttgttaaatcaagtatgtaaaaattagaaaaagcagatttcagttagacataaggaaaaaattgtattagatagaactgacaaaatgatagactagacatt

SEQ ID NO: 153202 - DNA, 144 bp, Homo sapiens
tgctgggactgcaggcatgagccaccatgcccagcctaatcataggtcttctaagtccaagttcagggctgctctttcttgcaaaccataatgcctccttctgtaaagctgcattgaagacttaacatggagggttaaacagaa

SEQ ID NO: 153203 - DNA, 400 bp, Homo sapiens
cctcaaatacttctcttaggtcttctgctcacatctttcaggcagagaacatctatttgatgccaaatgtgtggctagaactgggccaggtgctttacatgtcatagatcaataccaaacaactagtgaaatcagcacaaattcaaccaatgaagctcttaaaacaataaggtgaaaaaccacattgttgaggagagccatacaatacagtcaggttctagttcaaattacgtttctttccttgagatcttctggtccatgatatgttttgatctgtctaaaatattatgtaggcattctcaagtgattaagaaactccggattgtttcaaataatcaggtcttccccaggcaaacactggagatcacttgttttttgtttgtttgtttgtttctgagat

SEQ ID NO: 153204 - DNA, 423 bp, Homo sapiens
tgggggaggcggtagatagaaaggcagttttgcagtacatcttagaatgatcaggccatggttaattcctatccacgccactccacagagagagctgggccagctcttggtaagaatacattagaaccggctggcagcaaaggtgacccctagctcaccctccaatcccaaatcctcccaggccactgagccatcaggcttaggataggataccctttaaggagcagccccagagcctggctctggacttccccacagggacacaaacagggcaggccagggacaccctggagagcccacgggtccttcagcctggagggtaatggaatccccagccacagacttactgcttagctctcccaccagacttcgcataatcctcatcctcatggcaccccccaatccccaccagctggcttcgga

SEQ ID NO: 153205 - DNA, 852 bp, Homo sapiens
aaaattcttatggccacttagctagaaaagatctcatccaaatacaataaagaatatgaaactttctggcaatgtattacatagaacagtaacactctttgtaataaagtgctcatttgagacaaattaagtcattctcttagcccccttttcctacttgactgaaataaaatacttgctcagttgacaaaaaccatcaaataattcacattttagttgtaatttagtttatactagcttgtttagaaataaagtcagcaaacattatctgcatcataaagtgtgaatcgcagttagattattacccttcaatgcattgcttggtaagagggctactacatatctcattcctgaagaatttgttcccacaatcaacccaataactaacatctgtgtatcacatgttatgtaagtactcaaggtcctctattccatgtgatcctcacagcaatctcataggctacagaggttaagtgacctgctccaggaaggaggtggtcaatggcaaacctaggactggatcccaggtctttcacttattctattcatttaacaaacatttattgagcaccaacttcgcttatcactgaggacgcaataaagaacaaggcagtgaaggtcttgtttcccatggacttgacagtcaagtgggaaagacaggaaaactaataaaaccatgattaatatagatggaagtaactgagcagctactctagtccccaggattcctcctcttaatgtgtcatctttttccccatcagttgggtcccacccccacagaagcaggccacactgaccactcatgccaacataatcacaataaggcactttttggactttgggggaccgagc

SEQ ID NO: 153206 - DNA, 443 bp, Homo sapiens
agaaagaagggaaaataatgaccaaaatttttccaagtttgatgaaaactataaacccacaaatccaagaagctcaattaatcttaagccaagaaatatgaaaaataactaaccaaggcatatgataatcagactcctcaacaccagtgatgaagaggtcttaaaagcacccagaaaagaaaatgacattttccataaaaagtaagatacagataataacagacttcttatcagaaacaatacaaacaagaatacagtagagtaaaatcttcaaagaacaaaggaaaaaaaaagccatcaacctagaattctaaacagaacaaaagtatccttttttttttgagatggagtctcgctctgttgcctaggctggagtgcagtggcacgatctcggatcttggctcactgcaacctctgcctcctgggttcaagcaattctcctg

SEQ ID NO: 153207 - DNA, 335 bp, Homo sapiens
aagaaaataagccagaagaaaagtattaattcatggtgcagaacttgagaatatgcattgaacagctgcaccgtaacacttagcctttttgttcacatgaagttgctctctggaatcctcagatagctgtagttgcctgagggctcttcaaatgtcaccagggcaacaataaagtaacacacatgaagcaggccctctgtggcattctttatgaaaaccattgaattaaattattgcataacaaatcatctgcatatgaaaggcagtgaactgttagagaacccagctgaaacaatgctgaatttgatgcctacctccactgataactcactggc

SEQ ID NO: 153208 - DNA, 783 bp, Homo sapiens
attgccttggtgagaatttctaatactgtgttgaataggagtggtgacagagggcatctttgtcttgtgtcagttttcaagggaacgcttccaggttttcaggtactcaggcaacaaatagcgttacaatagaatagtacctcacatctcaatgctaatgttgaacgtaaatggcctaaatgctccacttaaaagatatagaatggcagaatgggtaagaattcaccaaccaagttgctgctgtcttcaggagactcacctaacacatacggactcacataaacttaaggcaaagggttggaaaaagacacttcgtctaaatggacacatcaaaagcgagcaggagtagctgttcttatatcagacaaaacggactttaagacaacagcagttttaaaaagacaaagagggacattatataatgataaaaggactagttcaacaggaaaatatcacagtcctaaatatatatgcacctaatactggagatcccaaatttataaaacaattactactagacataagaaatgaggtagttggcaacacaataatagtgggggatgttaatactccgctggcagcacgaggcagatcaccaagacagaaagtcaacaaagaaacaatggacttaaactataccctggaacatatggacttaacagatgcttacagaacattctacccaacaagcatagaatatacattgtatacatcagaacacgggacattctccaaaatagaccatatgatagggcacaaaacaagtctcagtaaatttaagaa

SEQ ID NO: 153209 - DNA, 211 bp, Homo sapiens
ataccttctcctcctatgtgctagcaccctaaacttaacccagcttcagtgctccatcctttggccgagtgatgatgatttctcacctcaccctgctgatgcctctctgcctgccatgggccagaggtgggattgtagttgccagggctccctactgtggcccacctgggtacgagggcttgtttgttcctctccattcctctgacactca

SEQ ID NO: 153210 - DNA, 445 bp, Homo sapiens
aggtatgtgactagtgccgaggatctttttttcatcatgtctattttgaatcacaaaaaatctttaataaaggacttatttgtagaaatcaatccaggaaactttgaagctgttataagatttgagcctcataaataggaatttcagagatctgtcctccagccagttctatgatgcatgaggattagtccttggaaatactgagaatcaaaatggtattagaaagccttttcataatgggaaagacagaaatgagataataaaaaaggaaatgtgaatggtaactaatacagatatgcttaaagtaaacagaaagtaaaaggcattatttattgatgcattacataatgtctgacaaagtctagcatatgagcatattgttcgtagattgttgatagagaatgtgttgagatcagttaaattcattgagatagactaagtagtc

SEQ ID NO: 153211 - DNA, 570 bp, Homo sapiens
ttctgtctcaaccccccactcttttcattattctaactgggaacaaaatatatggactcagcattgttttagagcctgcagctgcattccatccacccctcccccccttctttttgcagagctctccccagctctttgggacttagtaaaaacaaagagtcattactggggagagagtgggttggcacagcccacagggaagacgcagggccaccgatgtgagggtcttctgtacactgctcctctgtttttctcgagagccatgataatttaatgttgccttgctgattgctttaaatcctctctgaagaagtatgcttacagatttttttcctatgtgaaatatgtttagggctttaaattaatagatttaaatttaaattttccacaaaggatacttttccttaatgagaaattttatttgtctttttacatcaaatatgactgaaattgtaccttaactgtcatgatactgtcatatataggcatatttgacgtataactaagcattgttaaaatatcgttttaaaactgaacatataatgttaaaatcattttctgtttccctga

SEQ ID NO: 153212 - DNA, 274 bp, Homo sapiens
gctcctggccagattttaaaaattgggacatttcatatgaaaacactaatttgtggttttgtttgaaaattggagctcagtagtagctgtccttttgagtcagagcttgtacttgcctgtacgtaactcctatgagaccaatttcactttatctaattggtcatatacatttttaatttttatttttttgggtcagaatcttgttctgccacccaggctggagtacagtggtgtgatcatggctcattgcagccttgacctcctggacgtaagc

SEQ ID NO: 153213 - DNA, 365 bp, Homo sapiens
tgtacagagcagttagcatatacatatagcatatagcctctggaggtcagaggtggcaggaaaggggcaaactacctgagcagaggtgaccattcagtgagaaggggcaggatccctgtcaagggaaagcacagggcctgggccaacttgtctgtggcactgctcagatgctacagctgacatccttaacagtgagcctgcgtcctacaggagaggtcacgcgaatcactaaattcaatggtgccggctggaagtaagttccttcccgagtgctcctcctctccccgacctctgcagcttggtaaaggcaacttacggactgctgccaacatgtccctccagccttgtatcataaccttcccctg

SEQ ID NO: 153214 - DNA, 651 bp, Homo sapiens
  misc_feature (381)..(381): n is a, c, g, or t
  misc_feature (384)..(384): n is a, c, g, or t
  misc_feature (390)..(390): n is a, c, g, or t
  misc_feature (394)..(394): n is a, c, g, or t
  misc_feature (396)..(396): n is a, c, g, or t
  misc_feature (399)..(400): n is a, c, g, or t
  misc_feature (403)..(403): n is a, c, g, or t
  misc_feature (416)..(416): n is a, c, g, or t
  misc_feature (418)..(418): n is a, c, g, or t
  misc_feature (423)..(423): n is a, c, g, or t
  misc_feature (425)..(425): n is a, c, g, or t
  misc_feature (428)..(428): n is a, c, g, or t
  misc_feature (435)..(435): n is a, c, g, or t
cggggaaggggagggaggagggggacgagggctctggcgggtttggaggggctgaacatcgcggggtgttctggtgtcccccgccccgcctctccaaaaagctacaccgacgcggaccgcggcggcgtcctccctcgccctcgcttcacctcgcgggctccgaatgcggggagctcggatgtccggtttcctgtgaggcttttacctgacacccgccgcctttccccggcactggctgggagggcgccctgcaaagttgggaacgcggagccccggacccgctcccgccgcctccggctcgcccagggggggtcgccgggaggagcccgggggagagggaccaggaggggcccgcggcctcgcaggggcgcccgggcacanaanacaaanaaananaannaanaaaaaaaagaaananagaananganagaaaanaaaaaaaaaaaaacacaaaaaggaaacgaaaaacaaacaacacagaaaaaatcaaacaagaaaaagcaaaaaaaaaaaaaaaaaagaaaaaaaaaaccaacaaaggacaaaaacaacaaacagacacaaaagagaaaaaacagatacaaaaaaaaacaaatagaaaaagaaacaacagaacaaaaataataaaaaaaagaaatataaataagaaca

SEQ ID NO: 153215 - DNA, 633 bp, Homo sapiens
ttatgaaggggagatatgtgctgttataaataggggattttataggggtagaataggggactttgatttgccaggaaaggctttcctgaggaaatctccgaatttaaatctcattgtgggctgagtgtgttggctcacacctataatcctagcactttggaaggctgaggcaggaggattgcctgaagccaggagtctgaaaccagcctgggcaacaaaatgagaccctgtctctacaaaaagtaaaaaaaaattatctggtgtagtggtgtgtgcctgtagtcccaactactcaggaggctgaggatggaggatcgctggagcccaggagttggaggctgcagtgagctacgatcatgccactgcactccagcctgtgtgagagggcaagaccctgtctcaaaacaaaaacaaaacaaaccccaaacccaaaactcaaacctctctgcatcaccctaatctcactctactccttaagggcagggactttgtctattttatttgttgtgtatccccagttcctagaacagcacctggcatgtggtaggcactgaagtgaaggaagatgtgattgatctgaattctaaagggagaggaggagttaactgtgagacgaaggagagaagggacttc

SEQ ID NO: 153216 - DNA, 232 bp, Homo sapiens
ctaaagatcacaaatacgctatacaaataacaggtgctacagctctttcccagtccctaccagcaccacaagccaattatgttgcttattgaacagagttgtcttttctgcaaaactagatgcaaccacaccatcctaaaaacaggataatggctgttgccagtcagtcagagttggcattcgcaataaaaatctgtttttcagtcttttcaaggctggtgtagtagaaagc

SEQ ID NO: 153217 - DNA, 495 bp, Homo sapiens
tacaagtgtcctttctctgaaagatttgtgtgaatatcaggtcacatccctttgcatgggcatgctgactgtcctgcacttgggtattaatatacaagtcttctggctgcccggcttccttactgatcttatctcactatgttcaacttcaaactcttcttcgatgtcaagcacttgccagtgatgccactcctcacccctttgaattccaacaatacaaatgaaaccaagtcaggtcgttgctaaatttcgcttggtattactgaaggagggcagacagaaggtatgggatggtagtgtccctgagtctgcctgaggcttccctcactgccccgtttattcagctcaagattccagtgctgtcggaggtaacgtgagaccccggtaatggtgttctttgaaattctcaagtaaggtaaaatctcgtttttggctataatttaaaatcagatgtcagtaagctgataactgaactggccagggcttctctgcact

SEQ ID NO: 153218 - DNA, 106 bp, Homo sapiens
taagtcatggggaatgaatactttgggcagtgtcttcctgatgtcttcttagctaagaggagaaaaaaaaggctgaaaaaatagggaggaaattccttcatcagaa

SEQ ID NO: 153219 - DNA, 673 bp, Homo sapiens
ggtttatcatatatattaatctcagaaccagtttttggctttttctattgcaattgattttttaaatttttctgcatttcacatattttggtatgttgtgctttcattttcattctattcagagtattttaaaatttccctctgattgcttctttgatccatgacttatcaactagcattaattcttttttatttttgggggtaactggtatccagattgtgttctatcttggttaatattctatgtgcactattgtgtatggggacatgatgttctatgtatatctaattaggtcactgtggtttattgccttgttcaaatcctctggatctttgctgatttggtggaggcctattccatcagttcttgagagggcattagatatccaaatataattgtgaaaattatctgtgtttccctttataccagtttttacttcattcatttagaagctctgataattagcttctaattatttaagattgttatatcttcctgatataacacatttaagattgttatatcttcctgatagagtggcctatcatgaaatgtcccttttgtctctgggaatactcttaccttgaaatctctcttacctatcatttatatataactgcatcaaatttatttactgtttgcacgatgtatctttttcttggcttttaaaat

SEQ ID NO: 153220 - DNA, 466 bp, Homo sapiens
ttaggtcacaaataaacccttcagaagaaataaagtaataataaaataaagagatggtggaatagatgaaaagatagatcatctgactctgttccctgccacgtttggaatcctgttgagaagagagagaagaagcaactacatacgggggacatatccatcacttgagattctagctgacgacgtccgaatatatctcaactcacaaagtaaacgccagatcatatgccatgatgacttaatcatgttactataaagaaaatatttaaacaggagagattttaaaaattgcaattcatcttgtgacaaattacttaaaataatatatttgcctggaaagaacacatctaatttatatattagcagacactgttgtgcaccgtggtgagaagggatatgtaagtgggatgatgacttttcctttctgtaaagaggtttctatttttactttaaagaaaacatgttc

SEQ ID NO: 153221 - DNA, 114 bp, Homo sapiens
gctgtttccctgtttctggaaaaatactcagtgaatgaggtccgagcacatttgggaggtttattctaatccttcggctccagccacccaccgccgcgccttccagagggagcc

SEQ ID NO: 153222 - DNA, 451 bp, Homo sapiens
tggcattttgaatagctggcctctgttagaaagccttccatggattttatgaatcctagatcatcacatggccttccctttctctttgagcatgggggctgcctcagtgtcgcttggctcctaagagagtgccttgtgctgatgggacacaggaccagtttgatgactacgtgcacagatgaagccaaacctcttgcccatcatctattccacccttcacatccctcatgccctggttccacttgaacccagctgcctcacacatcctttttgcttacaaatttcctagcttgtgaccattctccaccacctccccccaagttttaccattctctatttgtgccctacaacggctccaccctttgaaataacgcctggtctaaatgttactttttctagtgggccttccttgattatccatcccactgtgattccttttcctgccccatag

SEQ ID NO: 153223 - DNA, 374 bp, Homo sapiens
ccatgtcccctgtagcataccattattgtcatcctttaatgataataataataaaagtggtttaaaacactttggagttcacaaaacctctttacaacacaataaaacccaaaattattccaactattgcccctccttgcaaaattctccaagttaaaaaaaaaaaaaaaaaagtatgtccccttccagttaagtcttctctctatgcttcctttctccagtgaaggctgtccacatttgacatctccaccacctcatcttctatcaatttcccaaaacactgcatctaacttgagttcactccactgaaactgtcctccctaagtcacagatggtttcttaaaaactgagccctgtttggccaggcgcggtgg

SEQ ID NO: 153224 - DNA, 317 bp, Homo sapiens
gtggtggaagagatgccgccctacagcccaaggccttatgcaaagcaggtgaacagaagccacccccaccccaacctggtctttcctgaccctgtgagccccaaagtctgtagtgagcccctttccagcagaagccacagggacatgtaggctgccagggtccagggtgtcacgaggaccccgtgcctggcaaatcactgtgacaagcttggctgaaacagtaccccctgggaggaaggccttgtttttccttgtttccctgggatccttggaactgctctggagctgctggtgaggaggagggcggtgccgtgacc

SEQ ID NO: 153225 - DNA, 475 bp, Homo sapiens
caggacttggagactggtgagacaggttatggaagagagagaagaaaggcctggctacggagggctgtcttttaaatgcagatgaaaccctgatgggtaggggctctcagaaagaataaactttcttttctttttatttgagatggagtttccctcctgttgcccaagctgaagtacagtggcatgatttcagctcaactgcagccacccctcctgagttcaagcgattctcctgcttcaccctcccaagcagctggtattacaggcgcatgccaccaagctcggttacttttttgtatttttagtggaagacagtttcaccacgttagccaggctggtcttgaactcctgacctcaggtgatccgcctgcctcggcctcccaaagtgctgggattacaggcatgagccaccgtgccaggcctttaaaaacattttttctgagaccgagtcttgccctgtcagcaccttccacgg

SEQ ID NO: 153226 - DNA, 666 bp, Homo sapiens
ggcatggggaggtcagagtctgctgtgagcccgagtctgtggacccagagctgcagccacccagatacaactcatctcagagctccaaaggccgatgagccctgtcaaccccctaggcctggtgacaatggcactgcaggtcacagcccctgctggaaaggctgtgggttccacggctggctccagttacaaaggccctaggacctggcctagtagagcgtgggcatccagatgtcagagtgagggccacccagcattcctggagacagatgggtctgtcccaggctgccagataccatgggcagtggttggcaggtggctgaggtccatgtgtggcaccggtgggaagtaagagctacatccaaggtgagtcagcagatccaaaccctcagcctccctgggaactctccccacccttcccagtggagctccaaagtccatgtaagcaggcagcattctaggcctggctgagttcccaacccttctgacgtcaggtctggctgaggctctagctggtcctgttggtctagaagactcctgatgcacccacattccagggctggatgggttctaggttgtctcatcggtccaagtttagaaggttttccatctgccttatttcaggacaggctgattctagatctttccatggttcagtataggctc

SEQ ID NO: 153227 - DNA, 242 bp, Homo sapiens
gtataaagtcagagtgcctgcgtttgaatcctggctcctctacttgtgaccttgagcatgtttgaaatgtttctgtgcctcagtttggccaactgttaaatggggataaaaataacatctaactttgaatgttgtagtgagaaataaataagttagaaaaattaagacagtgactaacatgtactcaataaatgaatataaaatgaggaagttatgtaacctctctaaacgttactagtaaa

SEQ ID NO: 153228 - DNA, 360 bp, Homo sapiens
ttgctctgggaggctgcagtgcacattctctctgaggcatcattgtgctctctgttaacaggtttggggcccaaaattgaagattgcatcaggccccacaatgtgcaaacactgtactaggcactgtggacaacccaagaaaggaatgaagcacggttcctgcttgcagggcgcttacacattcaatcaaggaaatagcccaactaaccagagtccaacagacccaaggtttccaggatgcagcttcctttcagtacccagccaacaagtcccaggctgtcctgcaactaaggacgtctgtttttgtcagaaccctcaatcccactcccactccaagagtttccaaaagtctccaagaaa

SEQ ID NO: 153229 - DNA, 202 bp, Homo sapiens
tgaggacatgtgacccacagctgatgaaactggggacactgattgagaggactcctgaaagacacgtcttcaaatatctgaggagatgttatgtggggataggcccaaatggacaaaatgaagactgatgggtaggggagaaagaaaagtaaactatggagagttaatccagtcctacataaagaaaagtaacctagacaca

SEQ ID NO: 153230 - DNA, 890 bp, Homo sapiens
gggccacatttagaggagccagtgaaagaatcaatctgctgagtcagaagaaaattcaacaagctcttatccaaataggcactcgtacgtgttgccatattaaagatgcaagtggtcccattagtaataaactcttcagacacaaaaggcatttgtgtcacaaattctgtacaagttataaatagagggaaaagcatctgggaatgtgaagtcaagagtcctgtgttttgactctagctcaagtgcagaccaaaaacataggcgttcacctctcagttcagtttaacaatatttctcaaggatctatctgtgaggcacttggatgcatggtctataaataagaccaagtccctttcttgaaagtgcttaaaatctaatgaaggggagggagataaatacacaaatcaatggattcaagacagggtattgaagatgttatgagagtaatacaagtaaaacattgaccaagttaaaaaggacaaaacaaaacagcaagtaaggtgttaactcctccatattccattagaatactcttagcatgcccagttcctgacacaaaagtaggcatttgataaatggctctttgagtaaattaaatgagcattatctcttcccagacctaaacagcccaccaatgacctagtttacaatttatgcactgttaatttgcctaattagacccagtatctacttctgtgccacaaaatcatatgattagagcattaacagtcatgaaacgctttatagacctggacttctccaatcgaggacattacaatctactaaataaagaataacttgaagagggatttaaatagaggagggtattgagaaagccataaatttagtaaaagagaagttaaaatcggcacgtggggttcatagcatta

SEQ ID NO: 153231 - DNA, 660 bp, Homo sapiens
gggccacatttagaggagccagtgaaagaatcaatctgctgagtcagaagaaaattcaacaagctcttatccaaataggcactcgtacgtgttgccatattaaagatgcaagtggtcccattagtaataaactcttcagacacaaaaggcatttgtgtcacaaattctgtacaagttataaatagagggaaaagcatctgggaatgtgaagtcaagagtcctgtgttttgactctagctcaagtgcagaccaaaaacataggcgttcacctctcagttcagtttaacaatatttctcaaggatctatctgtgaggcacttggatgcatggtctataaataagaccaagtccctttcttgaaagtgcttaaaatctaatgaaggggagggagataaatacacaaatcaatggattcaagacagggtattgaagatgttatgagagtaatacaagtaaaacattgaccaagttaaaaaggacaaaacaaaacctaacttgaacaatctccggaaagaagaaatcccagtacaagagaaaacccctaaaataaggatggctttagatgacaagctctaccagagagacttagaagttgcactagcttgatcagtgaaggaactgccaacagtcaccactaaatgtgccgcagggtaccgagct

SEQ ID NO: 153232 - DNA, 449 bp, Homo sapiens
cactcttagactcagggctgatatccatcatcgctattagagtaggggctgatatccatcatcgttgttagatttggggtcaatacccatcatcactattagacttggggttgatacccgtcatctctcttagactcagggccaacatcatcattgctgttagactcagggccaatactcgtcatcactgttagactcagggccgatatctgtcatcactgttaaactcggggctgatatctgtcatcgctgttagatttggggctgatatccatcatcgctattaagagtagggactgatatccatcatcgttgttagatttggggtcaataaccatcatcactattagacttggggttgatacctgtcatctctcttagactcaggaccaatatcatcatcgctgttagactcggggccaatactcgtcatcactgttagactcagg

SEQ ID NO: 153233 - DNA, 278 bp, Homo sapiens
atataaaaagcgtgagattatgtgtaatataccaagccaagatcaagtcttgctcattttaatactcctcacatagagttttgtgcagagtagagggcttagtaaatatgtgctcagacaaggagaatgaaactaaattacagaacaacattacacattaaacaataaggtgctgattttggacatattcaataacaaattattagttatgtgaaaaagaaaccagacccagaaatttttagtgggattttgaccgtgttataatgaagagtcggggt

SEQ ID NO: 153234 - DNA, 253 bp, Homo sapiens
ctgtttaaggaaaatagtaaagctaagtttctagtaagaaactcaccatcctttaaaatgcccaattctctgcatggtccaatagcatatctatttgaagatcaagaattaggaagtaatatagtgcagtgctatatggtcttagaaacacagagaagctattttgagcagtgtaagttctgaagcagactaatacattagcattaaaatacccaaagaggccggacacagtggctcacgcctgtaatcccag

SEQ ID NO: 153235 - DNA, 371 bp, Homo sapiens
aggatcccccaggtggggcatactggcaggatccagaaaagaatgatatgttgctgttttgagtaaaagtgatataactcttttggaaatttgtaactgtcctaagaagaaatacacaaagtgtctttcataaagtttcagctttactgcagtgtgcctttattcccagccactgggaagctgaggcaggatgcttgagccaaggctgtagtgtgttgtgattgtgcctgtgaacagctattacactccagccagggcagaatagcaagaccttgtctcttaaaaaagttgcagcattatttacaaagcagaaagtgatggtcacaatgaaatacgctccctttgagaacatttatgaaactaatagcata

SEQ ID NO: 153236 - DNA, 522 bp, Homo sapiens
tctataaatctgactactttaatgttttattttttcaagtccaaagtgagcaagaagatctgggaaagtttggaacttcctagagacttgtgtaatttcaatgtgaatatttcaacactgacactactgaagagtatacttaaaaatggttaaaatgtctgtacccagtggttatgactgtaatcccagctactcacaggaggctgaggggggaggatcaattgagcccaggagttcaagtccagcctaggcaacatagtgagaccctgtccctacttttaaaaggaagttctacacttaatatgtacatcttgcacatttcagtgtgtttttggcacccagttggccactgctcttagcaatataatagtagggggagagagtttatttaggtgtgttttaagcattcatgatctttgactcttttggtagaggcagatcctgtagaccattcagtgttaagtagtctgttttatcttttcctatttggcagagccattaatattttcgatgaatttgtct

SEQ ID NO: 153237 - DNA, 188 bp, Homo sapiens
catagctacattgcggtatagaatatacaatgtataaatgttttggaaaaatgcagaatgcttcctaaaatgtgcttatcagtgagctcatacagccaccccccatactctttaaaaaatgcattctcttctgccatggggggcactctgttggatagaaaagtttgagaaatacacatttatattac

SEQ ID NO: 153238 - DNA, 114 bp, Homo sapiens
gaaactcaacagctatcaggtgggtgaatatccagtaataaaatggattgttctccgctgattgtatgtttccaagttgctcaggaagaagaatacctgcaagtatgttgctct

SEQ ID NO: 153239 - DNA, 539 bp, Homo sapiens
taacggcctcagttgagttgcaagataaagaaaactatgcagattgacaacagcccaccaattagcagtcataaaagggctgaagagaaagataaaacagaatctaagcctaaacctttgtatttagtaaaggataacttcacaggttgggcaacagcgtaaccccatctctacaaaaacaatttttaatttagccaggcgtggtgacatgcacctttagtcccaggtacttgggaggctgacatgggagggaggtttgcttgagcctgggagatcaaggctgcagtcagctgctactaccgcacagcagaactctctctcaaaaacaaaaacaaaacaaaggccgggtgcggtggctcaagcctgcaagcctgtaatcccagcactttgggaggccgaggtgggcggatcacaggaggtcaggagttcgagaccagcctggacaacatggcgaaaccccgggtctactaaaaatacaaaaattagctgggtgtggtagcgtgcactagttatcccagctactagggaggctgaggcag

SEQ ID NO: 153240 - DNA, 298 bp, Homo sapiens
taatctgatctccaaagggtgtgttcagctttgagttcatgtaagttcaactctgagatatggtctgtgagctggctcagccccgccactgaagagctcttccaccatcaccatcagggactgactgaacaacacagaggtaaggctgggagatgtttgtgtgctttggggaaggcaaagagtctaatgagaagtttgctctttttttttttttgagatggagtctcgctgtgtcgcccaggctggagtgccgtggcgcaatctcggctcactgcaatctctgcctcccggattcagg

SEQ ID NO: 153241 - DNA, 452 bp, Homo sapiens
aatcgagtcggtacccggagacacttacgaagcacacaacgaagaaaactgaatcactggcgaacagctgccagttcctccccccagcccagcgaacatgaggatgaacgatgctgacagctccctcggcctgcagcctgggtttgtttcttcaaaaaaatctcgttcttttttggtggtggtgttttaatctttatggaaaagggtaagcttgtttagaagcgatccatctctgacttaccaaataatgcagcttagtaataagttgggcaccaccactgccctgggatgctgtctcaaatgccacatcacagaagggagactcgggagaaggggaggcttgtggcatttcactgtagttgagaaataagctcccgtggctaacgatgtggcatcatttatttaagttttgaatttcaatagcttttggggtacaagtggtttttggtttc

SEQ ID NO: 153242 - DNA, 556 bp, Homo sapiens
gtctgtgcctcgatacaccagcccatcatcatcatgatcatcaacaccattatcatcatcattgtgctctgtagcagccacagacctggcagttctcaatggccatttacagaatgcccacatgtgctgggctctgtgagagactatacagacactggacaatcaagtgaagagtgattctgcttgcaaatggacagtgaagagagtgcttcccatcccttcgtatttgcctttgatgactaagaatgaggcacattgttgcctgtggagttaggaaaacaactttccaatgacccactttcccatatctcttagctattgcagctcatacaatctcagggctggaaaagatcctagaaatgatcagactcactttgcaaaaggacatgacagtccagagaagctgtgactcacctgaagtcagggaactcatcaatgagaacaggaacaggagcctgggttacctactttcaagctcagcagactttccagcataccaccatgcctctcttcttgaataatttcctgaagttctaagaaaaatgagtagaatata

SEQ ID NO: 153243 - DNA, 462 bp, Homo sapiens
tcccaaggtctgacacatttctaaaagtgggaatattatttaggtgcaaaaggaaatattctcctaggtatcaaatagttaaaggtaatgtggttcaaaacagacttggttaaagtcttctaaatgtagtgactgaactgatttacaatcaaaaccgggaaatgaagtggtaattcagaggttgctgattacacctccacatttcacctaattaattttataggaggcaaagttcttgaaaataacaagatgatcaaatgtacagatataaaacctgtaacctcaacattttctatgctcttaacgtaaattattgctaattaacaagaattatattctaatgtatgaaatacgtttaacatcggtctccttgcaaaacatttggctagtggtgttcagagaaataccaaaacgtgtttttatcattgctggtatattattaaaaatcagacaaagtgggac

SEQ ID NO: 153244 - DNA, 405 bp, Homo sapiens
ttcgttcaagcctggagcccctgccccatcccagggcagccagcctccaccctgggctgacacatcctttagagagtaaaaggctgcttgccagtgtcagcctgtcactccttctgtcccacctctgcctccttcctgcaggtaatgctccatccatacctccttctccttcacccctgctgcttgggataattgcagaaccatggagcacagaatacagaatactgggggtgtacaggagagtttagccaaagcaagtcagaaaaacctaggtcttttttcgtttctgccactgaccggctgtgtgacctcagcaagtcacttcacttcgcccagctgctgtttcctcagggtacaatgaggacaccaataatacttaccctgcagggggcttaccgggatttc

SEQ ID NO: 153245 - DNA, 222 bp, Homo sapiens
acggaacatcccatcacctgtcacacggaacatcccgtcacccgtcacacggaacatcccgtaacccatcacatggaacatcccgtcacctgtcacacggaacatcccatcacccgtcacatggaacatctcaccaatcacacagaacatctcacccatcacatggaacatcccgtcacccgtcacacggaacattccgtctcccgctgacacggaatatct

SEQ ID NO: 153246 - DNA, 473 bp, Homo sapiens
caggggtgggtacagaaaattcagagtctatggaaatatctagccattccccctcctcctttggaaattccttcctatttaggaaagataatagtcagaggccgtcacatataataactcaaaacttggatgctaaaccgtgtgcacctatggaactgggaaggatacagacatttgttcgttcaacaaatatttatgtttatattaaatatgttctattttcttttttctccttggagacagggtctccattgtcgcccagactggagtacagtgacgcagtcatggctcactgcagcctcaacctcccgggttcaagaaaccctcccacctcagcctcccaagtagctgggagtgtagtcgtgcaccaccacacctggctaatttttgggtttttttttgtttgtttgttcgtttttgagacggagtctcgcactttcatccaggctagactgcagtggcgcgatctcggt

SEQ ID NO: 153247 - DNA, 206 bp, Homo sapiens
ctttttccccctcttattaaaattacctaaaagaaacctcaatctctctgaattcattaactctcaaagcagacagtgagagaatgtagcatacagttgtcctgaatattcgttatatccatatttgagaacctctaaggaagtttagactttagagactcacagggggcacatgcctggccttctcccacccccagatgcccagg

SEQ ID NO: 153248 - DNA, 253 bp, Homo sapiens
ctggcataatgtctttttggaggcctctttggaggaagctgccatcaagaagtttacacccaggttaggaagataagttgtgtattgataaaaacagttcacatatattgcttatttaatatactccaggctctgtgctaagacagaatgtgatatgtgttatattaatggtgtaaatatgaaagttaaaagaggagagtgatcatttctaatctggagggtcaaagaaagctcatagttaaggttacatttg

SEQ ID NO: 153249 - DNA, 656 bp, Homo sapiens
gtcaggcacttcatacctacacttcaacggttgagtgcttaaaacaatacctaacagcaaaaacacacacacaaataattaaagatggtaaagaaagagagaaacatgagccattgataacagggactaattttatacaaaattgccagactattttggggcctcatcatgatcttttctgatatgtcatttcacttaaaaaaggccatgacaagaaaagacaaacatgagaaaactgtgtcctatagataaaaaagggaatcacaatcatagcacttaagggacacaattcatgcaaggttggtttttacagacacaataaaagagtagcaaatttgcagaggttgaaagtaggggatttacctgagatagaagcaaaatctaatccaattcaccttttgaaaagaactaaagaataaatacaaagaaagaaatagtacttagtgctttatgtgaagaaaatctcatagcctctattacaacgtctgccctgtaaccacagaaatctataaccagtctatttaaaccatcaggaataggaatactacatttagtcttcccagaaacaagtactgctaatagcatctgcatatgtgcgtcttaaactttgcttcattttgaactctactcctaccctgaaatcagaaagtctttgt

SEQ ID NO: 153250 - DNA, 517 bp, Homo sapiens
atacaattaaatcatgattttatttccacttatgaagagaggttctctcaaagcattcaaagcctatgtccaaggcacaatttgcttatagaaagaatccgaaggggctgggcccacattttataatttttagagagtttttacagcattatctatttagtcctcattaaaacaccagacacttgccatggactgtggcgggccttgtgggcctgaagaaaattatccatccttgcaaatgtcttctgcagagatgcctcacacagagactgtctctcctcttccttcctccatggatctgcttattcaggacagcctctgattattccaccagtcccaaaggcaaacaacccacttctgcagagaatagtgtcgccaaaaaggaaaacaaggtcccggtcaagaaacagaagaccagaactgtgttctcttccacccagctgtgtgtactcaatgatagatttgccttatttattaatgttcctaatcacccacagtgtatattacatacatgtag

SEQ ID NO: 153251 - DNA, 392 bp, Homo sapiens
ttttaagtgaaaaaggaaactatagaaaatgcatggcatgttaacttttataaaaactaactgttgcagtgtcttactacttcagatctatggggcttgctttgccactgatcgcgccttgaccagttgtaacagccacttgtgatcctctgataaccacacccaccccgctgcaaacctttctgaaagcatttctggttgaggcacactggtgcccccatcagtccttctgcccaagtctcccagttcttttgttaatgacatttgatgacttccagagtaccaagtcattctcttacattaaagcatacattaagaatattgaaatgaactgttaattccttatggaaaacttaattttaggtatccatttccagcttctctcttcctct

SEQ ID NO: 153252 - DNA, 337 bp, Homo sapiens
ctgagtgtgtgtgcggccgctcctccaggcctggccgtgcccgatcaggacctgctccactgtttaacactaaaccaaggtcatgagcattcgtgctaagataaacagactccagctcctggtccaccctgcatgtgtagagagggctgcgtgtgtgagctgggctgcgtgtgtgagctgggttggtgtgtggtgtgggctctcttcctggcttagagacggccaccttcgtgctatgtcctcacatggcagggagagagagggagaaagctctctagtgtctcttcttatataccatcatgaaggctatgacctcctctaaaccgaattatatcct

SEQ ID NO: 153253 - DNA, 461 bp, Homo sapiens
gtgattctcctgcctcagcctcctgagtagctgggaccacaggcatgcaccaacacgcccagctaaattttgtatttttagtagagatgaggctttaccacattggccaggctggtctagaactcctggcctcaagtgatccacccccatcagcctcccaaagtgctgagattacaggcatgagccactatgcttgtccgtcttttctattccttttgctagcatcctattccctcttcaggtgataagtcagtggtctactggctggattcccaggttctggcctctctgtctgcttccatatggtctctcagtgcttgattaatcttcctgacctctctctctgtgtccatgtggtctctcagggctggattaatcatcctgactgcaactcggatccaccctcccttcttctgagacgccctcatggttttcttggttcttacagcaccaaattcaga

SEQ ID NO: 153254 - DNA, 274 bp, Homo sapiens
gtgaggaagcaaaaaaggttagtgacccgacagaaactgcaggaaatggtaggattaggataagccattaccagagtaggtatgtcttaactcgggtggggtacaaggttggatatcagcatcccatttacttcaaaagatggccccaaaagaaggaaatgttggggagcttggctattttaagttattccaatagaagatctttcactaccccaatgacttacaatatatatgcatttgaataggctatacagacaccttgcttgttcttaag

SEQ ID NO: 153255 - DNA, 528 bp, Homo sapiens
gtgagccgagattgcaccactgcactccagcctgcgtgacaaactgagactccatctcccaaataaataaataaataaataaaagataatattacctaccccatgagtttattatgagaattaaataagagaacatattaaaaggtttcattcagtgccaggcatataatatgtactcagggaatactagttttttttaaataaaattttaaaatgggattagaaggtcaaagcatataggcataaaggtataaaaaatattgaagatgagtgagttactaaaatttaacattacgtttagctctgagcttcctaattagcacaacatgctaagtaggttatatttgtatctaaagtaaagattggcaaactttttatatcaagggttaggtgacaaatgttttcagctttgcaggccacacagctctgtactgcttgtcagttctgcctttgtatctggaaagtagccatagataatatgtaaatgagtgggtgtggctgtgtgccaataaaactttatttacaaga

SEQ ID NO: 153256 - DNA, 503 bp, Homo sapiens
tccagctaccactgcaaggacggtggggatgagacccccagctgaccatgacacctggggaccccacgagctttctggaactgcttccaccaacactcacgagttttacaagtatgagaatgacaaatactaaaattgaatcaagaaaaaggattcagaaatgtgttatttttaaaacatacgtctgataggagtgtgtgttgctgtccttctggatggtgaactctgctctgcccagataccaaagcctcacccacttcctagagggtcaaagacttctctaaattcaaagttttgaatttaagcctaatcaaatgaaacaatcgaagcagggggagagctggaatggacagaaccgctaatttccagagtttgagccttgttaactatgtactttcaaaccagtcctcactgtctcccaagcgaccgtaaacaaaacctatttcagaaggggtttttttttttgccatatcattaagtagtcagtttatggaaatgaactg

SEQ ID NO: 153257 - DNA, 1093 bp, Homo sapiens
tcatttttttttaagtgttatctttcggatcctcataagcactatgtgaggcagctgtcaccctgattttacagaaaggtaactgcagcccagcacagtgatgtgacttagcccaaggtcactccacacattacctcatcacctacttcatttgcagagaaaataaaagctgtcacaggagagctcctgcggccactaattcccaagcatctgcactgttcttgtctcctctcctgtgacagtgggaagtttgcctctgtccacccaaagcccctagcgctcatccccgcccaccttggcagagctttgcgttctaatgtgtatgtaactcttcaatatccagaacgctccaccctgccagacccttcccagcgacgtctcagcacactggtttctcttctgccctgtcaaagcctctcttctgccctgtcaaagcctctcttctccctgttgcccctgccttcttttctcttctttgcagccaaacttcgactaattctctaaacttaactttccccattttcttatctctcactcgctcttcagcctcttccctgctaactccctcttctctccaactcagcagttggggtgacaggtggcctgcagctttcaggcctcatcttagccgactgctcggcagcatctagcgctcctggcgctcttcccgtttgaaacactattccagggctttcctgacacttctctctcgtagttttcctcaaacccttctggctgttccttctctgtctccttcctagtactgcctcttctggaccaccagtaaaggtttgtggagtctctaacctgtatcctcctgccctcactccatattctctccgcacccaccttggatttctgaacatgaacatccagctctcttgttcttgacgttctccacttggcataccttaaagacctcagactcgatgtgcccagcccctcctccctgcgcccaccaaagctggccctccgtcagtgttccttatctcacacacagcacccccatgtcatcccggacagctccctttgaaagggtgctcgtccctctcctccacactgtcatcagcccctctctgcctacatctgtaag

SEQ ID NO: 153258 - DNA, 189 bp, Homo sapiens
tttctggttgttcccgatgtactttgtctgtcctcgtggagtttcaccctacagcaacatattcaaggtgactccatgcagatttccagaactctttctctgcctagctccctcatctccagtactgcaacccacaaatgtcccacacctgcactacaaattgtcatccctgtggccccaaatcattaa

SEQ ID NO: 153259 - DNA, 596 bp, Homo sapiens
tttacttctttatacttctatgcctgagaaaggcagttaaagaaaggagcagtgaagctgcctgactggagacagctaaccacacagcaatttaaaaatctgaatgggaatactaagtcatcttctcctgtcttttaattttagacactcctctactatagtaaaggtagaatccctcaagtaaatctctcaaaagataagaaattctgtgactgccattctgttcaagtgtctatctcacctcacctttgcttttacgttgtctcttctaaaaatccaacattctttatggtactactcttccctaccggaatatgtgtgatatgctcatgcttctaacagaataaaaggaactttggtttttgttgttttttaagcaacctataactaattgaaaagtttccctaatatccagctctatgctaggccatgcagagagtaagaaaaagaaataaagtgtcctcatgcacgcagtggagcatctctaggggcagaaagacctggtttaatttttatctctccactaatcagcgctgtgaccttgaatgaattatgtaaacagagcctccgttttttagagatctaattctcaattt

SEQ ID NO: 153260 - DNA, 858 bp, Homo sapiens
gagaaaccagcttcttgcagttcaggagattttcagtgaaggaggtgatatggtttggctctgtgtccccacccaaatctcatcttgaattttacctcccataatccccacatgtcatgggaggaacccagtaggaagtaattgaatcgtggaggctggtttttctcatgctgttttcatgatagtaaataagtctcataagatctgagggtttataaaaggcagttcccctacacacgccctctttgcctgccaccatgtgagacatgactttgctcctcatttaccttccaccataattgtgaagcctccctatccatgtggaactgtgagtcaattaaacctcttccctttataaatcacccggtgttgggtatgtctttattagcaacataagagcagactaatacaggaggagaaatcaaccagcccttattcaacagtgaatgctggcagggaagactagagtctgacagagtcccagatgaaaagcaaattgctcagcccaacagtactctcctcttccccaacctccaaattatagtgagaaggagatagtagaggacaggctggaaaaagaacataatcacatcatctctcacattctcgtgatgcttggattcaaggtatatgtcagattgaattctgaggtgaagctacagcccagcctccttccagtttaaatattgacatggttaaaaagtctgcaaaggaggttgggagtgtggttaatcacaggtgaattcaatttaattaaagctatgattcagtaccagctcaacccccttctaggagatagctaaaccattagttccttcagcagaagttacactctctggataataaacaaaacaaaaa

SEQ ID NO: 153261 - DNA, 357 bp, Homo sapiens
cctggagccaggtgtctgttgacagtggggaggaggtggggaagacccagccggccgagagcctcagccaccttcctgcaggaggtcctcacaccccagacggtcagaatgctccccagactgaggaatcagctgcacatccccctgatgtctctaaagctgaaatctgcttcctgggtttagccaccattttcattgagcagttctgaggattccttgtgggtacttgtgatcttggtggagatgcttcatggtgttgaccctattgttttgaatacctgacagctggatggtccaggccctatttctatgatctgttttttggaactgttgtatttgtgtgacacagtgatggag

SEQ ID NO: 153262 - DNA, 433 bp, Homo sapiens
ggctgaagcaggaggatcacttgaggctacaaggcagaggctgcagtgggccatgactgcaccactgtgctccagcctaggtgacagagtgagaccctgtctcaaaagagtaatattgtacacacagtacatttcaaaaactgcatcaatcaaaacatttaatcacaaaccagttggctgggcatgatggctcacgcctgtaatcccagcactttgggaggccgaggcaggaggatcacgaggtcaggagttcgagaccagcctgacaaacatggtgaaaccctgcctctactaaaaatacaaaaatcatccagggttggtggtacacgcttataatcccagctactcaggaggccaaggcaggagaatcgcttgaacctgggaggcagaggttgcagtgagccaagatcacgccaccacactccagcctggg

SEQ ID NO: 153263 - DNA, 345 bp, Homo sapiens
aatcagctaaaaggataactggaagaagagtatgataactgttgctatacttcgctgtcattttgttacaagcagaagtgtcatgtggctaatggagtaacataacagattcctgccaactgtggccatgactcactctcttttgaattctgtgtgcaggaggtagtaagactgaacaagctcactcacactacaatcccagggaagtcaaggagcaagaaagccacagcatatgagagcagcagagtaaaatcagtaaacaacggcaactaggttacaccactgtcatgttacctaccctgagacatgcagaagtcaagattaaaagctgattactagttaaaa

SEQ ID NO: 153264 - DNA, 234 bp, Homo sapiens
atggactggatttagtgactcacttctaatggatagaataaagcaaaagtgacattgtgtgacttcagagactaagacatacaaggcactgtggcttcctgttctctcttatgcttgcgctctctctcgcacgctcattctctctctctctctcccccttcctccatccatcctcctgccctcagaacacttgctctgagggaaaccggctggatggacaaagggggatggaca

SEQ ID NO: 153265 - DNA, 962 bp, Homo sapiens
caatactcctgcctcagccccctgaatagctgggattacaggtgcctgtcaacacggctagctaattttttgtatttttagtagagacagggtttcaccatgttggccaggctggtctcaaactcctgacctcatctgatttccccaccttggcctcccagtgtgttgggattacaggaatgagccaccaagcctggcctgttcaatttatttggaattttaaaaattatacactttttattgttgcttttgaaaattttataatttttttgatggggccatgttgccctaatattttgtatacattgtaatctttgagatttggacatgaacaaaaagctacctgttatgatttttataatatagctctgtcctcgcatagtctgaaaatcaatcgtcttggatagcgattcttggaatttctcaaacatatttttaggatgtgtcttgtctaaaattttgtgttgtttagttaaatcggcttattcttatttcttcttaataaatcagtaatcacttgctacacccattccgtgtttgggatactgcagtttctttgcttctgaaacatttacctttagactcaaagtgtcattccaacgtatattaccatttcatgtcgtgggagacattaaccagtattttaaaaagcccctagaggccgggcacggtggttcatgcctgtaatcccagcactttggtaggccgaggcgggcggatcacgaggtcaggagattgagactatcctggctaacacggtgaaactccatctctactaaaaatacaaaaaattagccgggcatggtggcgggcacctgtagtcccatctagttgggaggctgtggcaggagaatggcgtgaacccgggaggcggagcttgcagtgagccgagattgcgccactgcactccagcctgggagacagagcgagactctacctcaaaataaataaataaataaaat

SEQ ID NO: 153266 - DNA, 763 bp, Homo sapiens
gtagaaaccccctgggtcatgtcagatttagaaaatataagcaatggctcatacacgaattttaagttgtaacctacatgtgataagttgctttatcttccaaatgtaataaaaaccagaagttactttgaaataaattgaaggattagcagtggtgactgaggaataaaaattataatttaaaattgtccttaaagctggaattcttaacttattgaccttatatcctacatattataggactttgtaaatttaggctgatatggaaatgtatatttatatcaaatttaaatttttagaatgatggtgctactatattctaattgttaatttgataattgtaattgtaatttgttaatttgttctaataatattttcatgacattattcatttgctgcttggcttgatggcataacaagtatgggttatttaccctgaaaaggaaacagtatcacccttccagaatctctatttacagctacagaagatgcaacacacctgtttctggaccacttccagatcagatgtgatgcatgctttagatcatttactttgatctaggaattactgtctggcatttcgtggtgtagggtaggtgtctccagcactgtataggtgtctggaattgagataagaatcaatttcaatacaaaatacattttttgcttaaagcacgcaaggattctatgaattcaggtaaattcacagggtggaaaacaggaactaatgttatatattcctgtagttatcttcataatgaag

SEQ ID NO: 153267 - DNA, 420 bp, Homo sapiens
tgcctgggggcgtctggggggtttcctgagtgaggtggggtctcaccagctccaggagacaccactgccatgcacaaggtaggtgtgggggtggaggatcacctccgtgaggacccagaccccacccactgtggctgtggtggagactgcaggtctgtctcaaggccccaggcctgacacctgcaagaacagaacctgggggtgacggagaggggattccaccaggccagcccggggcttgaaccccagccagggcagctgctgtctgctgccccaccaggtaacgcaccgacccagctgctgttcagctccccctctgggccagcaccatgctcatggcataggccggctgggccctctgagacccccactcccacacagactggtctgcatggaggctggtgcagcctgtgccgtaca

SEQ ID NO: 153268 - DNA, 376 bp, Homo sapiens
gtgaggcaggagactggggtaagaaaccaacagcccagagctctgggtcctaatcagctctgcagcccaggacaagccccccattccctctgggcctcagtggtcttatctgtactatccaagtttcacggagcactcagtatataccaagcacagtgctaagcactttgtgcacattaaaggatccagccccaaatcactcagctaaacaggggtgaagccaggatttgaactcagagccctggctcttaaatgcccagggctggcctttcagagcttgttagctctctcaggaaccccaccctacatggagatctgtgaagccaaaccacaaacctgtctatgcagtggcctttttctacataccactgtcttt

SEQ ID NO: 153269 - DNA, 281 bp, Homo sapiens
ccttcttctgtcccctctccttcccctgtaatccattctccacatagcacccagagtcatctctttataaagtaaatcaattatgtcacatctctgcttcaaactctcttttggcttctctcattgtaaagagtaaaatccaaatgtttcccttggcctatgagggtcttcctgacctggctcctgcccctaaagctcactcctccaactctccttctccctcacctaactccagccacactggcattccaactgtgcctccaacacatcacacctgttcc

SEQ ID NO: 153270 - DNA, 187 bp, Homo sapiens
acctgggaccatcataaccactctggtattttttaaccaacctgaaaaaactccccccagaatttttcaattggtcataaatttaaagcatctaaccgaccccagtgcctcactccttttacagacgaagcaggctctcatgcatgggtgtggtgccatatggtgcccaagctctgaaccacgccct

SEQ ID NO: 153271 - DNA, 216 bp, Homo sapiens
agtcatttgatgcaagcatcacaaatgtaattaagcagctatagttcctagaaagctttaaggctttatgcttcttgcaaccctacctgactttctaacaggattgcttggctagcacctgcttgatatgagtgaacctgggagagagaactccacatttttgtgcagcagtgacaccagatagaagagacaggcaactcgggctcaccagcacct

SEQ ID NO: 153272 - DNA, 427 bp, Homo sapiens
ggttctcctgcatcctgggaactgggaaggtaccttatcctgttttcttcaatgggagaattgagtttcagagaagctaaaagacttgctctcattccataaattgttggaggcagaggatgatcttgcatgcgggtttcccaacaccctgtccaggactcttttctcctataccaggttgattttttttctaagacatgtaaagctggtgaatggacatgcagaaaagtaaactgggatgagtgctcatttaatacccagaggcctttttgcagccccccagttctagtccctgggggaaagatcaactgtcagggataaagctgggttcattgaattacttaggaatacaattacctgtcagttctctaggcttctgtgcaaagccattttctaggcaattagggtactctagatcaaaatgaga

SEQ ID NO: 153273 - DNA, 685 bp, Homo sapiens
aaaaatggagagttagaaaaataaaatttcccagctcatcggcagcccatcctgttggtaaaggactgctccctctggtccattactgcccattacttcctccagctccacgtcaatgactcatgccaaaacctccatcacttccctttggagattattacacagcccagcagacatcctattaagaaacttcttattagcagaggaaaaggaaagttttcacgttgagatcgagaaggaagatgattcatggtcacgaagggaaaggtcccctgaagtcttgagagatggctcaccactgctccactttcctttggggacacacacactcaccattagctgtgggaagtcgatggggtgtgtggagaggaccatactcaattaaaagaatgacagtggaatcagtaattttgaatcaagctcagcgatggattacaaaagcaagagtgtagactcctaactaatgtagggtggaagttgaaacgtgaaagttgcctgtcctgagcacgtttagagttcacaattcaatattcaagaagaacgtaaggctagcagttgctatagttgggacaggaaatgactcaagtccaaaaggaaggtttctgtagatacaaggtcaagatgagaataggttctgccacgggaaatgggaagaacacaaggatagagtctgcatcatccccaa

SEQ ID NO: 153274 - DNA, 529 bp, Homo sapiens
atacagatagtttgactaatgtagatttccttcatagatgtaaatttgttttacaaaaggacagcttttcagagctactcctatgtctgcagtttttcagaataaccagctcaaaatacgccaaagaagtatattttgggttggcatattctggtctcctacattcatattttggggtggtgtgcatgagccaccatgcctggctggaaatctgtattttaaacaggtactccagggggttctgatgtaagtggctctgggatcatgttctgggaaaacttagttttctcatctgtaaaatgagaatagcaataaaactcaaaagtgttgatagaagcattaaatgtaattaatttcataatacacatgttagaaagaacataggattgagggtctgcactggagggctttagtcctaaatctgtctctaacttgctctgtggccttctggaaggcactcaacctttctgtgattcaatttccttgtgtgcaaatggaagggaatggcgctgctttctctctatcacgg

SEQ ID NO: 153275 - DNA, 796 bp, Homo sapiens
  misc_feature (37)..(37): n is a, c, g, or t
  misc_feature (44)..(44): n is a, c, g, or t
gccgctccaccgaccaacaccaacccactcaagtccnccccacncccccccttcagagatgatcagctcactagccacatcaaaggtgccaattctctaaagggtagactctgtgcagctttgaagcctggaagacaatacctaccaacatgtcaaagccacagtggagcatttctgctatgatgaagattaaatagaagaataacagttccaggataacattgattcctgacaacagcgtgagatttcaacagaacttgtttggaacaaatactcacttaaaacttcagcagaagaaaaattacttagtccttaggccaacaaatttaactgcagtgtcatatgtttcacaggccttcctacatttagaaatcgtcacacagctgtgataagagtagattattttactacaaaataattggaacagatgaaaacataaaatgtgagaaactgaatgtattattcaggaagaatattgagtgccttcatttaactaaagttgaatgtaaaagtcaatttgcacttctttataatcctctggtttggaattataaattgttaaaaccttgatgttgtcatttaattatatttcaggtgtcctgaacaggtcactagactctacattgggcagcctttaaatatgattctttgtaattctaaatagtctttttttctctttttactgcaacttaacatttctgtttggaacacagaaaatgaaaatattcagaataagttgtacatttgatgacaaataaatcactattaaaataatttacactttttttttttacaa

SEQ ID NO: 153276 - DNA, 796 bp, Homo sapiens
  misc_feature (48)..(48): n is a, c, g, or t
  misc_feature (56)..(56): n is a, c, g, or t
ttgttatctttctcttcaccagtatttccacgtagtcacgaagttagnagagaacnagatgatcagctcactagccacatcaaaggtgccaattctctaaagggtagactctgtgcagctttgaagcctggaagacaatacctaccaacatgtcaaagccacagtggagcatttctgctatgatgaagattaaatagaagaataacagttccaggataacattgattcctgacaacagcgtgagatttcaacagaacttgtttggaacaaatactcacttaaaacttcagcagaagaaaaattacttagtccttaggccaacaaatttaactgcagtgtcatatgtttcacaggccttcctacatttagaaatcgtcacacagctgtgataagagtagattattttactacaaaataattggaacagatgaaaacataaaatgtgagaaactgaatgtattattcaggaagaatattgagtgccttcatttaactaaagttgaatgtaaaagtcaatttgcacttctttataatcctctggtttggaattataaattgttaaaaccttgatgttgtcatttaattatatttcaggtgtcctgaacaggtcactagactctacattgggcagcctttaaatatgattctttgtaattctaaatagtctttttttctctttttactgcaacttaacatttctgtttggaacacagaaaatgaaaatattcagaataagttgtacatttgatgacaaataaatcactattaaaataatttacactttttttttttacaa

SEQ ID NO: 153277 - DNA, 809 bp, Homo sapiens
  misc_feature (55)..(55): n is a, c, g, or t
  misc_feature (69)..(69): n is a, c, g, or t
ctccccccccaaaaaagagaggtgttggtatacctcccatttacaacgccaaccncttagaggagcagnagatgatcagctcactagccacatcaaaggtgccaattctctaaagggtagactctgtgcagctttgaagcctggaagacaatacctaccaacatgtcaaagccacagtggagcatttctgctatgatgaagattaaatagaagaataacagttccaggataacattgattcctgacaacagcgtgagatttcaacagaacttgtttggaacaaatactcacttaaaacttcagcagaagaaaaattacttagtccttaggccaacaaatttaactgcagtgtcatatgtttcacaggccttcctacatttagaaatcgtcacacagctgtgataagagtagattattttactacaaaataattggaacagatgaaaacataaaatgtgagaaactgaatgtattattcaggaagaatattgagtgccttcatttaactaaagttgaatgtaaaagtcaatttgcacttctttataatcctctggtttggaattataaattgttaaaaccttgatgttgtcatttaattatatttcaggtgtcctgaacaggtcactagactctacattgggcagcctttaaatatgattctttgtaattctaaatagtctttttttctctttttactgcaacttaacatttctgtttggaacacagaaaatgaaaatattcagaataagttgtacatttgatgacaaataaatcactattaaaataatttacactttttttttttacaa

SEQ ID NO: 153278 - DNA, 798 bp, Homo sapiens
ttatccagccagcagccaagcgtatttcccgccatacaaaacaccttataggagaagcagatgatcagctcactagccacatcaaaggtgccaattctctaaagggtagactctgtgcagctttgaagcctggaagacaatacctaccaacatgtcaaagccacagtggagcatttctgctatgatgaagattaaatagaagaataacagttccaggataacattgattcctgacaacagcgtgagatttcaacagaacttgtttggaacaaatactcacttaaaacttcagcagaagaaaaattacttagtccttaggccaacaaatttaactgcagtgtcatatgtttcacaggccttcctacatttagaaatcgtcacacagctgtgataagagtagattattttactacaaaataattggaacagatgaaaacataaaatgtgagaaactgaatgtattattcaggaagaatattgagtgccttcatttaactaaagttgaatgtaaaagtcaatttgcacttctttataatcctctggtttggaattataaattgttaaaaccttgatgttgtcatttaattatatttcaggtgtcctgaacaggtcactagactctacattgggcagcctttaaatatgattctttgtaattctaaatagtctttttttctctttttactgcaacttaacatttctgtttggaacacagaaaatgaaaatattcagaataagttgtacatttgatgacaaataaatcactattaaaataatttacactttttttttttacaa

SEQ ID NO: 153279 - DNA, 798 bp, Homo sapiens
  misc_feature (58)..(58): n is a, c, g, or t
ctcttatcctccctttcatatcgtactaccacccccacagcaatctcacagtaacagnagatgatcagctcactagccacatcaaaggtgccaattctctaaagggtagactctgtgcagctttgaagcctggaagacaatacctaccaacatgtcaaagccacagtggagcatttctgctatgatgaagattaaatagaagaataacagttccaggataacattgattcctgacaacagcgtgagatttcaacagaacttgtttggaacaaatactcacttaaaacttcagcagaagaaaaattacttagtccttaggccaacaaatttaactgcagtgtcatatgtttcacaggccttcctacatttagaaatcgtcacacagctgtgataagagtagattattttactacaaaataattggaacagatgaaaacataaaatgtgagaaactgaatgtattattcaggaagaatattgagtgccttcatttaactaaagttgaatgtaaaagtcaatttgcacttctttataatcctctggtttggaattataaattgttaaaaccttgatgttgtcatttaattatatttcaggtgtcctgaacaggtcactagactctacattgggcagcctttaaatatgattctttgtaattctaaatagtctttttttctctttttactgcaacttaacatttctgtttggaacacagaaaatgaaaatattcagaataagttgtacatttgatgacaaataaatcactattaaaataatttacactttttttttttacaa

SEQ ID NO: 153280 - DNA, 805 bp, Homo sapiens
  misc_feature (1)..(1): n is a, c, g, or t
  misc_feature (60)..(60): n is a, c, g, or t
  misc_feature (65)..(65): n is a, c, g, or t
ngaagaggggagagaagaagaaggtggagtgtgttaggggggtaaagaagtaaagaaggncctgnagatgatcagctcactagccacatcaaaggtgccaattctctaaagggtagactctgtgcagctttgaagcctggaagacaatacctaccaacatgtcaaagccacagtggagcatttctgctatgatgaagattaaatagaagaataacagttccaggataacattgattcctgacaacagcgtgagatttcaacagaacttgtttggaacaaatactcacttaaaacttcagcagaagaaaaattacttagtccttaggccaacaaatttaactgcagtgtcatatgtttcacaggccttcctacatttagaaatcgtcacacagctgtgataagagtagattattttactacaaaataattggaacagatgaaaacataaaatgtgagaaactgaatgtattattcaggaagaatattgagtgccttcatttaactaaagttgaatgtaaaagtcaatttgcacttctttataatcctctggtttggaattataaattgttaaaaccttgatgttgtcatttaattatatttcaggtgtcctgaacaggtcactagactctacattgggcagcctttaaatatgattctttgtaattctaaatagtctttttttctctttttactgcaacttaacatttctgtttggaacacagaaaatgaaaatattcagaataagttgtacatttgatgacaaataaatcactattaaaataatttacactttttttttttacaa

SEQ ID NO: 153281 - DNA, 761 bp, Homo sapiens
  misc_feature (1)..(1): n is a, c, g, or t
nactgagtgacactgcacaataagggtaaagcgtatctagacaaagatggcggcaaatggctaaaggagagacagtgaagaactagtaggacctggaagacaatacctaccaacatgtcaaagccacagtggagcatttctgctatgatgaagattaaatagaagaataacagttccaggataacattgattcctgacaacagcgtgagatttcaacagaacttgtttggaacaaatactcacttaaaacttcagcagaagaaaaattacttagtccttaggccaacaaatttaactgcagtgtcatatgtttcacaggccttcctacatttagaaatcgtcacacagctgtgataagagtagattattttactacaaaataattggaacagatgaaaacataaaatgtgagaaactgaatgtattattcaggaagaatattgagtgccttcatttaactaaagttgaatgtaaaagtcaatttgcacttctttataatcctctggtttggaattataaattgttaaaaccttgatgttgtcatttaattatatttcaggtgtcctgaacaggtcactagactctacattgggcagcctttaaatatgattctttgtaattctaaatagtctttttttctctttttactgcaacttaacatttctgtttggaacacagaaaatgaaaatattcagaataagttgtacatttgatgacaaataaatcactattaaaataatttacactttttttttttacaa

SEQ ID NO: 153282 - DNA, 239 bp, Homo sapiens
tctcatggggggtactacggggatgatcgtcgtggtggcaaaggaggtccgggttaacccgggaccgcctttgaatattatcactcaaacttgtaatagatgatataaatttatctacacaggttgagtgtttcttttctttttttttttttaatggagtctcactctatggtccaggctagagtgcagtggtgcgatctctgctcactgcaacctctgctgcccaggttcaagtgatt

SEQ ID NO: 153283 - DNA, 533 bp, Homo sapiens
cctagctactcaggaggctaaggtgggaggatcgctggagctcaggagtttgagcttgcagtgaactgtgattgtgccgctgagctacagcctgggcaacaaagcgagacccagtctctaaacaaacaacaacaacaacaacgaaaagaatgcacagcaattctaatgtaaatgcaccaaacaaaaaagctgtaaaatacatgaagcaataactgttagctatgaaaggagaaacagacaaatccacaattatagttagagacttcagcacctctctcaacaactgaaaactagaccgcaaatcatcaaggatatagagaactcaaaagcacctttaactagcaagctctattagacatttacagagcaccaacaacagtgggatatacattctttttcaagtacacatgggacatataccaagatagactatatcctcagccataaaacaaaccgtgagaaactcagaattaaaatctgtatgattttaatcaatacagatcgaactagaaatcaatgaaagaaaggtaaca

SEQ ID NO: 153284 - DNA, 351 bp, Homo sapiens
ccttgaaataagagaggatgtcctaaattaaaacacgtaaatgcctctccaagagttcaaataaaatttcattttaaaagcaaaaggcataaacttgtcacctcagtttattactgagtgcttttgaacttctcagaaaagaactctataaactcatgagagaaatatgatttatgatcccctccttctcttcttttccattctgtgggaggaggtacagtcaggatcagctagggaggcagcgttgggatgagggcaagaccccacaggggagcagcaggccagggcgccaggccaggcccagcctcagaccaggcatgggcgcatctctccagctttctgagcctctct

SEQ ID NO: 153285 - DNA, 181 bp, Homo sapiens
atgcttggtttttgagttttactatcataccaacttttcccatgtgtgcatgtgtgtatacatgtgtatgcatatcagaaaaactgaaatactatttctgctcaattctattttgtgaagtcaatccaacttttatagtcccataaatatcaaataaatgaaataattattgtcactaaag

SEQ ID NO: 153286 - DNA, 520 bp, Homo sapiens
  misc_feature (377)..(377): n is a, c, g, or t
gcccagctcagaaatcagcgctgatcaaataaagcacacattccctttggcactaaatttgactcggcagcgtctgtacagggatcctggcaaaaccagaacattcagcctttagaatcactggggattggctcaccgctgtgtggaagcacaactgttatttctgaatgccatccacgtggctcagccactgagatgaagcaccattcagaagaagcaaatgtgtgctctatgtttcacccagtctgatttcgccaagatcacacagataggttctacaaagaaagcactattgccattatcatcgaaatacaaatctacttttggaagacaagtgccttataaatacaccaattgaaaaacaagcaaagtgaatntaagctacggtctcactctgttgcccaggctggagtgcagtggtacaatcatggctcattgcagccttgacctcctgggctcaagtgatcctcctgcctcagcctcctgagtagctgggactacaggcatgtgccaccacact

SEQ ID NO: 153287 - DNA, 786 bp, Homo sapiens
ttatttataagtaagggtgaaggaaatgcacctttatgaagtccctgaagcacccagggactgtaccagatgccttacaggtgtacatatgtactaggtataaaggttagtttcctaatctaggtatgtgtaaatcctcatcttactttatttccttgagtcaaagtcaattccaagtcaccattccattgagataatgaaaagcccaatggtggatgcctcctcctagtcaacatctccccccaaattataggaaggcacacagagcaagatatcatctcatgttcacatggcccacgaagtctggccatgccaagcttgggcagaggaatcttctgcaagatggcagcttccactgttacggaccagcctccatggtgcaccagaaaggcactcccctcaggtgtcctcccaccttgctggatgttgccaaaaataaaagaacaagattcctctatttctggcacccacagcttcctgtctcctttcaaatcctgcgtaattacccttctctcaaaggcagtagcttctctctagtacctacagcataatcgcctcaagaaaccaaggcttccagaactcaaacccaggaaggaatctaggaggattccagaaatcaagcccaggaatgaatcaaacccagctgcactcaactctggacttccacggtgcctcgcgagactggctttgctaaggcaagggcttctgggtggagttaataagaaagcagcatgaaaaggtgctttgagacacgacacatcgtttcctgctaacgatcaaagaata

SEQ ID NO: 153288 - DNA, 458 bp, Homo sapiens
gaggtttccacatccagggtggtgtgaggcctgcggaggcgagaaaaccaggctcccctcctcccccgccaggagggtatgtccccatcatcctcgttgttggcctccagctcaacgtagaactcggagaagttggcgatggaggcgaacatgaccgccacacactcacaggactgatagtagagctcatcattgcgccgctcgcgggccaggaagtgagcggacacgtccttgggcaggatgttgtgcagcagccgccggttgtaggcctgcagctcctccatctcctctttctcctctgtggcctgagagaaagagactgcaagtcacccagatgccaatgtgagcccagatgtcggcccctccacctcctcctctccgtggcctggagaaaaagcaccagcatgaattcccttagcaccagcgcgaattcccttagcaccagcacgaattctctt

SEQ ID NO: 153289 - DNA, 341 bp, Homo sapiens
caacatggcaaaaccttgtctctaataaaaatacaaaaattagcttagtgtggtggcacacgcctgtaattccagccacttcggaggctgaggcaggagaatcacttcgaaccgggaggcggaggttgcagtgagccgagatcgtgccactgtgctccaggctggtggacagagcgagactccatctcaaaaaaaaaaagaaaagaaaagaaaagaaacaaaaattgcttaactagacatgtcatgcaattttggagaagagatgagtggtaaatgtgactccagctttactaaacagtgaaataaattaaggcaccaaagcatgctgagccttgtctaaa

SEQ ID NO: 153290 - DNA, 512 bp, Homo sapiens
aatctcagctgaaatcctggtgtttttatgagatccctactcattaatgggttctgaactccaaattttatctgttttgtgtaccatacaactagcacaatcaccactctgccttatggatgccttatacttggtgtcttggcctcttgtcctgcttcctgacaagtgtggcaaataccttgagtagagtatttcctctcctgagtttcaggcctactttattgttttcccctcctcttcaggatcatgaccctcagttctgtctgtcttgacagtcccaaactcgaatttttgtcttaccacccactagagattgcaaaaagttatgttggcttctctgcctcttagtagtagtccattgcccagattctcagcctcttacccgacacaggaatttgcaaataccctagggagaaaacgactttttgaatgtcagtttagctctttaagatcctcttctctctgagaccttctcttgtcaaattttgactaccttgtcagctctctcatcc

SEQ ID NO: 153291 - DNA, 266 bp, Homo sapiens
aaaaaaattctaaatgtaacattatctgcctagcatcatatagtaatattcacataggaaaactgtaaaacaaacatattttggttctttatcctaaagctcaaaacgtatccacaaaggggctaatggcaaatattcctaaccttgatggtgaaaaaaactgctaagatatcaaattttactaggaataggcaatggagccacaactttttgtgttttctacatggtcaaatactcaatattctaaattttgatatgaaaatatt

SEQ ID NO: 153292 - DNA, 354 bp, Homo sapiens
gcgcctgtaatcccagctactcgggaggctgaggtagggagaattgcttgaactcgggaggcggaggttgcagtgagcagagatcgtggcacttcactccagcctgggtgacagagtgagactctgtctcaaaaaaaaggagagttcttccgcctgggaggatcgaaggttgtgagccaggaaaaaggagctggagagtgggcacatcttggaagctgaggcactgccaaagccaaggagtaactgctaactctgggagccagtggctctgaaaagtgctcccctagctggccctggtgcctgacacccaggagggtgggttagagccagtgccctctccccacccaggcacac

SEQ ID NO: 153293 - DNA, 221 bp, Homo sapiens
ggggtaccagcttacctcggatatgagggagaattggaacagatgtcccccatccacacctacaccctgcaatcattctgtcagagtgcaggtctgatgccatcgtgctcccattcaagcctctgttgcccctcacgtgccagccctccataacatctcctcctgcccattcagcctcatccttcaatgcctcctcatcaatgaagggcaaggatccttct

SEQ ID NO: 153294 - DNA, 656 bp, Homo sapiens
acagtggaataaaactagaaatcaactcctaaaggaaccctaaaaactatacaaatgcatggaaattaaacagtctgctcctaagtgatttttgggttaagaacaaaatcaagatggaagtgttaaaattatttgaaatgaatgataatagtgacataagttatcaaaacctgagatacagcaaagcagtgctgagaagaaagtttatagcactaaattgctacatcaaaaagtctgaaagatcacaaattgacaacgtaatgtcacacctcaaggaactagagaaacaagaacaaacccaaagttagtggaataaaagaaataacagaagatcggagcagaattaaatgaaattaaaacaaacaaaaacagtaggccagatactgtggctcatgcctataagcccagcactttaggcggccaaggcaggcagattgcttggtaatttgagaccagcctaagcaacatggtgaaaccctatttctacaaaaaatacacaaattaaccaggtatggtggtgcccacctgtggtcccagctgctccagaggctgaggtgggaggattacttgagcctggaggaggcagaggttgcagttagacgagactgtcccactgcactccagtctgcgaaacagaacgagattgtctcaaaaaa

SEQ ID NO: 153295 - DNA, 289 bp, Homo sapiens
caggggccgatgggctctgccctcttctgctctcaatttttgtccatcaggtgggcttggcaagtccccttgacctttctcaggaaaactttggtccgtctggccctccccgacctccccccagtgtctgctccctgcaaggtttctcatgccttcctacacacgctcacctggaatgcagccctgcccttttgtatcatgaatgtccagagtaggcactggctcgaggagaattggtgaacacgctaagtaacttccccaaaactgacaacaggcactgtaattccag

SEQ ID NO: 153296 - DNA, 133 bp, Homo sapiens
actcatatggccataattttacatctttgctctgttatgtgatcaaatgtacctaaaaactttggataggaaagttagtttccctatgttttagatgtgcttctttacaaagagaaaaagaccaagagacata

SEQ ID NO: 153297 - DNA, 533 bp, Homo sapiens
gagatgatcactcaactgtaaggacttctacatatatataaaacatcttaatatttttcatcatctttgatttcttagatgttctagaaactgatttttagtgaggaaaaactacatttatctgagttgaccagttccttcagtttcacttccatttctttttcttctgataaatttacccagcattcaatttgctacttcttgtttttaaaatctcattttgtgtgatcagaagtgtctgttcatgtctctagccatctttgtgcatagcaaggaatgctgttcacttaatattaggaggtttatttcttggggtcgtgagatttggggtgatttctctccctttttgtacttttctgtattcagtaattttttgagacaatgtcaccaatgtccttcatattaatatttggactcagaacccattttggtggtggttaaacaatcgtcacccacattggagtgcggtggtatgatctcagctcaccaaacctccgcctcccaggcttaagcgattctcctgcctcagcctc

SEQ ID NO: 153298 - DNA, 380 bp, Homo sapiens
tctttttcatttggctcacaaattccattccatacccatttttttcccctatggacagcaaagttttaaaataaatagcagcaactctgttttcctagtttaactaacatggaaacacttaatcctcttagttttcttgattttgcaaacaaggatttgtgaggataaaactttaagtagtccagtcacatggactaggtattcacttaatgaccccgaatgaaacctgttagaaaagcaaagtagtgaattaataatgtcccctagtcattttctctgccttaattttcagccacaggttgtgcaactttagtggaacctgtagatatggtcactgcgcctccattagttggaacagattctttgtatcactagctgag

SEQ ID NO: 153299 - DNA, 255 bp, Homo sapiens
agagaatcacttgaacttgggaggtggaggttgcagcgagccgagatcgcactccagcctaggtgacagagcaggactcctgactcaaaaaaaagaaaaacatatagagtaaagagatctcagtctaggaacagacttaagaggtggcaaaagagagcagcatagaatcaactatactaaaactgaaattattgtttagcaggtgttttctatcacttcattgacccactaaagtgctgtctctaacagatctgc

SEQ ID NO: 153300 - DNA, 484 bp, Homo sapiens
gcaaaaggggaagaaaagtccagtcaagacatttgccaccactcgccatttcctgtgctggccagggcagtgcctggaacactgaagttcagccactagctttggaccaagttcgcaggtagctaacatcttgcatctttcaacagctttagagccacattgccagctccaggcatcagctggctggcctgcagggagcattactgataatgccaccaaccatggtgtgccatccaactccaggggcaagcaagagaccctggagcttgtccttgacttaccttgggcatcttctggggctggacaggggaggcgggcaagtcttgtccaggctggcagaggtttcagaacagcacaggcctgcactgcaggctggttgcagctcacaggcacctggaggatggcaagagccaccatcctactaaatgcagtggcatattgcttgctttcaaatttgtgggtttttgttgttgttgttgttttg

SEQ ID NO: 153301 - DNA, 370 bp, Homo sapiens
gcagtgacacgtgttacatatgtcgtttgtatttcagagggaggggggactgtgataggttgcttgtgattcagaatcttcctgctaagaagactagtgagcaaatgtttatgacatccttgagtagaaagctaagttttttcaaggctgttatgcacacaaaaggcacataaaaatgattgctaaaatgaaggatggttagcatttttggtcttgagtaggcatcaccattgtgctgaaaggaagtccgatagacatttggttatcgttcggccctaagtaggagtcagacccttcctgatccgtgtgcctcctcctctcacctaacagcctgaatccaggccagcttgcaacgttgattttaatacca

SEQ ID NO: 153302 - DNA, 603 bp, Homo sapiens
caacgatggtcctcagctacttgggaggctgaggctgagactgcttgagtccaggaggtagaggctgcagtgagccatgaatgctccactgcactctagcctagacaacaaagcaagacctcgtctcaaaaaaaagtacatttaacctatcgtgtttttttttctctgccactgaaagaaactaaaagactttctggtacaagaaaaagctaatgaatgtctttttcccactcccccttctcttcctttgctatttcacactggagattttcttttgttttgatcctgattgccctttcaacttgaaatagacttacacgtaacaacagtaacagagctccctttccttccctgaccctttgacttacatctataaaaggagtcaagtgaatgtacctacacacctgtctgtcactacagtaacacctaataactgtacgtgtcctgtcacttagtaacatgaaactttaaatgagtaaatagctactccttacttaggcaacaccaaaaggttgactgtcaaaacatgtgaaatgtgaaaatccatggcggtacaaattagtaaatcaacatctaaaacctcagcaaacatatgaaaagcta

SEQ ID NO: 153303 - DNA, 121 bp, Homo sapiens
aagagtaaagtgcaaacacggagaaggaaaagaggatagagggtaggcagtgaggcaaatggttctattcaggggaggctttggttagtgttcagtaaatccaaattttataggtaaaaag

SEQ ID NO: 153304 - DNA, 156 bp, Homo sapiens
agtttggaggggagatgggagaggttggcttcctgaaatctgaagggcacagcagtttgggggtggtaagtttattctgaccacagagcctcatagacactcactctccctgctgcccaccttatggttcaccccgtggttctcatcagttccttg

SEQ ID NO: 153305 - DNA, 619 bp, Homo sapiens
cagctgagctggcactcacaccactaggtggagtccttcccacttttccctccccttcccagtggcagaggaacctcatcccagaggaacaagcccagggggagtactggcagactgctgctgatgttcccttcaggcccaagggctcttaagtcagtttgtggtgaatgttgcctggcctgggactcacctttcaaccacccttcagggcagtagcttctcctatagtccagggcaggttcagaaatgccatccaagagtcaagtcctggaatcagggaccccatgagcccacttggtgttctaccccaccgtggctgacctgatagctaacctggtgccaggaatcaagcagaagtagtctcgccccactccatagctaccacagctgagaatgtgcagagtctcgtaaagggtaatttgcatcatcttgctctgtcctattccccttagctaacttgaaaaatgttttttagggatggagtctgtgttatccaggctggtctcgaactgttggcctcaagtgattgttcctttttggcctccaaaagtggtgggattacagacctgaaccactgcacctgtccttctttctttcttttctgcacctgttcccattg

SEQ ID NO: 153306 - DNA, 668 bp, Homo sapiens
ctaagggcctcagctggcctggagaggggccgggaattcaagaattagaagggagggaactgcgggaagactgacaggaggggagctggtgagttcctgggaaggtgcaggtggagcgtggacagcaagtgcagcagagggagaaggcattcctgacccatgctgggacacggggatcctgcagaggactcatggttgtggagtctgctctcccttggactggggacccttcctcctcgcttgatcgcctacccccagcaggtcctctgctctgtatggcacagatctatccctgcaaatgaccctttgggcagcagtttttaggagctctgccaggaggcccttcccatggacttcctcaagcatgcagcatggccccattgattcatttactcattcattcattcaacaagtacctattaggcacctaacatgaggcagtgttctaggtgttagggatactgtagtgagtaaaacagatttttaaaaagtgctttcatggccaggtgcagtggctcacgcctgtaatcccagcactttcggaggccgaagcgggcacatcataaggtcaggaaatcgagaccatcctggctaacatggtgaaaccccatctccactaaaaataaaaaaaattagccgggcgtggtggcgggcgcctgtagtcccag

SEQ ID NO: 153307 - DNA, 564 bp, Homo sapiens
gtcagaagccagctgtctgggaaggggagatggtgtccagcaggggccctggtagagaccagacagctctctgcagagcagacaaaagaattccagagggaggaagaataagaactatctttccagctccccgttggagtgttaggcgggtggtgaaggcagcccagataatctcaagatgaaatagccctggggtaattgagatttggagactggagctccgagcaatattccttcaaaatcactggtttgcataatggagttgctgggcagccctgaaattctcggcaggctctggcttctgctcccctactgctcacacgttcaccactggctgttgcaccaggtcctaagcccttttatgtgcatctttacggcatgacccacaactgcagtcacattttcagagaaactgcaagtttgctctgctaatttaagaaacctccaaattcaaacttaccaagtagataaattaggaggtggttatttgcatcccagaaagtcttctattttacaataggattcagccacaagaatcctttaactatcagcttcttctagatc

SEQ ID NO: 153308 - DNA, 1597 bp, Homo sapiens
gttgccatgttataaaatattcttatattttcttataatgcctccatagttttattatatattcactcaatacatcatttttctatgtggtatgaggtaagaatctaacttttactgattttatctttatgcattttttttaatttaaaatgtggggtagggatctaacttttttcaaacacatataaattgtgcactactatttatttaaatagtctgttcttttcccttttattattatgctatcttatctcacttgaattcaacctaagcctgttttagactccaactaatactacagatcttcctaccactcttccccttgcataattaacttcaagcacattagcctccgggttcctcaagcacaccaaatttagtcccagctcaggaactctgtactttctatttccatgctttaatgttctttctcttgatatccttgttttcttatttccttcatttgcatttctgctttgattttctgtttctggtccatggacatttttattttctttttatagaacaaacacagcttttttacattttgtatttttcctgccattgctatgtgcttggagctcagggagggcctcaaaggatgaaattggagtatggtgtgatcagaagtttgaacttctttgtattgtatgatcatccctttaccttaatactcacatgaaatgctatctatggcttcttacattccacttcttcttaatcaatttctttcttcatgaacttaaacgttcccatcatttttgatagggtctgtgagtttatttgtccaaaaagcccaaaagcagaatttaagattgatagcatagctttgtgctcaacagttgtaatatttttttccatggtcgtctagcttcttctgttttctttgagaaatctatgtaattgttgtttctttataattaatctatcttttctctccagttgcctttaagactttttatatttgatattatgcaatttcactatgatttgtctaaatgtgcatttattttgctagagattaataactcaagtctaaggtatcatgtcttttttcaagtttagaaaatatttggctattatctctttattatcatgctgctacagcattatttgaattctttccctcagaaatttatattagaagtttgctagacttcattctagtctcatgactcttaattagtcttgcaaaattttcatttcattatcacttattgcattttaggtaatttcttaatctctgtcttccagtttactggttctttcttcagctgtatctattttattgtttaacctatttattttctatttcaatgattacattttttgagattttattagcaaaatggttaaaagcatggtttcagaggattgtctggatttacattttgcctccattatttactagctctccagttttggttaaattaattaaccttttgtgcttcttggtgtgtaaaattgaagtaacaattgtatataaatatagtgttttttggtaattaattaaaattatttgcataaaatgcttaagacagggcctgaaatgacattgagtcctcaaaaaataaattattattatcattccttcaca

SEQ ID NO: 153309 - DNA, 238 bp, Homo sapiens
cccagtatccctggacaaggcagggccacaggctgagtcccagccaatgggacttgcaggaaatgactggcaccctttctaggcctagaccctaaaacatgggtgcgacttgggcccttatctgtcagccagactcaggggtttaaaagggggcgggttccaaggcctgagaggatggcacagcctgtcggcagaagtattctgagaccctgaataacccttcttgccaccccaccaa

SEQ ID NO: 153310 - DNA, 186 bp, Homo sapiens
gaagcatgttcatttgttaggtcccatttatttattttcatttgcttcctgtcattttcctgagccaggaatgaaattaaaaattcctttctttagattttagcagacaacagtgatttatttatttatttagaaacagagtttcactcttgttgcccaggctgaagtacaatggcacgatctcgg

SEQ ID NO: 153311 - DNA, 394 bp, Homo sapiens
cataagtaactattttatgaatatgtatttgtgatgaatgatttcctacacaaatgaagaatctattttaatagaaaatggtaactggatatattactagatacaattttttttatttccctattttcagtttcaatagggaaaattaaaattttccctgttacttccttattttatttccctatttcaatgaatgaaatcataggcaactctaagtctcttgaggaaacttgggcgttatacatctctctcttctcccaaactcaaactagcttaagcaaaacatggaatttgttgacatgaataataggaaaatccaatgatgaagctggctgcagatggaactcaagagttttttgggtattggccttattctctcttggagtacaggggc

SEQ ID NO: 153312 - DNA, 846 bp, Homo sapiens
ggaaaggagcccggaagccgggcctctgggctgcagggctgctttctgccagcctgtggtttaggtcttggcacacaaggccccagcccacaccccatccaggctggcaggtgggaaagcaaggtgcagctggccccctcctgagagagacagtgtccagactcaaagggagggcaggggggccacagccaggagggtaagtcacagggcctgtcaataaggctctggctcaaacaaaagtcgccgtgggcgccgggagatggagacaacaaggggggccactcccctgctgagcaagccacgggaatctgtccccaccctcagctccactttcgggaacatcagggctcatatcctaggaagactctaagaacaacagcagttttcctcagggcgaaggaagctggattcccagcgtgggtgctgcatgaaggaaccagcagaaataaacagaggaaagaaaatgacagaacaaaaacctggaggcccagaggctggaactccatcaccgcaggggagggagagaatcatcttcacatctacaggggccaagttccaggtccactctgtggagcctggtgccacgtcaggatgcagacattggggcatgggtccctgaaaggatgagtgagggccggcttgaggggaacaccatgaagtaccagggggtactggcaccatcagactgaagaaagccagagaaaggggctggaggggtcccaaggtgcttcccttccctagcaattggctgccatctccaagacagtgcagagacatgttcagagctggaggccacagagaggcaaggatgctgaacaaaactgagcactgcgtttctacctggcc

SEQ ID NO: 153313 - DNA, 809 bp, Homo sapiens
  misc_feature (213)..(213): n is a, c, g, or t
tatgggggggaacccacccctttgttccgccccgagttttctgtggccccggattgccccacgtgccaaaaccctgggggccccgccccccaaacaaagtgtgttaaaaaaatttttttaggggccctgacggcccccaaaaaagttttttgtttattttgttttattattttttttggcgatgctaactattttattgcagggaggtggggntgtcgggagatggagacaacaaggggggccactcccctgctgagcaagccacgggaatctgtccccaccctcagctccactttcgggaacatcagggctcatatcctaggaagactctaagaacaacagcagttttcctcagggcgaaggaagctggattcccagcgtgggtgctgcatgaaggaaccagcagaaataaacagaggaaagaaaatgacagaacaaaaacctggaggcccagaggctggaactccatcaccgcaggggagggagagaatcatcttcacatctacaggggccaagttccaggtccactctgtggagcctggtgccacgtcaggatgcagacattggggcatgggtccctgaaaggatgagtgagggccggcttgaggggaacaccatgaagtaccagggggtactggcaccatcagactgaagaaagccagagaaaggggctggaggggtcccaaggtgcttcccttccctagcaattggctgccatctccaagacagtgcagagacatgttcagagctggaggccacagagaggcaaggatgctgaacaaaactgagcactgcgtttctacctggcc

SEQ ID NO: 153314 - DNA, 350 bp, Homo sapiens
cttgagcctgggaggtagaagttgcagtgagcccagatcacgccactgaactccagcctgggtgacagagggagaccctgtctcaaaacaaaaaaaagaaaacaaaagcaaaacaaatcaggacaaaggggaaatgaaagtagtgaaattgggtataaccaggagtaagctgtaacataaaagcattctgtaagatcctgttaacagaaataagcccaaatttggctctgagcttgctagcagtcaaagagagaagggaaacatgatcagttataagactgggtccatataataaaaactaattgctcaaaagaatcagctaatggtataccctgcttgtgtgcacctgg

SEQ ID NO: 153315 - DNA, 239 bp, Homo sapiens
ttccccactggtgagccacaaaccagggtcttgaccatgaaaatgggggcaggagaaaatcagcaaataattacttgaaatacttaacctagccccagaggagtatctgctgggagaaaatttaatctgcaaactagtaagtgctatgtaacaaggcaatttccatgttttagtcaggatatgggaggctgtactttgattcattcattcagtaaggacttagtgacatctgccctgtg

SEQ ID NO: 153316 - DNA, 583 bp, Homo sapiens
agtcgacggagactctccagaattagccattctttgaaatggttaattctggagaggaccagtttgtgtgtgtgtgtgtgcattcatgcacatgtcagagatgggaacacggtataatattacatcaaaatagctagctacagaattgatgtaatggcataaatattaaaattacagatatttatttcctgcaaaaatagatttattcagtaagggccatatttcataataacttttgaataccatttcatagaaaatactgatattttgagtggaagttggatggacttttcaataggattcaagaagtgagtaggtatagacagtctgtttacaaatctgtgcttcaggtatatatagagagtatctcagagttaatagtaatcaataaaaagcctccagaggttgaagtaaaaaaatggggttggggttaggcaaagtgtggcacagtcgtcacatctcctctgtctattatacagcttatacaaatcagagcacttggtttgtgacaagggatgtttctattctcattgattagtgctgagtgaactattctggagggaatgattgttttcagagagtc

SEQ ID NO: 153317 - DNA, 195 bp, Homo sapiens
agcagccacacatatctctgggtggctggggaggaggaccaggtcagaatgcagtaggacaaggttcttttctccaggaggcccagagaggatgatgggtcaggtaaaaggccctgcacttaactctctgcccctgggagacttatttctcctctggggacttgtttctgcatccacaggtgaaagtggtttaaa

SEQ ID NO: 153318 - DNA, 324 bp, Homo sapiens
ttggcaggtagaggcaggaggatcacttgagcccaggagtctgataccagcctgggcaacatagtgagaccacatctctacaaaagatcaggtcaggcatcgtggctcaaccctgtaatcccagcactttgggaggctgagactggaggatcgcttgagctgaggagttcaaagctagcctgtacaacatagaccctatctctaccaaaaatagtttttaaaaattagcccgacatgcctgtgatcccagcactatgggaggccgaggtgggcagattacctgaggtcaggagttcaagaccagtctggccaacatggtgaaac

SEQ ID NO: 153319 - DNA, 323 bp, Homo sapiens
ggggcgccccacgcactctgggcttcacctggctcctctgctttgcttgggctgctgacttctggaggagccctttcttccttctctctcctgatgcagaacatacccagtctccctggggcaatcggccttcttcagccactccttggtctctgctcctctttccctccctcactctgtgtcctgccagccccagcctctggcgacttttagagctggtgcgcagtcctgcctgagcatcggtgaacatgaagccatgggctgtggcttaatgattcttttggtgaattttgattctttatcaaaatttccttccttccttc

SEQ ID NO: 153320 - DNA, 348 bp, Homo sapiens
gaggatggaacaaagctgggagcccagccagccggccagggcgcgagagggtgacagacacgaggctcggagcaggtgttggctgtgggattagatggggtgatgggaggaagattccatgcagaaaactgagcctgggcagaggaagctggaagtgggagatgtagcaactgaaagacacgctgccttcccccacactcagcagccctgccaatcgtgctgccatcaacacatctgacagctgggggtggaagagagcagagtccactgtgaagggctgcggggcagagccaccacctgaggaccgctccccaaggaggtgaagcctctatcctctttgttaagtca

SEQ ID NO: 153321 - DNA, 334 bp, Homo sapiens
cttttttctctaccgtaaggggtgtagtaatttaagggggaaaaaaattaagagaccaactgaggcagaattgagaagcccaatgtaaaattcagcataaactaccaagcaattctgcagattatgtctatagtacaccacaccgaaacctcaccctcatcctgcccccttatacaaaaggctgcagcacccaggtgttaacgggcatgggatccaaccaaactggtctctccacctccagctctgccaatgctaatccactccacagttggctgccaaaggaacctccctacagcacagcctgggatcaacaggccccaagtgaaataatctt

SEQ ID NO: 153322 - DNA, 408 bp, Homo sapiens
tatgtgtgtgtgccctaggattgttggaatggtaaatgagcatcatatctaggaatacagataaccacgaaggggaaatatctctaccataagaattacaaaacactgctcaaaggaaatcagagacaagaaaaacaaatggaaaaccattccatgctcatggataagaagaattgatattgttaaaatggccatactgcccaaagcaatttacagacttaatgatattcaatcaaactatcaatgacattcttcatagaactagaaaaaaacactatgttaaaatttacaaggaaccaagaaagactctaacggacaggcagaacaaatgtggaggcattacattacacaacttcaaactatattgaaaagctacagtaacaaaaacagcatgacacttgtacaaaa

SEQ ID NO: 153323 - DNA, 279 bp, Homo sapiens
gcgacccgcatgcacacccagcaccctgctgacactccaggctcacccactgccacgcctgctccgtgctgcctggcaaccatcctcccgcctagcaggacagccctcccagtataattgtcccctgatgagcaccagagtccccgcacctgcactgtcaacccctggccagcgttactctcccctgcccaaatgtactgtctccatggggatcattatcccccagccagcactactgtcacccccaccagcatcactctcgccctgccaacatgactc

SEQ ID NO: 153324 - DNA, 464 bp, Homo sapiens
tgaaaccattcaaaagaaagtatttgttttggaaaaacaaatacactgttgttgggcctcaaattggtaatttatcaattttgaatgctggctgttaatacaatataaagaaggtccaatttaaaaacatgttaaattaaaattttggaaagagagtaatactttggttccagccctactgccaaatgataccaatatgcacaaaaatgtacaaagtcttacagcaaacacataaagaaagaaacgtgaagaagcagcttaaggatggccatacttcactcctacatactttgatttacaactgtacaggtccatagcaacagatccccgtcttggcggggcagtactccaccacctccgattaggcaagtgaacaccattgacaagaggcaggagtggagggtggagttcaagttgtgttaacagtgagaagtggtctgaagggatgtgagggtgtggacacc

SEQ ID NO: 153325 - DNA, 331 bp, Homo sapiens
tagaatctctcatgtgggcacagtcaatggctgtccactgaccaggctgttagctggaaccctggcaggagctggaacccctgctattatttttcttataacaggacacagtctctcccctcttacctcaacttcctattctgggggtggggggaatcagtgatactggagatgactagttgctgtgttatggatttgatttgcatttggctataaaacaatcttgttgggaaaagtgtgggggagagaacctcttcccacacacacattgagacagatcctaactggtcaatgatcttgtttgtaagaaagagattcggttggttgagtg

SEQ ID NO: 153326 - DNA, 427 bp, Homo sapiens
cccctacatgtatactcaagagaaatgaaaacgtgtccacacaaagacttatatgcaaatatttattgaaaccttattagcaatagccaaaaagtggaaacaacccagatggccatcagataataaatggatgagcaacatgtggtatagccatacaataaaaatattattggtggtaaaacggaaccaagtactgatacatgctagaacacggatggcccttgagaacattatgctacgggaaagaagccagacacaaaaagtcacgcattgtgtgatttcgtttctgtgaaatggccaaaataggcaaatgcatcgagacagaaagtgggttagcggttgccaggggctagagaggatgggacatttgaaaggcgactaatgagtagtgtttccttgggggtaatgaaaatgctctaaaattgat

SEQ ID NO: 153327 - DNA, 285 bp, Homo sapiens
cccccaccccctccacctttgatcacacacattcttggcctgcagcctttactttttgctacagtggctcataacctttgcttgtcattgtaatcccctccagagttttaaaaaatacagaggtctagaaatggaaattttaaaaaagtgcccaatgtgattctaacatgaagccaaggtttaaaaccactgctttactgcaaggttgggtcagtgaatctcaaacctagttttgcatcataatcccctgcgtagcttttctgaactacctatgagtgaaaatca

SEQ ID NO: 153328 - DNA, 626 bp, Homo sapiens
tttgccttctgccatgattgtaagcttcttgaggcctccccagccatacggaactgtgagtcaagcctctttcctttatacattacccgctcttgggtaatctttatagcagtgtgaaaatggacttaatactccaggtttgtaggattctgtccctggctctgtatctctcagtcctgcttaaatgtgtattgctccattcttgaacagatcttcccctagtggtaactagatggctgacagaagctcactaaccccagcaacttacagggaaagagatgactcagcaacttcctcggtcgtacttgcgaaagttctgagactgaaatctcattagcaggcaaaggtcaggtgatgataatgaaccaatcactgcagccagggaaatggattatgctgattggcccaacccagatcatctgccctcccctggaatggcggtgggattagccccatctgaaacaaaaggatgcgggctggaggaaagcagttctccaaaaagaaactgagatgctgttaccagggtagaatgaggagaaaaggggagtagatgctgggtaggtgaaagcaacaagtgctggttgcacccactctgtgcttgtgattggttatatattgtgtgagat

SEQ ID NO: 153329 - DNA, 531 bp, Homo sapiens
caggtaaaaaaagaaatcccacttgtaaaggcctagtttgcaattcatttgtcctgggatcttgcaaaaacaacccaatatctgtatgtctctatacattggtgtgtatgataatatctttatttttctttgtagagattttacacaggatataataagtgacacaactgttttggcagatggggtcagaatatgaaggcaattccttccatgtaagaattttggtgcttgtttaaatttaatagactcgcttctcctaaccacactctggaagtctcctgtcattcatgcacataagaactcagaagagaacctctactgtctccccaaaatcttttttttttcttttaataaacttgctgacattggccaggtttcaagagcatggtaagttcatgatccatcagcctggtttctgaatggaaatccaatgagttatttgtattgtttgttcctaccttttccaggcaccttctaaaaatgaacaagagcagctctgatttggaaaaagtgagccagggctctgcagaa

SEQ ID NO: 153330 - DNA, 343 bp, Homo sapiens
tccagcacctttactagagaagcagaaaaaggatttgtggggggcatggctgccaaggatattcatttaaaaagaacctactgtttccccaaacccctgtgctcccaaatatgaaaatatgagttctcctgccttttagttgagactccaagaaaggaatctcaaattcaattagtttacagcctataaaatgcaaaggtagtactgcaaatcagtaatgcccagatgcaaattcagaggtgcacctcaaagtgatgtttgctttattttgtttgggttatctaggctatcactgagctccattattgaaggctggccaagtcacaaaaataagaaccttttt

SEQ ID NO: 153331 - DNA, 130 bp, Homo sapiens
cgggaatctattgcagagaggagggtaccagagtaccaaagtagtagaaaattgtagaaatatttcatttgcactgactaactcatcatgttatgccaacatgtgtaggtgatatttgtgagcaagtcca

SEQ ID NO: 153332 - DNA, 245 bp, Homo sapiens
aataatttggctctaattgatgattttgtttaaaacaaaacattcctaccttcctaagtatgtcaagaattgtaaagatttaaacacatgtatgctttttataggttggtgaaaatttttggtttcaacatgtcttaaaacatattaaagcccatgcacatagacctgacatgttataattatctttaggcatatagaaaatgatttgagtgattcagctctgatttgcgttaacaataatgaac

SEQ ID NO: 153333 - DNA, 467 bp, Homo sapiens
cagctgagtcattgcccttctctccccaggcagaatgcccaccctaggggctgctagagtaaacacactttgcttagcaagcaactcctatcaagggaagcctggatatgtctctgaacacgaagcagtactgttctagttcccatatcatttcaacatttccatcccaattattctcaattgcataatatttcaacttttacattgtttctctcatccctagctaattcaatcatggctaacactgggtgccagaaaatgatgtgcaaaaattctacatagaacactatgaaacgttattgagcaatcttaataaaggaaggatgtatcttgttcattatggaaaggctcaatattgaaaagatgtcagttctctcaaaatttattggtaaagtcaatacaatcccactccaaatcccaccagattatgtgcatgtgtgtagatatgttgacatgctgagggaata

SEQ ID NO: 153334 - DNA, 291 bp, Homo sapiens
tagtgaatgagagagctccctttaagcctttattggacctgggtactcttacttgccttcctgcaactttctatgggactgctaatgtcaaagaagatagagatcaagttcagtctggggtgaattaaaagagtgatccaagaagcaatatggacataaattgagaaattagagtgagttacccaggcagaaatgcaaagagaagcgctagggatacaacaccagaaaaacaagacaacctgatccctttctgtgctacatgcccctgctgtaagaagatactgatgctgt

SEQ ID NO: 153335 - DNA, 397 bp, Homo sapiens
agaatgagggaaatgttgcatccattttacaagtcttactatacttgtgaaaacccacactgcaaacaagctatatgaatgtgaaaatatgagaatatgctgggattacaggcatgagccatcacgcctggccatccttcgctttagatctaaagacaaaaaaggttgaaagttaaataatggaaaaagatcattccatgtaaatagtaacctaaagagaatttgcctggatatattaatatcagacaaagtaaacttgaagtaaaaaactgatagaagagagagtgaatgagagtatatactgatagaaggtaaaattcatcaagaagataaaaaaattatatgtatcaaacatcagagcttaaaatacatgaagtaaatattggcaaaattaaag

SEQ ID NO: 153336 - DNA, 446 bp, Homo sapiens
cctcatgtgacaatagtgaaagatgaaagaaaatccaagaaaccatttttttttcattcattttaaagtaatttacagaatagttcttttgtaagacaacattggacagtttctaaaggagagacaggtgaaacaatggctgaattttgaaacaagctcagggagagacaggagctgtggccaggagaagtctggctgtgtatcctacatcctcagtaggaactgatcaggatccagaatcccatcctccattttatataagtgcacaaactttgcattttattgaaaagcacaatcttgtcatgtcccacagttggtcagattggtgcaaatccccatctagtttgcctgttttgtctttatataaatggagtcgtgccatatggatactttgcctctggatttcctgctttcactacacattatgtttgtgaaacccatccatg

SEQ ID NO: 153337 - DNA, 277 bp, Homo sapiens
ctctcctccttggaactggagaactgtctctccatccctttatctgaatgtttagccattgtgcaaggctgagttcaagtcttactttcagtgaagtcttccttgattgcctaagtctggggtttctttcaaacttctccagggcttctggtgtgtgtcatcttcaaggcatttggcataatcttgtacaattagttatttttaaaaaatatgacctaggctgggtgaggtagctcacacctgaaatcccagcactttgggaggctgaggcaggcgg

SEQ ID NO: 153338 - DNA, 386 bp, Homo sapiens
gtcgtgagcacacacttgtgcctaggcctgtgggagggcggcgctgtgggtcctgcctgccgtcagttttctctctcctgggggtcagggagacttggagctctgtcccttcttggcttagtcatgaacctctctaagcctcagtgtcctgtgtgaacaaacagctcagtgagatggtgggagggcggagtgtcctgtcagcaggcatgaggaattaaaaattaagaacacccagggcattatggtaagaaaataatgagttgaagcataaaggtaatggttagtgccaacttcctcccagcgtgccaggccctgttcaaagtacatgaaggagttccttatttcgtcttcccaatagcccagggcggggctctcagaccatgaaa

SEQ ID NO: 153339 - DNA, 174 bp, Homo sapiens
cggaggctgaggcaggagaatggtgtgaacctgggaggcagagcttgcagtgagcggagatagcaccactgcactccagcctaggtgacagagcgagactccgtctcaaaaaaaaaagaaaaaaaagacaccataaaacaatgcagtaagtaagcccagggagggacaccacac

SEQ ID NO: 153340 - DNA, 432 bp, Homo sapiens
cgtcttagccttctggagcgagcatgctcattatcatctgagaggtctcgaagctacacatcaccatcatggtggcagaggagttggaggaatcatcggtttacagagcagacatacaagtattcgtcagactcaaaattgttccagtaggcgccgcaggcaccgatgtatgaagcgcacgcactttcccttggagaggtcgaagtaccaacgaggcatcacggcccggcagggccccgtcatcgcctcctgggagcagacagctttgacatcatgagtaatttcctactgaagcagatctggaagacttcacagaagcagctgtggatgaggatgatgaggatgaggaagaaggggaggagtggcaattgaatcgtagaaatacttcaaactcaggcacctcgcatttaaaacaccacagcacttccacgc

SEQ ID NO: 153341 - DNA, 522 bp, Homo sapiens
catctatggctgtgcagaagcatgtgcattggttaggtcccatgttatttatgttcattggcgttccggtcattttcctgagaccaggaatgaaattaaaaattcctttctttagatgttagcagagaacagtgatttatttatttatttagaaacagagtttcactctgtgtggcccaggctgaagtacaagggcacgatctcggctcagtgcaacctccgccttcaaatctaattaaccttctcaaaagccttcctatttaaccattttcttccatcttcatggccacaaccttagtccatgctgccatgatttcttcccgggacaactgcaacacttcctcactgtttccctgtttccactctggccctcctataatggattctctacatggcagtgatgataatatatatacatatttttttggagacggagtcttgctctgtcgcccaggctggagtgcagtggcgcgatctcggctcactgaaagctccacctcccaggttcacgccattctcctg

SEQ ID NO: 153342 - DNA, 275 bp, Homo sapiens
tcagttgtcgcatccaaaaggcctagctaacttttgtattttttgtagagaaagggtttcattatgttgcccatgctggtccccaaactcctgggctcgggcacctccgaggtctcccaaagtgctaggattacaggcatgagccactgcacagggccttatacaatgcttctaatttcagcacatttagcaaacttatcttctgcgggagaggtaccaaatcacattccagtttatttctcaactctaataatgtccctttcttcatttacttg

SEQ ID NO: 153343 - DNA, 357 bp, Homo sapiens
gggaaaaatgtatataggatatgattccatttaaggagactagaaaatgcatgctaatctacagggacagaaagctcctgtaggaacgtgggcttattgcagagggtaggcagaaactgggtgatgggtattttcactgtcttgattgtggtgatagttttgcaggtgtgtacatatatcagagaatgtcaaatggcacatgttaaatatgtacagttcattgtattttatttaaaaccaataaagctgtttttagaaggaagtaaggtggatttggagtcctgcggatagagcattgtagggcaaggagcattttagaaccctgtaagtcacatcagtggggtggcctctggcttt

SEQ ID NO: 153344 - DNA, 378 bp, Homo sapiens
agggtctcagttacaagctgtgggagccacaggctgtggctcagatcttactgcaacctacaacttgctggcctcctcacctttcaatctttggtgctcaagagcagacctaccttgggagatcccctctcgaaggtaaataatagacagacagtcctgccctgtcctgctcagacattgtcatcaccccaggttgctttctcccaccttgaaaactctccatccaggaccacacccataccctatctgccttctccacttccatttctaggcagctgagcatagctggagaaagaccccaaacatggtgatgtatctacatacatacctctagcctctgctgcccactccctgccacttggtacctctttcatttct

SEQ ID NO: 153345 - DNA, 158 bp, Homo sapiens
tggactattgccaattacaaatatttttagagaagaattcaaaacagtaactgtggatgatggaaacaatagttatgataaaagtctgatgaaacttcccagttcacaaggaaatttaattacttatgtgcagcattttaagacagtaatcagaatca

SEQ ID NO: 153346 - DNA, 459 bp, Homo sapiens
gaaagtttggtattatttaatgtagtaagactatcgttttgttctactttatatatattttttattctcaatattttaactcaatattggagttaataattgaggctatcttgaaaagaacttattgagcagaaattggcaatatttattaaaattaggactgagtatatcctctgctccttccgctgctggagattttatagttgctacgtgggcagaaacgcatatgcatttcccaggatgtttatgtcagcattgcagagactaaggaaaaactggaaatgccctaaatgttcatccatgaagacaggaagctatcatgaagaagagtgtgctagatctccatgtgcctatgcagaagaactttcaagcaggaaaaacaagatgcagaacatgattatcgtataatccatttgttaaaaaagtagaggaggagaaatgaatatttatgtgagatcc

SEQ ID NO: 153347 - DNA, 124 bp, Homo sapiens
atgagatttgagtagggacacagacaaaccatgtcactatccatatatacatttttttatccgctcaataactcatggtcaagtttgaaacatttcagggttgcagacatcagtacccttcccc

SEQ ID NO: 153348 - DNA, 671 bp, Homo sapiens
tacctcaccctaacccgcgcaccctaacccgtaaccctcaccctacccgcgctcagactaaaggcaaatctctgtctctaatacccagcacgcaacttgtcatcagatctcatcagcaacaccttcaaaaccgttcgtgcctcctctcaaaccaccacatagttcaattctcagttaacctaaaggtctctctgtttccacccttgtcacctacaaggcactccaccgctcaaacccagaagtaactccctgttttacgaggcaatcttatgacggtctacggcacctggctcttcatcacccttctgggctcatctacccctattcaccccctcactcctgccgtagccacgtttacctctgtactctccccaaatgctcccactgcaaggcttttgctgttttctgctgcctgaaatcctaagacacgtttcccctactgtctgtgtggcctccttgttcgaggtctttattcagacgtcatcttctcaaacaaccacctccgcttttttttttttttttttttctcctgaggcggaatctcactctgtcgcccaggctggagtgcagtggcgcaatctccactcaccgcaacctccgcctcccgggttcaagcgattctcctgcctcagcctcccgagtagctgggacgacaggtgtgtgtcaccacg

SEQ ID NO: 153349 - DNA, 426 bp, Homo sapiens
cgaggaggacgtgtaagattaatctgtggtgaatgtgccctgacactggggagatcaattaggcagaaaaaaaaaggacttttaaagaagacaaatattactggaacaggccgctggagcagtctgggaaatgagcagaatgacttttatagagcgttccagggcttcaagtaaattcgaattcaaatttattcttcctgtattatttgctgcatcctaaaatgggctaggaaaaaaaaaacagtgaatttagtgagcatttattgtgtccttgctgtatgtgaggccttgtgctagggacttaaaacaattggaaagatatccaggtgcccctaggaatggagaggccagaggcacagtggctcccatcaccaggaagacttggtaggaagatgacagttactgagctccagttttgtgctaaaa

SEQ ID NO: 153350 - DNA, 202 bp, Homo sapiens
gtacagaccatgtagggctcaaagtcatcctccagaaatgtttctgacctaagcaagcctccagccttcatttgatcaccttcccaacccttcctcacactatctatagactgtagttaaactcgattgcagtctagtaggatatttggttcttaaaagaacaagcagccaggcacagtggctcacacatgtaatcccagca

SEQ ID NO: 153351 - DNA, 484 bp, Homo sapiens
gttacgttatgtaccataggttgataattataatgattcctggggacaatcctaaatgccactttcaggaaagttttcgttgctggtattgtttggcagtcccttcttagagtcattctttcaaggtgggaatttaggattttgaaccttaattcagtcaagagtttgatgcagacttggaagaatgctccagttacaagatttgttctgtaactcccaggtgtggtcctgtattagagacgtttttgaaaaggacagctgattacgcaaatcagttttctgctcctttgattccagcatttgtaaatgaaataagataagtaaaatttatatccccattgcataaacatactgcattttcttagggttagagccttgtgtttagtaacctttttccatctttgtaattttcattatctgagatttttcatccaagaggaagtgtaagaaatgtatttttttccagcaatatttgaaccccccg

SEQ ID NO: 153352 - DNA, 548 bp, Homo sapiens
gctcggtaccatcgcgaacgtgttatccagaattgactgaggggcccaccaggcacacacacaatggagcagagcagaccacactgcatccatgggcagaagttccagaacaacaggcaagaagaaagaacacaaaagacccatgtggcattagacagccaacaaaacaatgccttaaaatgaggagaaaaattatttccaacctagaattctctacccaaccaaccagtagtcaagtgtgagggtttaataaaggcactcccagacatacagtcctcgaaaaattcaccttcctgctacccttcctcagggagtgactgaaagttcctctacctaaagaaatcaacaaaaaataagaaaatgtgggatccagaaaacagagagttcaactgaaaagggaggcaaagggagatgccaggatgatggaaagagagataaatcccaggataatacctgagcagcagcctagacatcagccaacttggagccggtcagagggctcctggagcagcttccagccatggcagcatcgctggtggcagagtagc

SEQ ID NO: 153353 - DNA, 483 bp, Homo sapiens
  misc_feature (377)..(377): n is a, c, g, or t
  misc_feature (423)..(423): n is a, c, g, or t
  misc_feature (436)..(436): n is a, c, g, or t
gttcctgatagaaaggatgcattcagcccccttccctctcccatctagtgcaggtcaccacgtgatgccttctcccgtgggatgactctcaccagatgcagcctctccatcttgaacttcccagtctccagaactgtaagccaaatacatctcttttctttataaattactcaggttggggattctgtcatagcaacagaaaacaaactaagacaattgcctactgattttgtgggcatatgcttataagactgggttttgctcatgaagccatcataaaatgagacccctttttctatataaggtaataaaataaagcaacttcatacctaaaaagacagtgatcatctgcaaggaacccacgcacttcgctccgnccggcaacaagcaaagcacatcgcaagattaaaacaaagaatccgncgggaacagaagngctccatctctgctctcaggcaggtgtccttctgcaaggaacccacg

SEQ ID NO: 153354 - DNA, 838 bp, Homo sapiens
ggatgaacaaatgagaaacagattctaacctcatggagattgtagacgggtgggtggcgggagaaagcattaacccagtgatcactcataggagtggaaattaaaactgacaaatgcaaggaaggaaaggagcatggcactaatggggagatgttgggagctccccttgacctagaggatcaggaaaagctcctccaaaaaggagtcgggcaagcagagatatagaggataaatacgtaggagttaaccagactgaagcaagcagggagggcgggaggaaattccagtaagaggaaaccgcaagtgcaaaggccacgtggtggcaggaaacacaggaggagagagccaacgtggctggattgtggggaaataggttggcaggagccagactaggcagggctttgtggaccatgacaggaattttgcttttcattccaaaagctctggagagtcactagggagcactaaggaggagagtgacatgatcagatttacattttgagagggtcacttgggctgcagaacagagaagaattgagtggaggggcaagagtggaagtgggaggccagtcaggagggagacaggggtagctgagaccaggtgatggtaaacacgggaagaaatgggttacagaggaagtcaggaagtaaaatggacagagcttgatgttaagttagatatggaacatgacagagagggaaaggacaaattgacttccagcttctggcttgtccaatttattatatgatggtgccattcaaggagctaagaataccagaaataaagcagatctggagcagatggtagctctgttttggacacactgagtttgaagtg

SEQ ID NO: 153355 - DNA, 386 bp, Homo sapiens
atttccagcaggttattccgagtgtcttcctagcgaaggaatcccatttccggcaggttattccgagtgctcttcctagggaaggaaccccatttccagcaggttattccgagtgctcttcctagggaaggaaccccatttccagcaggttattccgagtgctcttcctaggtaaggaatcccatttccagcaggttattccgagtgctcttcctaggtaaggaatcccatttccagcaggttattctgagtgctcttcctaggtaaggaatcccgtttccagcaggttattctgagtgctcttcctagccaaggaatcccatttccagcaggttattctgagtgctcttcctagggaaggaaccccatttccagcaggtgtattc

SEQ ID NO: 153356 - DNA, 385 bp, Homo sapiens
aatacccattcgcgaatcacccaaatagcaaacactgggtgactgccgtgtctacagcactatgccaagcaaggaaggcattagaaagagccagttaaaggcagccacctgatccccatgcaactcttaaccttggaacaaaaatccttccttagtctcaagttcatccatcctaaaaggaaaaaggaggatccaatgagcactcggtttccttcggtttctatttttccagattcttgttagaccacagggtatcccgaaggagttttccatggcatgtcagcaaaatccaaataccactcttcagaaggtaatatacttaaaacagaaataaaacagtaaaattgcacccatatattcacaaaatttacactggaaattatgt

SEQ ID NO: 153357 - DNA, 512 bp, Homo sapiens
ggacattgtctcaggttcattacccactcttcttgacctcaatggtatgtcaaaccttgttttcctctgacctcttcccatttattcttagcagacctcacctctatttcacagagatgataaccaccaccagacttggcacttgctcataaggcatcccaccagaaaatataactgtgcccagatattccaacatgcgagctgtcaagcccattatgcttaaactgagtctactgttcacttggttatttgaaataaactccctggtggtaagcattactgacgtaaacagtatgctggtgaatatctttctagtgcaaaaaaataaaataaaatagtatagccagcttcttgaaagatctctctaccctgagaatacttctaaagatggggaagaggtttttttttttttaaagaaagctatcttacttcacaagcatttaacaagcacaaatccaaacatacgttgtcatacatcaatagaataattataaatcccaacccagatagtt

SEQ ID NO: 153358 - DNA, 1121 bp, Homo sapiens
atgatttatttctgagaatggtaaagtcttttagatgtggcatctctaacaattttattatttttcgctcactcttgaataatagtttaaatgactgcaaaatattatgttgactattaattcctccccgtgctttcaggaaattaatctactgtcttctggcatatattgttgctgatgagaagtctgctgtcagtcttactggtttctctttgtagataaagtgtcttttttttctgatcacttgtaagtgcatttttggctttatccttggtattttttagtttcaccataatgtgtctcagtgttggcttacttttatttatcctatttgtttctcaggtgcactttcaatcgaaaccatgtttttcttcaattcaggaatatcctcagctattatattttcaaagattgctcttcgttattcccttcttcttctggaaaccctatttagatatctgttacggtttcttatttatctattttgtcccccaaatgtgctttcacgtttgtaaaaagattctcttcaatctctatgttgcatcctgatgaattcttcaatactacattcaaatccattaatttcatctttgactgtgaccagcctaaagttttatcttatctgttgggtttttaaattttcaattatcacatttttttatttccaatattctaatttaatcttttctcatattcacttattgtttcatttctcctttgttgttgctgtttcaaagttttatgttttattatggattctttttaaatttagctctttgaatattttaagcattattataaatactttgtaagattgttttataaaattaatttttaagtgaattttttcctaattgttcactgtactctttttttagcatttgattcctatgagttttgtgattttcatttacaattatttgtcttttttgttttgttttattttttatattttctgtctcatgatcatccctggaaactagagagactataataggttgcaaggcttacaaacccaacttccaatttcctaacaccctttggactttatatgtaatttggaatacatcatttaaatctaaagaacagtgtattagtcagctcaggctgccataacaacc

SEQ ID NO: 153359 - DNA, 360 bp, Homo sapiens
gtgtcaggactgggagcctggacccctcttccttctgctcctgctttgcagagaagtgagtggggaattcccgcctctgggaattcagagacgaagtgacagagacagcattggaagataagaatgcagccaaagaggtcttcagggtagcgtgtggcctgggcgctgagactattgggcctagcaacttctcaagcagtctattaaccacagccggtagccagcttttccccgcccttctcccaggcacacacagccacctccatcaccaaaggtcaggcgaaccacctcccatggctacccccagcctgacttgctttatagaaatcatggcatctcatcctcacaacagcccacact

SEQ ID NO: 153360 - DNA, 344 bp, Homo sapiens
cctgccttcactcggctaatttttatatgttttgtagagacagggtttcgccatattgcctaggctgttctcaaattcttgagctcaggtgatccgcaacccttggcctcccaaagtgctgaggtcacagatatgagcctccgtgcccagcctaaagcataaattttaagttattgcagaataaaatgcattattagtatgtcaatttaatgctctttatctttatttctcatgttttaaacttagctgctttctcttttctctaagaagcagaaacttgtgaaacaattgcctttaacttctatatgcttagaaacagattcacctgcactaggaccagaaaa

SEQ ID NO: 153361 - DNA, 325 bp, Homo sapiens
aaaacgccaaagacatagagaaaaatcttaaaattaaaaatacagattactttccaagaaacaccctaataagctagaaaagtagttgaattctctgcaacaatgaaccccagaatataaatataatatctttggtttttttttttttagacagagtcttgctctgtcacccgtgctggagtgcaatggcgcaatctcggcttactgcaaccactgcttcctgggttcaagtgattctcctgcctcagcctcccaagtagcttggattacaggcaggcgctaccatgccaagcgaattttcatatttttagtagaaatggggttg

SEQ ID NO: 153362 - DNA, 1322 bp, Homo sapiens
  misc_feature (2)..(3): n is a, c, g, or t
  misc_feature (777)..(777): n is a, c, g, or t
  misc_feature (811)..(811): n is a, c, g, or t
  misc_feature (860)..(860): n is a, c, g, or t
  misc_feature (894)..(894): n is a, c, g, or t
  misc_feature (1056)..(1056): n is a, c, g, or t
  misc_feature (1104)..(1104): n is a, c, g, or t
  misc_feature (1144)..(1144): n is a, c, g, or t
  misc_feature (1162)..(1162): n is a, c, g, or t
  misc_feature (1178)..(1178): n is a, c, g, or t
  misc_feature (1202)..(1202): n is a, c, g, or t
  misc_feature (1229)..(1229): n is a, c, g, or t
  misc_feature (1243)..(1243): n is a, c, g, or t
gnncagaaccaaagtccaaaatgattaagtttctggcacagaatcatgccagcagttacgtggtggggctcagttcagagcacagatctttccattctcttatttctgcaccactgcactgcaagaatcttatacactcctgtttataagagcagcctattaaaaaatattctgggacacatctaaaaagccataatataagaaaaaaataaaagctctgttttggatttatcctggaagctgggagagaacatattttttggacatgtttggaaatgtacgatagtttttgattcttatccttgtgctccaggctttctttgggacacttaagagattatctttgggatttaggaaagcaccatgtcattttatttttcaaatcctcagagtgctagaagttttgggtcttatttcctagtctgacctttcattgtagctattattttttgatatataatattcataattcattttgttgaagaggagattttatttaatgtcaataaatatgtatgagtgttgggaggaacatacctgagctgtgagggctggcgagaattatagaggacagtacagttaaatagaatgtggggataatgtcattgactgtaaacctcatgattgagaaaaagatggggatcatcttctgctgaaattcatcgtggaaagattctcaaaagcatattagaaacagatgacaacattaaaaggacacagtttattttatttggaaaatagtattcccttgtgggagatttgggataacagacttcnaaattttggctctgttcaaattccctgactcatngggtggcttgaaaaaatgatttaaatccactatcctgcaagatagaatnatgataattataacactgtacttggcacttgggngtaattatattaatggctagtgagtatgtatgattactatgtgtcaaatcatatgccaagcactttacaagctgtaactctgcatcctctgggaagcatgtaccattcttgctcttatttcacatgtaagaaaattgtagggccgggcgcagtggctcacgncagtaattaattccagcactttgggaggccaaggcaggcggcggatcncatgaggtcaggagttcaagaccatcctcgccaacatggngaaaccccatctctactnaaaatataaaaattanctgggcgtggggtgtgcacctgtnatcccagcttctagggaggctgagacnggagaattgtttgnacccggaaggaggaggttgcagtgagccaagattgtgccactgcactccaacctaagcgacagagtgagactccatctc

SEQ ID NO: 153363 - DNA, 398 bp, Homo sapiens
ctgaagtcacacggacgtcctgctgatgtgcctgcgagggcaacagcatttccatcagtgtctgaggttgtgaccacctggagaaggcaccctggtggctgtccatggggaatgtgggtttaatgttgctagagctttggatttttcaagcaaaagcaggaatctctatttttacatgaaactcaacacgttgatgacccttacatatctttgcttaaattgccatgtgagccacacaagttatgagttggtggaattcagcgagcagacctcaaggtgtggcctctggtacaaaccaactgtagggaggattccatggattcgacagcggagaatctcaccgggtccaagggaggggactggtggaggctgagtcttcagctgctccgcttgcttgg

SEQ ID NO: 153364 - DNA, 365 bp, Homo sapiens
tatggaggcatcagaaccaatgtaacaaaaaaggaggggagagtccccaaattatcctccccagagtccagatcatatgggagtatttcatgagagtcatttcatgggactagtggggcactgaaatcaagtttcttatccactgcccactcctgatacacatgcaccaggatattcccccctgggattagatctgactgatggcacatgaaaataaaggcaaggagtgaagctcagtatgattcatggacagagaaaacaacaggaacccaaattgtatgtgggccagtgatgggcagggactggagtttctgttctgtcccagatgcgcaaatctcacccaagtcagtcctgtaggaaaagca

SEQ ID NO: 153365 - DNA, 163 bp, Homo sapiens
atattgatgactctcttattaaatctcagtaaataaacaccggtggtatcttccttttcatggttcccggtaactctaaacactcactcttcataagccaagaagttacaaaaatgttggcatttgtataaaagaaaacagaactttgtaatcactaagtgtg

SEQ ID NO: 153366 - DNA, 581 bp, Homo sapiens
ctaaacacttcattcttcattcttaagagattggcaccaaatcactttgtcctgtttgggaaatgcagtgtttctcctttgggtgcatttttgaagaccaaggcaaaaaacattaaagttcatttttattgtctgtgtgggcaaaacatttgattttactgaacatgctccatagttacatggcaggatgttttgactggcataaaaactaaccaaacttctaaatgtgaagtaggtcaccggaagagtacaggactctttgtgagttgtttttctctccagtccagtattttcctaaacatgtttcctaaataacatagggatttcatttggaataagcaagtcatttaaatttattcataggtataggagggtccagaaatgttaaaagcacaagtggtttcaactgtatgcctttgctttatgcgatagtagagtaagttgaaaatgttttctactgaagcaagtgactgtttccctatgattaaataagagcagcttcagatggctggtttgcactgaagggtggagcaggcccatttgctttcacgtgtcagaaaagtctgctctaccccacccct

SEQ ID NO: 153367 - DNA, 689 bp, Homo sapiens
ttgctctgatcttcattagttcatttttcctactaattttgagtttggtttgcttttgtttttcttgttccttgaggtgcatcattagattgtttatttgaaatatttctacttttttcgatgtaggtgtttattgctataaaattccttcttaatactgctttgctgtatcccatagcttttgatacattgtgtttatactttcatgtgattcaagaaattttaaatgtacttcctaattttttattaatccattggttgttcaagagcatgtgttaattttgatgtatttgtacagttttgaaagttatttctgttactgatttctagctttatttccttgccatcagaaagtatacttgatgtgatttcagtacttttaaacttgttgagacttgctttgtagcccaatgtgtggtctctccaggagatttttccatgtgctaatgaaaaaaaatgtgtattctgcagctgttgcatgaactattctgtcaatgtctgttaagtctatttggtctaaagtgaaatttaaatacaatgtatctttgtgacttcctgtctagatgatctgtccagtattgagattgggttattgaagtctgcaactattattgtatgggagtctatctctccctttagatctaataataattgttttctgtagctaggtgctccagttttgggtgcat

SEQ ID NO: 153368 - DNA, 542 bp, Homo sapiens
cacaggccatccatcgtgaaagtcgtcgtcttgcaggatggataaatgcgttttctcttccttgccgcaaggcaaatggaagctagtaatttctagtcccatagcagtgaatacaaaatcaaaagaggctaactcaatgcagtgacagcttcaaaaggaattgtttttgaagattcttttttcccatagtgctggtttatttagcactgaaggtcatctgctaacccagctttcagcagcctccaggaaaacctcagtgtagcttgtgtcatgtattaacagtcccccaatttcacttatattttgctaagcagatacacatttgccatgacagcttaaagtgtcggtgcttttgaatggagactattttatctcgatgtatctgtaactggagggtcctcatgctcaggactggtaactcagattttgttttgaaggaactaatttttaaaaaaatctggtaactcagattttgtttgaaaggaactaatttaaaaaaaactttaatatgaattttctggttaatttggatgaccaccatt

SEQ ID NO: 153369 - DNA, 658 bp, Homo sapiens
cataacagcacattgctattcctcctccaactgcctgcccccaagtattttgcttccacataggagaggttggtttaggtgaaagaacatgggactgggagtctcataacacttggattctctttgggctttgacattaccttgtttgatctcagacaagttattactgctctgattgttctgctctttctttcagtccgtaacaataggatataaaatcaaagcacctgtcctgttaacctcacaggactatcagaggagtcaaatgagaaaagagttaccctgtgaacgatttttgtacttgtagaagacactaattttacattcattttttacatcttgtgcaggcataaaatacctccttaaacttaacgtagcttagtttaacttacttaattttcacttataaagcagttaccacctgtcaaaaaatctgagtgaagaaaagtgttacattatagttgctcagcatttcttactgcatgaaataatctttgttgtttttgccaaactctttaaattccttgaaaatgtgtattcttactaaacaaccttttctcctgagtctttggcatcagttagaagttaaaaagcactgcaagttttttgtaatcctgaagaggaggaaaagatgccaaaccagagtttattcaagata

SEQ ID NO: 153370 - DNA, 442 bp, Homo sapiens
ccaatctggtgataaaagtaaaaggattcagctgtctgcaagtaaaggctaatgcaacctgtatccatcccaactcccccaaataactaatactttcttaaaagtcagactacatttttgtatccatatttcacttctgtgtgtgactaattttaagatgatgccattaaaaccatctgattagtcacattttaattaagcatcaaaattcctacacagtgccagaatttatgcattcagaacacctgacttcatttgacttaaagaattcttagtattaatcataaatgaccaatataaacactattctttaaggaatgaataagagtcaccatttatatcctgaggaaaacatagcattgggattcgtctcagaaccagtttaagatattctttgttttgaaaatcctcttaaaggcactaaaaaaaaatctacccacag

SEQ ID NO: 153371 - DNA, 339 bp, Homo sapiens
gggagaggtaaatgaaggtggcctgttgatgtactgcatttgaatcctgaccctacttcctctgtctctgcccagccaaaccagtctgcctgcagcggggtagagtcacttttttttttcttttttcttctttttttttttgagatggagtctcactctgtcaccgaggatgaagtgcagaggcgtgatcttggctactgcaacctccgcctcctggattcaaacaattctcctgcatcagccttctgagtagctggtactacaggtgcctgccaccacacctggctaattttttgtattgttagtagagacggggtttcgtcacgctggccaggctgg

SEQ ID NO: 153372 - DNA, 571 bp, Homo sapiens
agctttttttcactgtttgtctgtcctgtgcgtgtactttactatttcaattgctgtaattttatgatacatttaatatttttttttgcagagcaaattctccttcattacttttccccacatttccctccatgtgaggatttcttttgccatttgcttctagcagaggagggatattcctgacatccgaggatggtaatgaaggtctctgttctggttcctctcccatctcacacacccaaggtgaaagagctatattttccagcacaggcaggacccatttcttgccttgggtctaaatcagtttaaatcagtaacgaggttgatggaaaggagagcaggtctacccaggacatcagtttgggagacaaggaagagcaccttggaaaattcagctgaaagtcaagtttgttccacctcgaaatgtggctgagaaccagcctgacgaggcttaggcttgtacattggagagaaaaagtagactgtttaaaatataaggcagcggctgggcgtggtggctcatgcctgtaatgccagcactttgggaggccgaggcaggtggaatcacctg

SEQ ID NO: 153373 - DNA, 263 bp, Homo sapiens
tgggagcagaagaactgtataatgagatgtgaattattttaaaggtcctagttgtattgttttgttttttggcgaaagccaattaaataactgatgagaatgtatcattatcaaaatattataaagaatttaatcctgtgtgcttaaggtctaattatataggaaagggggcaatctcagatagtttctatttggctttgcaatggagtcagaagagtcagatttccccctaagacagctccttcatggagctcattgcttct

SEQ ID NO: 153374 - DNA, 412 bp, Homo sapiens
taaggcacaagtgtacaaggtgccaccgtttttcagagtccacccattagccgccagcacagccttctcagcaagctttttgctgtgtgggtatggagcgtaccatgtgttttccagaggctcttcttcgtgactgttctggatgatttccttgtaggaattgggcccggctacctctggggtactggtgtagatgaagactggcactgtagcttggacacgtcctacttaagaaaatgccttttactcagggaatctcctgctacttaatgtggaaagacacgcccatgtcccccttcggcccactctgggggcctggaaatgctgcagtggggagcaggccccaggctggacctgccctgtcctcagcacgcgtgtgcaaaagtgaacaattaatcatttcaaagatgcg

SEQ ID NO: 153375 - DNA, 253 bp, Homo sapiens
tgcaatacttccacaactatatacttcttcatcaaacttggcataaaaagtcacaagtttttgacattttaggctagatgattaaaaaataataaaccagcctgggcaacatggtgaaacctcatctgtactacaaatgcaaaaaattagccaggtgtggtggtacagacctcgaagccagcccaccccaatgccaacgactgggccaccaatggtgtgggccggaaagtgagccactcatatggctacgggc

SEQ ID NO: 153376 - DNA, 256 bp, Homo sapiens
tggagggcccctcagatctataaggggccacagaaaggacctgagtcttcataaacctgcatgaatcagttattcatgtacatgctgtctcttaggaattcatgagatgaagacaattacctcatccaacatcactttgccctctcagggcaaaattgtgcagcacagttctctgttgtgctgtctaatgcattgcagatgtttacaagcatccctggcctctactcactagatgtcagtagcaccctcccctagt

SEQ ID NO: 153377 - DNA, 218 bp, Homo sapiens
agtttcctggtattagtgtgacttgcagctcattctgcaccattcactaaatgcctcttatcccttgttgacctacctctgggactaaagtgacatgtgggttttcagtagttttcagtttttgggctatgccctttgtattcagtcaaaccacattttgtcatgagccagtaactcttgggttttggttgtccaactacataatcaccatgactgta

SEQ ID NO: 153378 - DNA, 178 bp, Homo sapiens
ttgataaagtaagttggcattgtaagcaagagtcatatctcaaagggctttgtgagttgggtttcttcatccgagagcacaagggagtcacagaagagtttgagcggagaatgacatgatcagatgggtcatttaggaatatgactacagccacagtatataaaatagaattgagatg

SEQ ID NO: 153379 - DNA, 217 bp, Homo sapiens
gggagaggatgggaccccggaggagacttgtgccatgctccctagggagccgcaggcctaatcagtggacattgtgaggatcaaagggagcccactctaggaagcggggtgtttacgtcgtccactggggggacccagatctgcatcctgattgtgctcctgtcttgtgagtggagtaaaaggaggtgcctgtttcctaggtaatttagacaagagc

SEQ ID NO: 153380 - DNA, 860 bp, Homo sapiens
cacggggagctctgggtcctctctcgttgatgttgtgggcgatgctccctgaaacctgagctccggactcttcattccagactcttctctgcgggtctctatggagaagggaggtggacagctctggtggcaaacagtgcagctggggcaggaggaggccacaggaaacccccacagtggacttgggccctgggaagacaccctggggggtggaattcctcttgctctgttcacctgtcctgggcaagctccagagaagcccttaccccctgaatttctccctggtgcacggcccatcgagctgcaccctgggctgctcccctggggagcccatggccctggtgggcataggtaggcataggtgcgcactaggtgccattcagggccccaggcaccagaggtcccgactgctctggaaatctacccccaggtgagagatgttctcagaattctggcctggatccttctaggccaaaggtcctgctggcttgagggagctcagcacgttagcgcctccgacaaacgttgggtcattgaattaaactgaaggcccgtggaggaggtgccatttgcttctcgtagcctcccgtgagccccaaacccccagagcagaccctcctgggtgccagccactgcccgaggtgtttctgtccttacacagaggatgcaggtgacgccactgccctggccattcacccgatgcccctatgaacctgtccctctgcctcctctcaatttccgtctgtctatcagtctttgtctctctttctctgtctctctctgtctgtctctctctgtctctgccccatctctgtctgtctctgtctctgcctctctctgtttctctccatctctctgtc

SEQ ID NO: 153381 - DNA, 474 bp, Homo sapiens
gcgagtatggttcggaggccctggagaggatgttcctgtccttccccaccaccaagacatacttcccgcacttcgacctgggccacggctctgcccagtttaagggccacggcaagaaggtggccgacgcgctgaccaactctgtggcgcacgtggacgacatgccctacgcgtctgtccgccactgagcgacatgcacgcgcacaagcttcgggtggacccggtcaatttcaagctcctaagccactgcccgaggtgtttctgtccttacacagaggatgcaggtgacgccactgccctggccattcacccgatgcccctatgaacctgtccctctgcctcctctcaatttccgtctgtctatcagtctttgtctctctttctctgtctctctctgtctgtctctctctgtctctgccccatctctgtctgtctctgtctctgcctctctctgtttctctccatctctctgtc

SEQ ID NO: 153382 - DNA, 481 bp, Homo sapiens
caggcagggatgatcttggggtggtgagagctagtgagaaaagcaggcaagtatcttttgctggttagctacacattaaagccaactaagaaagactttttaaaaatacagatgcctttgtcctatcccagggcaattaagtcaaaattttcaggaagagggtgtgaatatcagtgagaattttacactctacctctgctaactgtagagtgtatagacagagctgagaactgctgcctacaccaagaactctcaaacctgagtatgcatcagaacgccctgcaggcttgttaaggcacaaatcactgggccccttccccaaggttctgatcagtaggtgggggtaaggaccaagaattcacatttctaacaagttcccaggagatgctaatgctatggctacccttggattagattacacagaagggtggttctcaccaggccaagaatggagggaggaacaggcactgtgcacagttgg

SEQ ID NO: 153383 - DNA, 448 bp, Homo sapiens
ctcccaagtagctgggaccacagccatacaacacatgcctgccttatgtttgtattttttgtagagacgaggttttgccatgtttcccaggctggtctcgaacttctgggctcaagcaatccacccaccttggtctcccaaaatgctggcattataggtgtgagttaccacactgggccaggattagaattcttggtctcttaacctctcgttcagttttttcctcgtcgactcacatgccctccaaatgaataccgaagttagattttgcatattaaattgaaagaaagttaaaagccttactactttctaattcagtgtagggaaaataatgggaaacatgaaaaaaaaaaaataacaaacctctgggatgggtgaaagcaaacatgtgtcttctcagttcctcctaggtggtatcttgaccttttatcccgtcttgtttttttcc

SEQ ID NO: 153384 - DNA, 168 bp, Homo sapiens
ctagttatgttcattgctattgaaatgtcactgctcccatgacatctcagtgaaaaaagctagagaatgtgtgtgggcatgtgtatgtctaggcaaatatatgcatatatatatttacctgcatatacaaacacatttacatttatatttctgtatcagttgtatatg

SEQ ID NO: 153385 - DNA, 499 bp, Homo sapiens
acattgccgttgggaatgtaaatgatgcagccactatgaaaaaccttttggcaattctttgagaagttaaacataaaattatattatgacctagaattctactcccatgtagatagccaagagaaatgaaaacataaagccacatagaaacttgtatatgaatgtttatcgaagcattattcataatagccagacagcagaaacaaaaaaaaaaaaaaaaaaaaaaaaaaaaatttggggggggctggggcgggaaaggtttttaaaaacaatccagttgaatgcggcgagcggggcccctcaacaaatgaggacctacagcggaacacagagggcccacacaacgcgtaccaccagaggaacaaccccgggcaccagcacaacaggcgacgggggacactaccaaccacatacaaaaacagccccggggagacaaacccaagacgggttgagaaacaaaacacgcgatgaaaccacgaagcgcaccaaggggaactaa

SEQ ID NO: 153386 - DNA, 937 bp, Homo sapiens
gggagtggtcagtgtatatttgtcgttctgaatatagcccttttgcctgttgactaaaccagacccaacatttattcagaagatatttatttgggtgtcacccctggtgtcatgatgcagagggatcaaaacaaacaaggaccatgttctgaaggagtttgcagttgaatggggtagatgggcattgttcagaggatatgccctctaggtcataataacaacccgagaagtactgaaggaaagaaacctggttctgccagggcagtgaacagtggggtgagggaagacttccctgaggaagtctcactcattcattgagaattaatgatgagtgagaattaagtagttgggggcaggaggcatttcagcagagggaacaacctgagtgaaggctctatggcagagaggaaaacagttgttggggaaactgaaagaggccagtgtgtggttggaacattgtacttgagcaaagagagtggagatggagtgggagtgggagaggtaggccaagaccccaacatgcaaggcctggaggtcatggctaggagttttattttttaggtcaaaggcagtgagatgacactgaagagttttaaaccgggaagcaggtgataggatgaccaggtgtattattttggaaaaatcatttggaccactgtgttcagaacatcttaggggaagaccagagggattgccaaggaaccaatgaagagactgtcttagtccattttgtgctgctttaacagaatgctactcactgggcgatttataaagaacagaagtttatttggctcacagtccaagagcatggcactagcatctggccagggtcatcctatggcggaaggcgagagaggaaatgggggttgaactcatctttttatcaggagcacactcatgcagtaacgtattagtccattcatgagggcagagccct

SEQ ID NO: 153387 - DNA, 433 bp, Homo sapiens
gggagtggtcagtgtatatttgtcgttctgaatatagcccttttgcctgttgactaaaccagacccaacatttattcagaagatatttatttgggtgtcacccctggtgtcatgatgcagagggatcaaaacaaacaaggaccatgttctgaaggagtttgcagttgaatggggtagatgggcattgttcagaggatatgccctctaggtcataataacaacccgagaagtactgaaggaaagaaacctggttctgccagggcagtgaacagtggggtgagggaagacttccctgaggaagtctcactcattcattgagaattaatgatgagtgagaattaagtagttgggggcagaagtgcgcctgggtgcagaagtgcgcctgggtgcggaagtgcgcctgggtgcagaagtgcgcctgggtgcggaagtg

SEQ ID NO: 153388 - DNA, 386 bp, Homo sapiens
tgataccatctaaggcaaagcagacaagagggaatacaggtcaaatggtagtatcatgtgagctgctgcatcacggttcacctgaggccaatctacttcagttatgtgggccaacacattcctttagctatttaggccccatttcagctagttttctctaatttgctgcacaaagatcccaagtgatatgatctctctgtgagtcctggtggatcttgcattcttaaatacaggcatcaacttacaaggagttttccctcatgccagaatataaaccaccaatgccatcagggactctaaaagaacttggaactccaaatgacaaatttaatcgtcagacagcaacctgatcagagatgagatgactggattcccaggtctggatt

SEQ ID NO: 153389 - DNA, 149 bp, Homo sapiens
atttgaaacatagaaaatgaacagttttatgagcattgtttcttttgtattcccaactctggagagctcccgtcatttacttattcttccattacctaaatcccagtgacaaaagcaggaagataataatgaaaaaacaaaagtacaaa

SEQ ID NO: 153390 - DNA, 327 bp, Homo sapiens
gacagcatcccatttagagcaaggccctgcttccttgaatcctccctcaaatcacctaacacaaaccaaaatcccataagtcctttctttttttttctgagacacggtctcactctgtcacccaggctagactggagtggtgcgatctcggctcactgcaacctctgcctcccgagttcaagtgattctcctgactcagcctcctgactaggtgagattacaggcatgcgccaccactcccggctaatttttgtattttttagtagagacggggtttcaccatgttagccaggatggtctcgatctcctgacctcgtgatccaccca

SEQ ID NO: 153391 - DNA, 627 bp, Homo sapiens
cagccagtgcacggtttctccttgtcagttgtggattgagcgtccactggtcaatatagtggcaatggtggcagtagcaccagtggcagcagaagtctcagctttcttctatgggaacaccttgagccattgctagggcttctgtggcctaggtataaaagacctgtctaaggctgagggggaataggtgggtccaagcagcacacactgagtctagtgcaggtgggcatatgctgatatggccacagttcctctagctctttattcagtacacagaactgaagcaagctgttagaatgccggtgtcagtggagggagggacatgcctagttcattgcatgtttcccagcagtggacaatgattctgagaggtgacagcatgctggcagccctcactggctctggccacctcctcggcctcggcgcctgctctggccacgcttgaggagcccttcagcccgctgctgcactatgggagctcctctctgggctcgccgaggctggagcctgctccctctgcttgtaggaaggagtggagtgagaggcgctggcgggaacccaggctgtgcacggtgctcgcaggccagcgcaagttccgggtgggcatgggctccacagcccccacac

SEQ ID NO: 153392 - DNA, 348 bp, Homo sapiens
taaattcccccctattttccagacacaggaagattttacatttccctttgtgtggaattttagagtgagattggcttccacccctgggtttcttatgcttagcaaagtagacaatcacaatgacatttatagattggtcttctttagagagctaacattgcaattcagccccactggtttctatatttttgagcaaaagaccaattgttaatctttattacttcatttggaaaacttaaccttttataaccaggtaatttttaatttttgttactttgttaaggtaaaatgtgcacacggcataaaattcaaaagaatattcatcgatttttagggggaacagattca

SEQ ID NO: 153393 - DNA, 327 bp, Homo sapiens
aacagctgctgtgcacaagagtgagaatgaacctgtaagtcctcatgtccccatcatggtgaataccattttactgtatgagggtcaatttagaaaagctaaaatgtgttcctgaggtgaacggtttctttttcctttctcaaaatgaaaaggtgtataatccctcgcctatgtcttaccacttagactgcaggtctgcctagccctgctgagatgtaaataccttggcacatctggggagtcacaaaatggcaatagccttatagcccttcatccctcccatcaaataagcacattagagaagtctgtttatagaaggtatttcat

SEQ ID NO: 153394 - DNA, 155 bp, Homo sapiens
ccccaatttatgcatgagtgtgcgcgtggggtgagtgccgccgacgtgactgtagggggccagtgtttcacacagctcttgagctgctggaggtttccgtagccatcattgtcacctgctggagatgtacagcctgaaatccagcttcctctctg

SEQ ID NO: 153395 - DNA, 315 bp, Homo sapiens
tgccagtctatgctgctggcaaccacctgcacccctacctggaagctcactcccgccttcttcaaggggtctagcctgggggcggagacagtaccccatgagagcagtaggcaaaagaggcccagggagggcgactgggtacagacacagaacctaggccccatcctctcgctctgggctcggtgcgccttccgcaagagcttcggagtgcgtctgctgcccaccctactgccggctcctccctcactccttccatcccaaagaagccacaaatgcgatctccaccacattccctcacagtcctccaagcaccag

SEQ ID NO: 153396 - DNA, 286 bp, Homo sapiens
cgtggttccccagaaagtgtaaggaatgtttagggtttggctaagcctggctttgaacctgatgctaataggggagaaggcatctttagacctgacctgaatccaagtcaggggtccagtcagttgcctggcacagctgggttggtctcttttctcagagacatctatcggctgtgttactgaggacagcaagttgagggttgcccccaccccaggagcacagcccatcactggccctattggcccttcataggcgtggtcctctgctaaggatggttaaattctg

SEQ ID NO: 153397 - DNA, 584 bp, Homo sapiens
attccagcactttgggaggctgagatgggaggattgcttgaggtcagcagttcgagactagcctggtcaacatagtaaggaccccatctctattaaaaaaaaaaataaagaaaaaagacagaaagagataatgcatgaaaagccttagcaagggtggccaacctgttcctccttctgtgattatcccagttttaggactgacaattttatgtcccaggaaatccctcagtctcaggcaaactgggattattggtcactccaaccttagcacagagtctggcacaactcagcatcgcaatcaatgttgttgtattcgttccctggtggtgagctcagcaaatgctctggaaggctggcgatcggaggtggataagggaagctgtgagttctgattttgtatctacctcctcaaggacaagcaaactgaggcagggaatttactcactgccccgacaaatactattgagcatctactatgtgccagggactgtcctctatgctggcatagaagggggctaggaacacaaaggtcaataaagtcttggcctgaaggatcctaaatctaatagcagacctaaaactta

SEQ ID NO: 153398 - DNA, 253 bp, Homo sapiens
gggatgaacactaatggaggcaaacactaggggggaaagcaccaaaaggtccaaagacgagtgagacctagtccctgaagagctgagatgcctttcctttgtattatgtgttacgatttacaaagcacttagcttacatgaaataggtgggtatacacttactctgcagaggtgggaaaactgctgctgagaagagttcaatgacttgcccaaagccacccagccaataatggctgcctgagtgcatagctta

SEQ ID NO: 153399 - DNA, 384 bp, Homo sapiens
tttgtaataaatgatagaatatcacacacgtatttctccactttgcttttttcacttaacagtctattctggagatcactatctagtggagtgtagagatactcgtcattgttcttttcagttgtagtactccactgtgtagtattcattatagtttatcatttattcagtgtgtccctcttaattgaccaatgaatgttggttaattgaatgactataattttagtcttagagttgtcccttatttttgtattattgcaagttataggaatttttatgtttataaaatattttgtatatgaataagaaaatggaatgattaacattttggtttctggtgtaattatttggatataatcttttctgttatttaattttgccacc

SEQ ID NO: 153400 - DNA, 146 bp, Homo sapiens
tttgcatatttccagatcctgacatggggtttgtattacggtaggccagtaattctccaacttttcatcttggaagtcttttacactttttaaaaacttttttttttttttgagacagggtctcactctatcacccaggctggagt

SEQ ID NO: 153401 - DNA, 408 bp, Homo sapiens
ggagttcaagaccatcctgggcaacacagtgacatcccatctctacaaaaaataaaattagctgggcatggtggtgcatgcctgtagtcctagctactcaggaggctgaggtaagaggatgcttgagcctaggagttcaagactacagtatgctatgattgtcccattgcactccagcctctgtgacagagtgagaacctgtggcaaaaaaatgtatatttatagtatgcagatgtgaaatagaagctataagcttgtaattctgttatggctgctcaggtttacactcttatagtttcatttctgaataagttaagtacatttctaaaaactgaggagaataaaaacaatgtcttgaggattgtgttatctgatgaaccttttattgatctgacgaagacccatttt

SEQ ID NO: 153402 - DNA, 164 bp, Homo sapiens
agaaagagaaaacatttcaagttgatgcctgcgtttctaggtagaatcacatgatgacttccttcccgttattatagccctggctccctgttagtcagggaagatgaacctagaggaagtagaaggaagaagagtgacatgcaggaagcttccctagaaacatt

SEQ ID NO: 153403 - DNA, 557 bp, Homo sapiens
gttttctttatctagtgtagaaatcatcactgaggactccactgatttaggaagtcagaactgtctccaggcagttgagcttttgctttccgcgagctggattccttagaaaggtttcatatgtatgagatatataataatatcccttattttgaaaccagaaatactgcacctcaaaagttacccattatcagttctctaaggaaacacttcatcaggcaagtaatttccctttctttataggatataacttccctaataaaacacctacaaatcgaactattataggcaactaccagctgggtgcggtggctcatgcctgtaatcccagcactttgggaggccgaggcgggcggatcacgaggtcaggagtttgagacccctgtctctactaaaagaatacaaaaaaaattagctgggtgtggtggtgcctgcctgtaattccagctacttgggaggctgaggcacgagaatcacttgaacccaagttgtggaagttgcaatgagctgagactgtgccactgcatccagcctggtctacagagcaagactgtcac

SEQ ID NO: 153404 - DNA, 612 bp, Homo sapiens
aaaaaggtagaaagggaattgggagggaattaagttcatttcctggaaaagggagtatttacagacattattactgttattattttaaaattcagacaaggtcttgttctgtcacccaggctggagtgcagtggcctgatctcagctcattgcaacctccacctccggggctcaaacagtcctcttgcctcagcctctgaagtagctgggactgcaggcatgcatcacacaggctatttttttatgtttttagtagagaaggggtttcaccagcctgggcaacatggcgagacccctgcctctattttaaaaagtacaaaaattagctgggcattggtggcttgtgcctgtagtcctggctacacaggaggctggagaattacttgagcccgggaggctgaggttgcagtgagctgagattgtgccacctgggtgacagagtaagacctagtctcaaaaaataaaataaaataaaataaaataaaataaaataataatttttattcattaatgtatttatatcagcctgaactcatgtttatagtcagctctcggtatctatggatgggttttgtatccatagattcaaccaaccacgaatcaaaaaaaata

SEQ ID NO: 153405 - DNA, 479 bp, Homo sapiens
tgccaggttgcactgtcacacagcccagctgattcactgtgggagggggctatacaccagcatgggggccaagagacgaggtcacccaggccatctggaaggctaaccgctgcatgatgtcgtggtcctgtgacatgctgctagacgtgtgtgggcagaattctttgcctgactctcactcagccagaggccagaggcctgcccaccgcccttctccttatctcagtcctttgtgctggcctctgctggggatggtttctgtctggacttttaatcttgtgtggaagccccttgtttcccaatggcaagtctctcttgatttgaaaatcactgatcacctttgtgtgttttgcccatcagaaggtgtaggataaatacatgtctttgtgaataatcttacaaacctcaaggtatagaatgacaattcagcaattcaaaaatatagatcatacaaagataacaacctagctgtaactact

SEQ ID NO: 153406 - DNA, 122 bp, Homo sapiens
caagttatgtttgaacttacattatctcttatattgttagtttcccatccatatgttctatattcccaaagtaaatggtcagatcctagacagcataaactacacattaaatctctttgtat

SEQ ID NO: 153407 - DNA, 684 bp, Homo sapiens
ttgagaaagtctgtctccctttgaattctcattatctccgtgcttgtcaaacacttctgaccgcttacgtgtgcaaaaccgggggactaaaattaagaatataggtataaagacagagtcatatagtcaaaataacatggtaaaggctatggtatagtaaaattccattaaaaatcattatgggtgaatacacatagacatataaagaggaataatagacactatagactctaaaagtgggaagggtgggaaaaggcgagggctgaaaaattacctattgggtgcagtgttcactatttgggtgaagggtaccctagaagcccaaacctcaccattatacaatacatgtaacaaatctgcaccccctgaacccataaaaataaaaaattataaaaataaaaaatcattatgagtaatgtaattattactctagtatctaacatttctaaattatttaaagtgctattcacaatcatatatctatatttcattaaaaatgagagtttacaataaaagatacctgaatttaccatgagacagaccagattttaggatttaaaaactttagtatcccagcctggccaacatggcgaagccccatctctactaaaaatacaaaaaaaaattagctgggtgtggtggcgggtgcctgtaatcccagctactcgggaggctgaagcagga

SEQ ID NO: 153408 - DNA, 424 bp, Homo sapiens
aggcgcttccctgcgtggcactggagttttggcttgcaggatatgctgcaagctgctgctaaagctactaacatcgcagcttggccttttaaagaaacatttaaacagaaattgacaaggcttttaaacagacatatacagtggcttaacacaaagaacttgttgaaaaaataacacccaccccaaaggggctagctgtgttaaatatatatgatttttttcacacagcaagatccatcatcttagtttttagcatcttggtggaaaaaggggagcatcatctgccggaaacagtgaaggatacctaattttctccatcgacactgcacctcattcccactcagtcccagcactcagttaaatgggacctctcgcttcattggggtgaggagggatagcttccaaacaacagggagtgaaattc

SEQ ID NO: 153409 - DNA, 241 bp, Homo sapiens
gaacaggctgggctaatgtgagctctcagcctggcagtcaagacatcagcatgggcaaggttctgtttccaaactgctgcttctggtgacattccaagacgcctggagggtgggagtcaggaagtaggacacacccctgcagtctccttttcttggtccactcccattcaaatttgagctaatttctcattctgataaaagccataggtttagctaggatgaagtggtaggaaggtccgtg

SEQ ID NO: 153410 - DNA, 509 bp, Homo sapiens
cagcatttgttctcctggctcccaccctgccaggtctctgtctgacagtggctcacgcttttccacagcccctgtcaggtggcctctcccaaagtgacagtgttcacttggttctgtaagtgttttctccattgcctcttgccagggagggtaatggcttcctagagccagatgccagcacctgaggttgcccaccaccccatgctgtttcccttaaccctgcctacactttcaagaattgaaactctttgcagcctcctttttttttttttaaaaaaaaggtactatcgatttcctaaaggaccgtgagtgatatacactcagagattcttttgtcatgttactttccgtagctcaatatggctgttatccacattatacaaagaacataatacctaccttaaatttttaatattttgtctttattcttcaactctgtgtagcatttccttctggttaagaacatgcagataatccaaataaacagatttgactaaaagaaaaaaaaa

SEQ ID NO: 153411 - DNA, 179 bp, Homo sapiens
gcctccaatatgaggcagaaatgttaatatgatctcttactctcctctccagttctctttgtttctcagaacattctagagagcatctagtaatagtgacagcccatgtctctgtattccttgctttccttcatctgattaaataatactgaggaacagaatcttggtccctcttgagt

SEQ ID NO: 153412 - DNA, 294 bp, Homo sapiens
gtggcgctgcagctcgtccgagcgcgtgaagcgcttgccgcagaagagccagttgcacacgaagggacggtcgccgctgtgccagcgcaggtgcgccttcaggtgcgacgtcttggcgtaggctttcccgcagcccgggatgtggcagttgtgcaaatgcttcttcttgcccccatcgggcccacatggagcccccagtcgctccgcctccagacagttggggcagcgacagacggtctggcctgagctgcggggcaccgaccgccgggagcctttgggacgcgccgccccgtc

SEQ ID NO: 153413 - DNA, 382 bp, Homo sapiens
aaagaaaagaaggaggatgggtaagaaagggcttggagagtctgggagcctatgtgagtctgtgtgcaaagcatattaactctgactctgcccaaagcttacagagaagatattcagatgtcaagttatactgatataccatagctctttgaaaatgaataattggtccttataaaagaggaaattgggatacagagacaggcctacagaggaaaaaaactgaagacacaagaattgaacagccttgtgactggagtgattcatctacaaaccaaagaatacttggtgctaccaaaagctgggagaggggcctgaaaaagacccttactgggatctttcacaggaaatgtgccctgcagataccttgattttggacatctaa

SEQ ID NO: 153414 - DNA, 310 bp, Homo sapiens
  misc_feature (203)..(204): n is a, c, g, or t
  misc_feature (208)..(209): n is a, c, g, or t
  misc_feature (260)..(260): n is a, c, g, or t
  misc_feature (280)..(280): n is a, c, g, or t
ctacattcccggggagcacacacagcctgccagcaccctgacctgggacttccggcctgcaacccaggaggctcccccgcagtcgggagcgtgactaaggcgacagcgatttctaggatagtcagtagaattagaattgtgaagatgataagtgtagagggaaggttaatggttgatatctgctaggcgtttgggcgcggccnnttcnncaattaggtgcatgagtaggtggcctgcagtaatgttagcggttaggcgtnacagagaccccaaagagggnctaatttgggttgaatgagtaggctgatgg

SEQ ID NO: 153415 - DNA, 332 bp, Homo sapiens
tgcaggctcgtttgagtatctggtcattgaaatctcactatttgtatgttggtaataatagtttgcttgtttctgcctatttcattgcatgagagaatgaagtgtgcacgtaaggtcacacgtttgatacagacagatactctctaatttacgacagggctgccttcccagaaacccatcctaagttgaagatacttttaagtcggaaatgcgtttaatacccttcagtctactgaacatggtaacatagcctcacctaccttaagtgcgcttggaatgggtaaatgttagccgacagttgggcaggagcacctggcagtgcaggttgccat

SEQ ID NO: 153416 - DNA, 909 bp, Homo sapiens
tactgcggaccctgctgcaggctgccctttccacagatcccctggatgccggggtggattacagcggatactcgcccatgcactgggcctcctacactggacatgaagattgtctggagttgttacttgaacacagcccgttttcgtacctggaaggaaaccccttcactcctttgcactgtgcagtgattaataaccaagacagcaccacagagatgctactgggagctctgggtgccaagattgtgaacagccgagatgccaaaggacggaccccccttcacgccgctgccttcgcggacaatgtctctgggctccggatgctgctgcagcatcaagctgaggtgaacgccactgaccacactggccgcactgcgctcatgacggcggctgagaacgggcagaccgctgctgtggaatttctgctgtatcgagggaaggcagaccttactgtgttggatgagaacaagaacacggccctccacttggcttgtagcaagggccatgagaaatgtgccctcatgatcctggcagaaacccaagaccttggccttatcaatgctaccaacagtgcgctgcagatgccactccacattgctgcccggaatggtctagcttctgtggtacaggccctgctgagtcatggggccacagtgctggctgtggatgaagaaggtcacaccccagcactggcctgtgcccccaacaaagatgtggcagactgcctggccttgatcctttccaccatgaagcctttcccacccaaggacgccgtcagtcctttcagcttcagcctgctcaagaactgcagcattgcagccgccaagacggtgggtggctgcggcgccctgccccatggggcctcctgcccctacagccaggagcggcccggcgccattgggttagatg

SEQ ID NO: 153417 - DNA, 337 bp, Homo sapiens
gccggacgtgtggttcacagccgtcatttcctctctgtccgctccagagcctcagcactcagatttggaggaaaacctgtagctggcgaggaagccaggagtgtccccacccccactctcttttctctgtttacccccatgttacctgtctcacggacacattgtacacggagacatccttttgacagtttaaaagaagtgcataaaaccgcgtacacatcgacaagctgcagacactcttactcccatcggctctcagacaaaacgcagttggacgttaactgacttatgcccattccttagtctataagcatttccccagcactttcctgcaatc

SEQ ID NO: 153418 - DNA, 404 bp, Homo sapiens
tgatttcatttccataacgtttttgaaatgacaaaattctagaaatgaagagttgattagtggttgtcaggagttatggagggggtgggagcaggaagtcacgggttgtggctataaaatggcaagatgagggaactttatggtaacgaaaatgttctgtatcttgacagtatcaatgtctatatcctgattataacattgtgctattatatgctgttaccattggaaaaaaaatgggtaaacggtacacaggatcttgattatttcttacaactacatatgaatctacaattatctcaaaattaaaagttaatttttaaaaacaaattcagggcatacacatacaaaactaaatttatcttttataagttggcagggttctgctgatatagaccaggtggctc

SEQ ID NO: 153419 - DNA, 281 bp, Homo sapiens
ctccacaaccagcagtcacagctggaaagggtagctgggctgaggaaactgcagcccagggagggtgagtgggactcagggatcctggactccaggtcagtagcacacaccagcacagcgcctaccccagaagccctgggccagacccacccagccttaatgtcagggcacagttagcctggacacaaaaccatgaataactcatgtttgcatcgtgttctgctgttttccaaactctttctcatccctcactctctcctgatcatcatgcagtcttcaat

SEQ ID NO: 153420 - DNA, 146 bp, Homo sapiens
tcatataactgattgtaacgtaattactaaacttccttcgaatgaaattgtgctgctgctcctcatgtgtatacttaagaaggcatgttttgaacttgaagttcatcctgaacttagcatggagtataaagctaggcttgaaactg

SEQ ID NO: 153421 - DNA, 419 bp, Homo sapiens
tcagagttcatgtcatttacaagctgtgtgtccctggagaagtcccttaacctctctgagcctcagtgttctctgggaagtgaggacagtgcgtgaaataatgagtgtgcatgtgcagtgccgtgctgggcacagaggtggtgctgacaagtggctgctgctattgtgtgtcgattgtgacagtaggtggggggcaagtagaaagtagaaaggccctgagcgaggcactggtctatgccaacccagctctgttggatgtgctgtgtggccctaggagagtgtcaccacctttctggaccccaagctctccctgctgtctcaggcacatgatggagatggtggtgcttgggacaactctgagacctgggagaatggagtccctgccccgactctgcctctgcaaggtccctggactgtag

SEQ ID NO: 153422 - DNA, 217 bp, Homo sapiens
cttccaccgtatttccctagagtggtgactgcactactatcaatgcaataacccaaactagaaccctaagaatcaccctaatcttcttccctttcctttcctgcactgcctatacctaaacataaaaaatcctgtgattcttctctcttcaatatgactgaaacttaccccttccccactgccataggcttagttcaggcccatctctcttctggac

SEQ ID NO: 153423 - DNA, 420 bp, Homo sapiens
gttatttcctggcagtgaaatctgtgaacacctcatgacaggtggcatctgagctgagacttcaagaatggttgggagtttgagttgagtttcctagaggaggaaaagacatggggtacatgtgggcaaataagagtggctctatttgactaatgcatgaagtgaaataggcatgttgttagagtggagctgataggtactgggaggctagataccatggggacttataagctgtaggacttctacttttaccctgagtgaaatgacaaatatttcagagctgtgttcatttggaggaggttaatttggatatagggcttgccttcataacccaaagtaattgctgcaaagattatccctccagaggtcacttttctgacacccaggaaggaaacagaaaggccatctgaggggcacagt

SEQ ID NO: 153424 - DNA, 330 bp, Homo sapiens
  misc_feature (2)..(2): n is a, c, g, or t
antggaagtacagaggacaggcagaatagtagtacagaaacagcaaaagagggccgctgggcggggagaggcctgtgggccatgtggacagtgtgtagaccacccagaggtgtccctgtgaaaattcccccaaaacaagccaggcacagtagcaagcatctgttgtcccaggcacaccagcttgtcttggggggtttgaagggcaaggtcaccaaagtgcctgacttcctctgtaataacaaagggcatgagatgtatcaatgagtggaagtgacagaggacaggaagaatagtctgttcagaaacagcaaaagagggccggtgtggtgg

SEQ ID NO: 153425 - DNA, 682 bp, Homo sapiens
ccgggagcccttaaccctccgggagcccttaaccctccgggagcccttaaccctccgggagcccttaaccctccggcaccccttaaccctccgggagcacttatcccttggatttgcttggtcccaactgtagacagtcccaggacaccagaagtggacaacagaatcaggcaaacttaaatttctcagcagtgatgccatcaccaaaacagagactccaggccccatgagttaagtactgcatcttcaagcaaatgaacaaggccaatgctgtaggtcagcattggaaccaactcccaagctttcttcctcccacaaggagatattttgcaagtagctattcttaaatatgtttttgtaatcacagcctgggatactaaaattgaaactggtaacagacactgctaaaaaacttgttttgatttcactcgccacatcacttttacctctgattcacaaatcgcagtgaccaccaccattaagaaatgttttaaaaataagttttaggctgggcatggtgccatcagagcttactcaacctcccaggtcaagtgatccttccacctgagcctcccaagtagctgagactacaggctgaatgtgaatgttgaatgaatgaatgaattggtgttaaacagattctcgctctgttgcccaggctggagtttgcttgcgatgaagc

SEQ ID NO: 153426 - DNA, 922 bp, Homo sapiens
  misc_feature (1)..(1): n is a, c, g, or t
ntcaggaactaggcatttggcttgggtccatgggactgggaaatgtggctgagctgcttgtccaaggagaagagcagaaggtttgggcctgccaagaacaaaagcactttaagggaacagaagaattgctgttaccaggcacctgtgatgagtcaatcactgcagataaacaccaaatttatgtgtgttcatcttggcagccaaggcaaaaaggaaaaatgtgtttctcccaaggttgcctgcatacacaaacattttcttggctcaaaactgaatggagactttaacatgtggtttcttatgttaaaaacattgaagaacataatggatggatgatgccttcacacaatcttatgaaaaacatggacattgttcaactataaaaggttcaattttaacattaaaagaaattcagtggaatcctttctatgggttgctgagataatgaaatccaaatatatcattcctaaatacccaatttaaaacagacagagctttagacaatctggaggaagaggtaatcaacctatccaaaagacagcctctctctcaaaaaaaatgtctcaaattagcttttggaaagaactgctctgctgttagtttagaagttctgaattcctagtatttgttttgctaattcaaggtggacccttttagttagttgacttgtgcctctctccaacccccacgaagggaaagatacttccttgtccacacacacacacacacaaaaagttcatgcaaaacttgtggattccaatataatgcatttgacaaaatgtctcttaaaaatcagttccaaatggtagctggataaaatgacattacctgattgtgtttaattttgtagttgtcgatgtcattttattctttgtacccctacttcaatgaattcataaaataaattttaattctttgaaga

SEQ ID NO: 153427 - DNA, 452 bp, Homo sapiens
gaagtatgcccctgtggaaacactaccgggagccaaggagattgccctctcatcgcggggccagtcctagaagccacttcttccccaaggcaatggcaggaggaaagatttgacttagtgtggggatgataaagatcaggaggttgcagcacatcatcataggaagatacagagaggctgtgaggagcaagacaagtctgaaagccaccaagagggagacagtactagggagacttggcagggtttgtagtaaagcgaaactttgccagtcattagaaattagtttagaggcattaaaatgctgcccaaatcttggaagataaacttgtgctctggtgaattattcctctctctctccctaattcctaattgcaagaagttgctctagaatcagctgggactgaggggttgattgtggtggatttgctcccctcctccacctgcaccttggc

SEQ ID NO: 153428 - DNA, 170 bp, Homo sapiens
atggtatcacatctgctgggtttctggtgaggcctcagagctcttactcttggcagaaggtgaagtgggagtaggtatgtcacaaggcaagagtaggagcaagggagagagagggggaggtctcagactctcttgagtgagcattcactcatccctaagggatggtgcta

SEQ ID NO: 153429 - DNA, 503 bp, Homo sapiens
tgctgggatgacaggcaggagccaccgcgccccaccattggagttccatggtattgagaaaggggctgccttctgcactaggggtggcattgaaagttctcccacatcctggacagaggcactccttaaaggaatctttcaatttaaagggaaaaaaaatctctccaaattgcttcacagttttcatgaaccaaacacatgagtctcttgaattcataaatattcagtgatgtccctatttaaatacttatttatttaggaacctgcagttcagttcagttatgacacataataatcctgaaataattcatggttttgactttataaaaagtgttatgtgatgcacaagagggtgaagggggaggaacttgagcaagcagctgagagctggctctaggactagatttcctctgtaggcgttaagcatctcctgcaaccaaatctctctaacctctgcaaagcttaggacagcatttgactcagtccaggctcacctcggccct

SEQ ID NO: 153430 - DNA, 246 bp, Homo sapiens
caacgctcaacaatataactgtttttcctaactcaattttaaattccttaagagcaagaaagggtcatgtacttatggtatatttatgctttaactatccaataaaaattattctttgtacatagcatgtttttaataatatcttaaagcgtgaatgtgggggagagtggcctactgaccaggctttgatttgaaggcccaaggtacaacggaaatggcttagtagctggatggttcctgaagagg

SEQ ID NO: 153431 - DNA, 561 bp, Homo sapiens
cccttctatacaatactcattcatagatgtctacattgatatgtgattcacccattcttttagaatatggttataaactttcaagcaataattcaagcaatatttcaagcaaaataatttgaaaatttgctataaactctggacttttgcctggaaattgcatctatacatatctatttatttagaaatcagggacgtcctgattcttctttagagaaccatgttgctagttaagaacctgaactgttctcaaaagcacagttacattattagatcaagcctaaccattaagagggctagatacacagaccacgttgttttgcttcccctgattaaattgctcttattgaattgggcattgttgtgcttcactcagcattaaagggcattttgagaaatagctctttaaaattcaattttttttggtaggaattttggagactttatttccatatttttgaaaacatgagattgcaatccattagtgggttgtgaaacaatttggtggtcccaaccagtatttcttggttttgtattgtttcttttgcttttttcctatgc

SEQ ID NO: 153432 - DNA, 348 bp, Homo sapiens
tagttgggcatggtggtgcacacctatcatcccagctacccgggaggctgaggtgggaggatcacttgagcctgggagattgaggctgcagtgagccataatcacgccactatactctagcctgggcaacagagtaagaccctatctcaaaaagaaacctcaaaaaccagatagacgaatggccactaaccatgtgaagtgatgctgaacatcattactcagtagggaaatacaaatcaaaaccacagtgagttactacttcatacctattatggatagttattattaaaaaaaacacacacacatagggaacaacagtgttggcaaggaagtagagaaactgccatg

SEQ ID NO: 153433 - DNA, 377 bp, Homo sapiens
gtcattctccagctcactcccaatcccaggctcaccctccttgcctttcccaggggccggggagggtgtgtcaaagcagggtgctgctgtagtgctgttggtgatgcagtgagtgtttttcttctctcagcatggatggccagcatcctggcacagaatcttggaactgggattaaagagcaggtttctggcatactgaagctgcacaggactcttggaaagtgtatgttccattcctgctttcagagaaatagccacagtgtagactctgagtcgtcttggtaaaagtcaccacttccagaagcagaggctacaatactgccatctttctcttctcaatacaaaacccaagcctctgattcttacctgaacccacg

SEQ ID NO: 153434 - DNA, 716 bp, Homo sapiens
ggcggaccggactaaaaatacgtacagtaattgtaaagcactagttatcagagagaactttaaatcattagcttcattttccagaggcccgggccagggacgtctgacagatctgttcaacgtcatagaattaactcatgggttgagaggctgggcctagaatctgggcatactgcttccacccagtgtgttccttggctcgttgagtgaccaaagcaccgcagtcacccagtctacctctagattatagactcatcaaacaattgaagctgcagagcaattcatttttaaatgacttctaatatgaagcactacacaattatcagtatgcccttaccacatagaactgggacctatcttgtttttccacagtagaaagcattcagaatcaagacagtgcaagccaccttctccagttccttagcaattgttctttaactgatttttttgctgcaactttacaactaaagaattactgttttataaatgaataaaacaaggtgcaagagaatggttctgatatgcacaactggttgatttgatgattctgaatgatgtgtttattaattgattcaaataattgtttttgacttttgaggattaaatttctggctagtttgatgatactaattacttattttaaaactcttaaactcctacatatatataactcaccgccagtcgcttttgttaggtatttctaagtccaaactgta

SEQ ID NO: 153435 - DNA, 222 bp, Homo sapiens
cttgtatttatagacttctgatcccaggctttatgggcggagacatgcttttatgaggataaaaacccacattatccagcgaggaacacatgagggatgtaaaagaaaagaggtcttactgtttcctttacattctgtcttctacagtcctagtgccactgctttagtggaggtcatcattatatcttgcctggaccagagaaaaagcctgcctaactggtc

SEQ ID NO: 153436 - DNA, 404 bp, Homo sapiens
caactctgtgaatggactaaaaacattgtatttatatacactttaaattactgaagtgtacagaatgtaaattatatctcaataaagctgatatgtgcatacacacacacacacacacacccaacagcagaagaaaatacctaaaaggtaatgaacaaaagcattcagattaaagcatgagaatctgaaggtttggtcatctacatcttgttccatagataagcatagactgtctactaaacacagttgtcaacttgatccaaaaatcttcgctggattctgtttctttcaagactgtttctagaggggtccacaaataattatctttgaagtttctgattaggacatctttcctgggattctaagattatttatgcctctttaattaaaagactttaaggatc

SEQ ID NO: 153437 - DNA, 474 bp, Homo sapiens
cacggtatctctaacattaggagaggatgagagcccagagggtaacagtaacagcgttcaggttatcgaagataacaatgttaaggaaactcttatctcagtcatgcataaatatgcagtgatatggcagaagacaccagagcagatgcagagagccattttgtgaatggattggattatttaataacattaccttactgtggaggaaggattgtaaaaaaaaatgcctttgagacagtttcttagctttttaattgttgtttctttctagtggtctttgtaagagtgtagaagcattccttctttgataatgttagagatacgtatctctatcattaagtctctcctagaaaactgtacagcagctaaatcacagattccatatagttagcctcaaagtgcttaggaagaactcaaagaaagaatacaaactgtttaactttatatctagtatgtaaagtttgtaatgaaggt

SEQ ID NO: 153438 - DNA, 214 bp, Homo sapiens
tttgagatgtggagttggagtttttatccttatatgtttaaatgttatgtttggccataaaacaagcctccataaatgtaaaagaatggaaatcatacaaaatatattcggtgaccacaatagaaagaagttagaaatcaataacagaaagaaatttgggaaattcacaaatatgtagaaattaaacaacacactattaaagaacgaatgtgtt

SEQ ID NO: 153439 - DNA, 279 bp, Homo sapiens
gattctggctcagtgttttgtgaagttttagtcaatatattggccagggcctgcagtcatctgaaggcttgacctgagctggagaacttgcctctgagatggctcacttcatctggctgttggcaggaggcctcagtttcttacttactatataggcttcttctccataggagtgcttaagtatcctcctgacaaggcagccagcttctttcagagaggatgatccaagatatatagagagaagctaccatgtatggaagttacattccgttattctgc

SEQ ID NO: 153440 - DNA, 571 bp, Homo sapiens
  misc_feature (539)..(539): n is a, c, g, or t
ggactgacaggtcaaatggtcacacatttttactgtgttaaaacactgccaaagacaccgcatcagattacgctcccccaaccacgcgggagagaccccgtctacatccttgccaacactgtatgttatcaaatgttccttttgccagtttaataatcacatatttcaaaagttgtacttctttaattgcaaacagaaccaggcatcttttcatgtttatgtgtctttctctgttcaaattctttacccaaattgattttaaaagctctttatgcattaagaaaaaaaacaggccagtgggcagtggctcacacctgtaatcccagcatgaagattacatttgggaggccgatgcgggcggatcacctgaggtcaggagttcgagaccagcctggcgagcgagactttgtctaaaaaaaaaaatcaactctgaaatttttccagtacaagtgtctgcgatttcaccccctttaatattttaggaaaactcatctcacttgcttgctttatttgcctgtgctgttggttccacgcactcntcagctcctccaggggaagccctggttcccca

SEQ ID NO: 153441 - DNA, 371 bp, Homo sapiens
agaaaccagatttcttgaaattcagctgttacactctccagagatcctcctcccttattgaaagtgatccaggttgctcaaaccaatctttttgcttctccttgtaacctaagtgtgcttgataccttttgtttaacacttgagattgtaaggaaccttaccattgaaaatttagatgtgaaaacataagctcttacaagttgttatagaatttattttattgtttgtcatgtttataagtagtgttgagaattaacggctttcccaggattccagtttgctttcttttcaaagagaattgtttgggccatgcctggattctaaaaatattctctcccccaaaacaattggtttcaagaagcaggaactgg

SEQ ID NO: 153442 - DNA, 285 bp, Homo sapiens
acagagtaggtgcttagtaaacatgtatgaatgaatgaataagcattggatctcagaccttactgtgaagaggaagagataaaagataaatttataaattgattatgagataatgtgatgcattattgtagaatgaacaagtaatgtccaagaaagaagagatcaaagagggctataattcattcagtcaactgctatctgcatcctgtttccctgtgttagatgaactagtggattagaaatatatagtccctacaatcatggaacatgtaaactaacaaagca

SEQ ID NO: 153443 - DNA, 740 bp, Homo sapiens
ttgtatgcccagtggccaagggggccccaagtacctgctgaatggctagagcctcaaccatgttttgggaggcagttgggggcagagtgggcattaagctatctgctgagtccagggttgcttgtccttgccccagagcctcatctctgagattaaatagggagaggagatgttgggcctacacagaggtgggagatgcaggaagctaactgactgcaggtgagaagatcatctcatctttaggatctctgttttataccacctgtaggacagaggagagataaagcagtaacgacagtacccaccttcaaagtggatgaggaagtcagccccagaggcacaggtgactcccaaaaatggtctggactcactggagtccaatgattttgtcatcagatatttgcagaatgtctgctatgtgccagactcatctgggcattggagatgcaatggtgaatcctgccctcagtgttaggccatcaacagaaaaaaacaatacatgagaaagacaatctggacagtgataagcactaggaagaaaactgaaacagactggtaagggagtgactggaagggaccatttcagtttggttgtcaggggaagcctctttgaagaaagaacatgagatctgaggcttgattatgaaaaagggctagctagccatctgaagatctgggggaagtgcattcaaggaagaaagaaaagcaacgccaaaggcccttaggtggcggtgggctct

SEQ ID NO: 153444 - DNA, 649 bp, Homo sapiens
tcctagctagcagcacggggtttcaccgtgttaagccaggatggtctcgatctcctgacctcatgatccacccgcctcggcctcccaaagtgctgggactacaggcacctgccaccagtgctatggctaactttttggccaccatgcttggctaattttaggcccactgcacctggcctcttctcttcttatattgaatattttgagtaaattagattatgtagtatgaaatcaaattgcttttccaaagaaatgttcaatttatctaacgtccatcaatgacttatatgtattattttaaaaagcagaaaatagctgaaaaagcacagtcgtatgccaaataccattagatcaagaacaaaatgtctaactgtgtgaagcacaatataatgcagacatccacatattctgtttgcagttgggatagttattaacattgctgtttttaatgtggatatgggaacatagagttaaaagattaccctgaaacttcaagactgtacaacttaaaacagctactataacttcagtttaaatgtgcttttatcttttgattaatttggaatttacagttttaacatttgcagtaacagaggcagcagcaggtgtagtagtttagttattaatcctatgataatgtaattgtgct

SEQ ID NO: 153445 - DNA, 252 bp, Homo sapiens
atttactgaataaatatgtaccaggtgttgtgttaggttctaaggggctaaaataactaagatactgaactaaagtagaactattgggctcctaatgtgatagtttttccactatagacagccctcttcttccaagggtccctgccagggcttcccctaccctaaacagtgccttggtaaaaattaggaaagtcaccccttccttaagacacttgactttccaacagtgccttggtaagaattaggcgagtc

SEQ ID NO: 153446 - DNA, 346 bp, Homo sapiens
acaccatggggagttaggagacatctcggtaaaagggtgttagaaaggccctattatagcatttgggcttgtgttaggtgattttggtttggtataaggaactgggctttgctctgggttgggcgctgtcaggaatcaggaataattctttgatcggggattttaaaccttatctaggagggaagatgagagccacaccagaactgtaattaggaaagaagcagcagtcactcgtattagccaagacaggcagatgtttgaccatttttttgtggtttcgacaacattcaaatactctgttcagacatgatttcagagtggttgtgtttttgtcttgatccttcag

SEQ ID NO: 153447 - DNA, 445 bp, Homo sapiens
ataagtatataatacatatgtacacatgtaactctacatatacacatacacatacacattttagaaatcatgaatttttaccaatatctctaattccagttcatgttcacagggtttttccttaccacccctcattccatatttgtatttcttttcttctattgcaagaactctgggatggagctttttcaatcttttattagtgttaaatgtctcattaaaatttaaaaagtaggcagtgagaagagcacacagagacagacaagaaacaacaaggcccaaccagaaaaggaagagaaaatcagaagaaggatattaaagaagtccagggagaaatgcatttcagccctatcaaattttatttcgactaaaataagggacagaggaaaaaggacacattttgggggaagattttggccatattgagatcaattttggatgtatc

SEQ ID NO: 153448 - DNA, 358 bp, Homo sapiens
aaagtcccaaatacactctccgaagaagcctaggcagcagtttccaaatcaggatttgcttcagaaccctccggggcacttgtaaaaattacacaccttaagttttacatgacttggttgaaacctttccagctacaaaaggtataatggaagaataaccagaagctatttactcacttattcaacaaatgcttttttaatggaaaagctgcctaactgtgtacttggctgtgtagtaggtgctgaggatccagatgtaaacagaactgagttttgactttagggaatttatagtctggtgggaattaagtgggaaagataaatgggtaaagaaaggtgctgtggcacatgagaggga

SEQ ID NO: 153449 - DNA, 369 bp, Homo sapiens
aatggacatatatagtgattagagaatattatgcagccatttaaattgcatatgtaatagttaccactttacttggcataaagccagttttaataaatttcaaagaattagtaacaaaaataattgagaaaaacttccagaaactggaaaaggataatgtgcttttgttataaaagttcatgttatgttgaaatggataaatggaaaacaacaaaaacaaaaagcatacccagaaacatgaaggtcacattttatatcaccagaatgatataaactgatttgcttcaaaggaatgagagagactttgatttgatcagggtggtgacatcagaagcaaaaagaagtgcagaaatcaatagtgagttctca

SEQ ID NO: 153450 - DNA, 114 bp, Homo sapiens
ctggggagcagcgatgtccaaggtggatccacccctcgtagcaggatgaagagttgctgatctgtggcattgcaacattgtgcagttacgctatgtgccttaaatccatcaaag

SEQ ID NO: 153451 - DNA, 270 bp, Homo sapiens
ttaattgtgtcagaacaacaagtgcaaactaaaatcatctcagttaaaccaggaagtctggtttctctgtgaaaaaggtagttagggaagagacttgcatgctaatatcctcataggatataactagaaccaaattagtacaaattcaagagaaacaaattattgctcatgataagaaataccttttgagaattagcatattgaccaaaggtgtgctagattcctttagatcttaagagtttcttgtcatttgagacattcaagtgaagg

SEQ ID NO: 153452 - DNA, 389 bp, Homo sapiens
ttaaggtttccaattaccaaagctttgttggaagactgggcacgtactggagaggacagggaggagaataagtattagctaaggaactcttttgcaaggtacataatttacacagtacatagaaatgagccctctcttcctgggaaacatgagactcacaagataaagcccaattttattttcctatgaaaaagaaatggaatgtaagtatataaaaacatactgaccattcaattaaagacacatgaaagtataatgccatttttatatactaactaggaaagatgtaaaaaataggtagtaatactcaatgttggcaagggtttggagaaatagaaatacttttttgcgctgttggtgagagtgcaatttgataatggcactggaaa

SEQ ID NO: 153453 - DNA, 221 bp, Homo sapiens
gtcacctaatgtgtggtactttgtagtggcactaaaggaaactaaagcacagatatatgccaagatggtggtttcttttggttggcttcacacccattagttttgggtgtgaagtgtatggtactatacactccaagttccaaactgactttcaaacaaacttatgaaatgactcaccaatagcttagtccagaactgagaactgtctgcctttgttttaa

SEQ ID NO: 153454 - DNA, 118 bp, Homo sapiens
tgctgggattacaggcatgagccactcctttctaacatcctctgaggtaacccatggttccctatattgtgtgtgttctccctcactgcaacaagttaacctgacttactcaattaca

SEQ ID NO: 153455 - DNA, 349 bp, Homo sapiens
gatgagagaatgttctagcaacatacatgtgtaagcccccagccacgggcgcagctcagtgcctggctgctgagtgctctagacagcactcttctgccctggcctcctcaaccagggtgcatttccacttagaaaaaagttcctcctgtcttggttgctaaatggatttgcattttgtccaaagtgatactctgtcttcttccaggagacatccagaccttttggcttaggttgaaagccaagcacctgcttttcaaaacctacttatttcacagggatgcttgaaagtgggacagaagtattgtgtaatcctgtgaatttctgcaagaaaagggcagacttctggcaa

SEQ ID NO: 153456 - DNA, 584 bp, Homo sapiens
aagtttccatccctgcttgaagagtttgtaaagcaactggagtgtagctgcacaagtacaaggcggttgcccttttagacacttcagtcgcgagcatttggtactgaaaatacgaaaacaaccaaattgtaggagtgtccttcagctgcctttccatattgaggcgatttgggcggaagggggtggggaattgggctgcgcttctgaggtttcccgcgaggttattttttggttgtttctcagttgagatgtgtggagggttttagctactgttcctggaagttgtgctgtaagtagtaggtgaatcgtcaatagtgtcttatccgtaattgtagggagtgggattaataattagtccgtgctcctctccccacgtctccaccgtgattttcaaaggtttaagattctgtactggattctgtactagcttgccctttttaatgtgttatttatttgagaaagctgtcgtttcaagtgttaaaatagcagataagcggcattgaaaagtgacaaagtaatgtgtgaaaacaaggagctaggaagttctagagacttagctaaaatgtaattttagtttctattaa

SEQ ID NO: 153457 - DNA, 472 bp, Homo sapiens
gtggtgagctggcttccctaaagaaaggcatttaaggaaatctgaggaaggagagggatagtctgccttcagagttttgtttttgagataggtctcactgtcacccaggctgagaggctgagatcatagctcacttcgtcctcgcgtctccagcacaggtccgggtttctccacccaatgcgcctgcgcacaggcctagcccagtcggacgcagcccaggactgccaggggtggggattgcctgggtcccccaggaagggccgggttacgtccggaaaagtgaggcccgggttccagaccagcctgaccaacatggacaaaccccatctctactaaaaatacaagcctgtaatcccagctacttgggaggctgaggcaggataatcgcttgaacccaggaggtggaggttgcgatgagccaggattgtgccattgcactgcagcctgggcaacaagagcaaaactccgtctc

SEQ ID NO: 153458 - DNA, 352 bp, Homo sapiens
tctgctagttatttactgaccagtcctaatggtgaagataccaacagagtaatcctttgcaggacttggtagcctagaacatttctggaattagttgttctttgctgacttctttatttacattgtacaaatactaattccctttttatcattatgaatctggattattaacatcaggctccccatagctttctcctctccacatagggagaaggaagaagaattcacttttatagagtgctaagtactatggttatacaacttagaagtcaacagtaaaaaattaaaatagcatttggctgttaatgacactttagcctctccaaataattcttattaaaatactcatgca

SEQ ID NO: 153459 - DNA, 191 bp, Homo sapiens
tgatactctttccatcaccttaagtctctatcttttttccttaaaacaacaataatcttttatatccaccttctccaaggggctggctactaaagacagctgcacctttgctcatgatgagacccacactagttatatatgttaagactatacatatatgtatatatatacttttttaaatcagtaaatct

SEQ ID NO: 153460 - DNA, 486 bp, Homo sapiens
cacacagcacttcaaagaaatgcttactgattctttttatgaattatatggatatatgcatgcatgcctgaataagtatttgactgcttgctatttgccagcctctttgtgtctagtagggaatgaactgaacctggcttctgccctcaagaagctgaagttgtagtagaggagatgggcagaaaaaagggagcagactagcaggcaacatccgttagactgggtgactgggaacagcctctcagagcaaatgctattcacgctgatgtctgaaggagaagccacttactatgcgaagaggggaggacagtgttccagataaggaataacaggtgcaaggaccttgaggcaggaaaataagctcggcaggttcaaggaaccaatgagccagtatggctaaagcctgacaagcagagagtgagtcaaggaaagcctggaaggacaaaaaccagatcaagcaaggccttgtgggtaatggtgaaaatt

SEQ ID NO: 153461 - DNA, 278 bp, Homo sapiens
gaaaccaggatgtactctctagtgaacaagaggcagaaaggccgactggaagtcagagatctggggaaaaggctccttgcaggttcaacagttgacctggaggtagaagttgttagagtttcaggatgttgtcaaatggtcagagaacaaacctctatctaccaacaactacatcatgcattaagaaagtctcacagactaaatctccaaaactcacagcagtaaacttaaaatgcaaataattgtttcttttctgcaaataagtttctacctctttt

SEQ ID NO: 153462 - DNA, 119 bp, Homo sapiens
aaaatgatgaggggaagacactctctcaacttgtggggactggtggacggacgaggagcaaacacaccggtcaatttatccagcatccaatgctttggagctgctacccgcttcagatg

SEQ ID NO: 153463 - DNA, 372 bp, Homo sapiens
agtttggggcaagtggggtaaatgaccctggaagtgcctggtgctgctgtgggcaggttctgggggtgtctgaacagatccttgtacagaagggccgattacagctcccccatcaagccagctgggagtgaggtaaatcagcccctgggaactgcaactgctgagaaccccagagccacactacgggagttccagggcccctcacagccctgcctagaaaaaccttgaccattggcctacccagagtgtctaagggcaggggcaatttcaggctgaactacatgagagtgaggagacatgcagaccacaggtcctaagcagcacctgtcactcaagccctgcaggcaacagcaggagcagcagaatggggtc

SEQ ID NO: 153464 - DNA, 885 bp, Homo sapiens
gggattacaggcatgagccaccgcacccggcctctgtatcagttttgaatttagttctgggtgttttccttacacctaaagtgtggactttttggatttctactgagtagccagttcagcaaagtctcttcagctgattataatgttcaggaaagactcttcagctgataataacttctggcatcaccattcagcagtcagtcaaacattaaatgattacctgtaggcattgtggagtttcatctctgcatgtccaggccagcccttagtcaaggcccaagaaacatgtttttatcgtcaagaacttctaggctcttagtttacataatggaatcttacagattttcctttgtttgcttgctgaacactgtcattgtcaccctgggatttcttttctctgcttcctgggttggttccactgtttcttggagtccacatctttttctctcttggatgatcctcgttttgctgggagtagatcctctagtatgtttttcaaaagggggtttttagagtgtaaagatcccaaggcactgcaggtgtgaaaataactattttgcaccttgattgacagtttggttttaaattaacttccagatttaaattaatttccacacagaattttaaagggattaccatattcccatttatcaggatacatctgatgctgatctgagtcttactggttttacaggtacttttttttgcattttcttattggaaacctaagattctcttgaaattctgcagttttgtgaagatgagtctaaatgttgagggtttgtctcttacattcagcctacttgttactgtgctttttctgtccataaaattgagttcatcgttgttgtcttctgatatttgtgtccctctttgattctgcct

SEQ ID NO: 153465 - DNA, 275 bp, Homo sapiens
cccaaagcgctcggattgcaagcgttagccaccacatctggctgttagccaccacattcagccataagcatgttctaaatgcatcattgtgttacttcacttcttgacaacactataaggcagatactatcgttatccccactctacagatgaggaaactgatgcaccagagaaactaagtcacctttccaaagttcctcaacagagaggtataagtagcaacatcatatcgccacttccaggagatggactacggcattcagattctggtttgg

SEQ ID NO: 153466 - DNA, 225 bp, Homo sapiens
cagatggtcctcctacctcagcctccagagtagctgggactcagacacacgccaccatggctggctaatttattttgtaattttttatagagatgggtgtctcactttgttggccaggctggtttccaactcctcacctcaagcgattttcccccctcagcttcccaaagtggtgggaagctgaggaccatcgatgcaacgagtggtcctcagtctacctttttt

SEQ ID NO: 153467 - DNA, 502 bp, Homo sapiens
caatttcccactcaacagcaaacttcagatttcaaaaaacacttgggccaaacagtattaccagataacatcagtttatcaaactctaatttcccatgatttgcctggcgtggtggctcatgcctgtaatcccagcactttgggagcccaaggtgggcggatcatttgaggtcaggagttcgaaactggccttgccaacatggtgaaaccctgtctctaccaaaaatacaaaaattagctgggcatggtggtgggcacctgtaatcccagttacctgggaggctgaggcaggagaattgcttgagcccgggaggtggatgtggcagtgagcagagatcgcaccactgctctccagcctgggtgacagagtgagactctgtctcaaaaaataaaaggttatacaactatgaacccagaaaaaacaaaataatctgggttaatgtgcctttttttgacaggtgagactactttaatgtcgtacgtgaatcttctgagttacggg

SEQ ID NO: 153468 - DNA, 312 bp, Homo sapiens
caattccattccagcgtaccactggtcactattctcaggtgggttttgagaatgaatgtgcagagtttatgatgtgtgtcgtgtgcgtgtgtgtgtatatgatcattaattttgaaataactgccaacactagttgacttgaaagaaaacctttttgaaagtttttagcttgttccaatttacttttatataataaggggcagtaaaacttcactcatagtgttaataccaattactcatagtacattagcagactatttgcaacataattaatttgccttgcataattaatttttctgccagaccaatatg

SEQ ID NO: 153469 - DNA, 164 bp, Homo sapiens
ggccttccatatttcaagacaagacatcaagaacttaaagtgatgaaaagggaaaggataacaagattaagcatcgggtcagatttagtgttgagagctacctggtctggcctttgtctaaatactagagaaaggtggcagagaaagaagagcccctgtgatca

SEQ ID NO: 153470 - DNA, 480 bp, Homo sapiens
gaaatagaaaatatgaccactacctttgggggacttattacctagttggggagagaagacaaagacacataggaaaaataaagaacagcacagaagacaaagtaatgccatgctgaagcagacgctttagtctttgtgtgctgtgcattcaggaggggcgtgtggtgaggggttccttcccctgcccaagggcagcctctctccttgctccttccattgctgactctctcagctttatttggggttatgcttcatcatttgtccccagaattcttgtatcttctatttctcactcttcattggcttcttctgtttgtaatacagaagtgctcagtcaggactactgcagacaaaaccaggaattcttagtatttgcttcctgactgaggctaccaccatattttatatcctccttgttaaatattttccaagtatgcatcactgtgtccttacaatctagctctcatttgcttcaaatag

SEQ ID NO: 153471 - DNA, 104 bp, Homo sapiens
ttgttactataactctccatcacaattaaaatccaaacagttttttgaaaacagtcaactcaatcaaaacccactacttcagaatcaatagcttctttgaagcc

SEQ ID NO: 153472 - DNA, 438 bp, Homo sapiens
agccaaagtcctcagaatggccttggggacctacaggctgggtccttctctgacctctctgatcgcgtctcccactctttccctatctttctctctcttcactccagccacattgactttgttcttcctcgaaagtggcaggtcgctcccacctcaggacctttacttttactcttctctctgcctagaacattctttccccacacttatgtgtagttcacgcctagcctccctcaggtcacttgaatgttaccttctccgaacgcacctcctccttgcttgatgtgccccatagctcttagcatcatctaacatattacatattctacttatttagtcctgcttctactagaatgtaagctccctgagggcagggattgtgcctgttttgttccctgctatatccccagtttctagaagagtgactggcatgtccaa

SEQ ID NO: 153473 - DNA, 689 bp, Homo sapiens
atcttgcttaattatcattcagaaaagtgcactctccctgcaaaatgtatgagagaccccctttatttcctccaagcctgtatcagctctggatatcatcaaacattaaaaatttccactctgcttggtgggggaaaaaatctcattgctttgatctgtatttccataattatgggtttgaacatcttttcatatgtttactcactatttatatttccttttctgtaaagtgcttccctagcctttgcccattcttctatttggcacctgatttgtatgagttctttgcaaattaaagaaatttgccatttgttatatttgccgcatattgtggttattagttttcccactctgtgatttattttcatacaaaagattttcattttatgtaattaaatatatatatttaatacatataaaagaaatatatgtttcttttttggattataggtttcttaggaaaactctcatttaaagtgtataaataaatttagctgagatttcttctagaattgtttttttttttctccttcacatgtaaatatgtcataagcaggattgtatttgggggtaaaaaatgaggtagctatctggcctgattttttttccagttagccacttgtatgaatatcactgaatgaataacccctctttttctcactaatttgaaatgccagctttctcataaa

SEQ ID NO: 153474 - DNA, 501 bp, Homo sapiens
gtcctggctacacaggagactaaggtgggaggactgcttgagcccaggagtttaagaccagcatgggcaacagagcaagatcccaactctagaaaaaataaattaaattaaaattaaaaaaatttaaaaggtaacaacaaaaactcaatctaattaaaaagcagagttaggaactgaaaaagcaagttgcaattacgtgctgtctactaaataatcactttaaatacaaacataaaggagcttaaaggaaaagaatggaaaaagattttcgctgaaaacagtaagtcagagcaatggtatgaacacaggacaaaacagactgcaagataatagactactagagataacgagggaaatgtggaaacacaccagaaaggcatagaaactataaatgtgtgtatgcctaatagcagcttcaaaataaatgaagcagaaaccaacagtattaaagggaggaacagataaatccataattggagtttaacatctcactttccttaa

SEQ ID NO: 153475 - DNA, 505 bp, Homo sapiens
  misc_feature (130)..(130): n is a, c, g, or t
ggggtatgttgatatttgtcggttactatgacttcttttttttcccccctcaattgcatcaaacccttaaaacatggtggtaagtgagcgatatgcatgcttttggagtttgtttaatctccgcttcagntctatacgatgcacagttcataatgttaacacttttcttcaagtttacttcattcactttcacaactaatttggatttcagtttgctgtttaatcctcatttactttggtttctgtatcttttttctgtaattctgttctttccctctcccctgacttccctgttaggggtcaagtcgtttttttggtctgaccggtaggggagagtggtgctgcagatagtgattcagtccaggagagtggggagacatgaggctcttttgttggtcagtgtgaaagtggatttggggagacagatgaagagggctcctgggatttggcccccttgtgaatctcaactgctcccacttgcaggcatggcagctatgccggaggc

SEQ ID NO: 153476 - DNA, 404 bp, Homo sapiens
atacatctgataaaaaccaccatacacgcagagcaccagcagagtctattaaaaagaggcagtttaaacaaacattaagctcttaactgcgagacactctcaggacatgaaatacatagtccttgcctggggaagctcacagtctggttgttaaacgtcacatgcaacctcgatggcagttaagtgccatgagcaagccttgaacaaagtgctgaggggactgggagagaggtaagaccagcgtagcaggacataccagcaccctcctcacaagcctcaagaaaacatctcaagtggactctaggacaggccatccttccaagacagcgtagggaggacagagcccccgggagaggacccgggggaagagggacctgggtctgggaaggcgaggagctgtcatg

SEQ ID NO: 153477 - DNA, 469 bp, Homo sapiens
agaatttatctaggttacttttagataagtaaatcaggccatttgtttgtatttattattggtatatttctgtataatttccttatgcctgtgtagatcgtggagttcttttgaagtcaatttcaagtcaagattatatttatgtacatgatttttttctcatatttctcactttcccaccatatgatctaggtttgctacatcagaattggagagtgacatttaacttagtgtttccggaataaagaatctggagcttttactaccccataagtaatctattttagcctttctaagtctgcagcttcctttcactttgctttccaatctagcatttcacctctagttttaccccagttatgctttatagattaaacctctgaaatgtgtttaatctgtatgaaatgaaattatagctgggcacagtggtgcacacctgtagtcccagctacttgggaggctgagcatg

SEQ ID NO: 153478 - DNA, 307 bp, Homo sapiens
ccaatgaccttcaggagatgacagacaaggagccatgttccctcccagaactcaggagaggcacctggcctgtgccacaattctagcctcaaactcaggccctcttcctaggaatgcccttatccacccctccttcagtgcaaagcctctctctccagatgtctgcccaggactcccttttctagccccaaccctaagatcggcccccacagcccacagcagtgacagcgtgaccagcagcagtcttcttacctctgagatggggaggatggcgcccagctgttctggccacagaggagatgcttgg

SEQ ID NO: 153479 - DNA, 382 bp, Homo sapiens
tgatttcatgtagtaaggatcccgtctatgaactctatgaatatgaggtaagaatgcatgaactaagccaacttagctgtattcttctggaaaatgggatgtttcttgataggctagattagtggttcttaaaagttttttggggtcacttatccttcagagaatcggatgaaagacactgggccctcaagttagaagatgagcataagcgcaatcacatgatttatatatatgattttaggaacttaaactgtaatgaaatagagccaatttatatttagatctcatttgaaaacctttcattttcattgttcgggtgtgtggatgttagtatgagtttaaggtgaaggagtctatgttagtatttgaacatgttgacagg

SEQ ID NO: 153480 - DNA, 248 bp, Homo sapiens
tagttttctactgggctgtcagggggatgtccttatagaaggaacattcagaagtactgaatgtgattatcccacctcccgagcagctggcggggtggggcgtgggttggctgggcggaaagtgccaagttcacccttcatatggatggctaccttactggcagcaccattcctgaacagccctcccctgatataaaaggagatggggagggaatttaagagggctcccagcaaatccatcaccactc

SEQ ID NO: 153481 - DNA, 367 bp, Homo sapiens
acctggagaatggccccttcttgagacaggaagagctagaagcttccaaatgcacacgtttaatgaaagagcaagcctaggagcccagatggctgcaattctgcatggtaaataacataacagaagttcttacaaagtacagtgggcacatagaagatagtacaatactatctgggagtaataaagaaagtttccaatggaagtgacatggagtgggggggagatgaagaagaggcacctgaaatttcaagctgaaggaaagaacataggctaaagcagaaagaagaggtatggcattgctttccacagttaaaaaaaaaatcatggccaggtgcagtggctcatacctgtaatcccagcactttgg

SEQ ID NO: 153482 - DNA, 293 bp, Homo sapiens
ctgggggcagcactggcttggcttgggcatcggagctggcatgaggctgccaggatccctcctccttcaataaacgcccccggtgtactgtgagcaggcagtgcggtgcagggcaaaaagcccagggctgggaggctcggctctgcgaccttgacctcaggcttcccatctgtaaagccctgacctcacactaaatggaaaatattgccctgctgcctactcccacgagtcccaccattttggccaaacctccgttgtacagatggacaacctgaggcaaggtgtttctggca

SEQ ID NO: 153483 - DNA, 462 bp, Homo sapiens
ttttttcatctttgtcacgtggggctatagtgacacaactgtatttacagggaagtctgtgggtttggtgttccctaaggagggtttatttaacatacttacaacattgtttactcagataaggaaacaccgagatgctaaaaaaatgattgtgcatgtatgtatgtgatatgcgtaagggtctagcttccttttataaaatatgagtgtcaaacatatgtagcattgcactgtaatgtcatacgtaaagttctttctgaaaaattatacccaaattgaaccttgctgttaaattcatagttcattttgttagaaaggccattatactgagtgaaaaatgacttggaatttaaccttagttttgacactgtgttcctggctgaatctttgccttgagctcaaattcccattggtaaaattaagttgagaacattctcattctgcctacctctttgaggttga

SEQ ID NO: 153484 - DNA, 430 bp, Homo sapiens
tgcccagtcacacaccccccagtgttccagaccaaccaacctgcctggcatctctcccatggcccaggtacactcaggcctccatgcttttgccaggctattctcactacccagtgtgccctgctcacctctcaagatgagcctcagactacgtaattatccctgcgcgtaagggccaagggcaaggatgggaaaagccagtactcgactctcagcctgtttgataagtataaaggaaaatcagtagacgcgattagatcctcagttattcctagacctggcttacagagtcttgggaaagttgctgcagcccggcgcatgccaccgcctgcaacctgccagcttgaagtctgaacaccaaggtaacgaccccgacctcgtgatagtacccacggacgggccggctaaggccagctgcgctaacggtcct

SEQ ID NO: 153485 - DNA, 160 bp, Homo sapiens
tcctataaatccattttgcaaaaaaaaaaatcataatctctcaaggtaatggttataacatataacaactctaaccattctgctatcaggagaatgacatagtgtaaaaccccaacccagaatactttcaggcaaaaataaagtaggacatggtttgtct

SEQ ID NO: 153486 - DNA, 400 bp, Homo sapiens
cattaaaactaagataagattatttgaagtaaatgcctgaagtcaacagaggatacacttaaaaattatccaaagaatctacaaaacctacattaagagatttattttctttgtcttttagcctcatttgcttctaacaacagtagcttttcaagatttaagaaactcctgcccgggcacagtgactgacacctgtaatcccagcacttcgggaggccaaggtgggcagattacctgaggtcaggagttcgagaccagcctggccaacatagtgaaacctcatctctattaaaaacacaaaaatataaaaatagctgggcatggtggtgggcacctgtagtcccagctactcgggaggctgaggcaggagaatcactagtacctgggaggtagaggttgc

SEQ ID NO: 153487 - DNA, 386 bp, Homo sapiens
tatttatagctactccaacttgaatgcctagcagtcacctagaagacttgttcaatgcagatactgggccctacccacagggacagcccagggccaggcacaaagggctccagctcaatcgaagttggtcaaacagggacaaaggagacagttttcttcaaggacaggaagaaatctgttgctatcctgtgtaccccgaattccatttgcaaccattagttgtttcagaaaagctggtgcgtgtcagatgttttatctatgagacaatgatttcccagcacctgaccacactttctgtgtcacagaaactgtgggctgcaggttatacgtgggttctgtgcctcctggcatacctggaaagatcctgatgcagcccacactgtcag

SEQ ID NO: 153488 - DNA, 364 bp, Homo sapiens
atatgtacacattttgtacaagtgagataggaattctcagtgtttcaaatgcaaatgagccatatgaaaattaagatgccttctagaattgttttgctctgatcattgctgattcctttccccatgttttacatgccaactttatcttttagaatattttctttaaatgttataaagcctaaaactgcacatatggaagagacattttcaatttcatcagagcagcccctcccgaggctatctatatggagaatttgtgagcttatactttgatttatgaaaaagatttacatgtgtcatcttgcttcagctgaccacataatttcttaaagcaatatcaaatagcctgcctcactgtttgtgt

SEQ ID NO: 153489 - DNA, 146 bp, Homo sapiens
tcccaatcctttgacaaattccaggctttcctattaataaacatacagaatttaccattttgtacagaatttagcatctgctctgagaaaagtttctcctagaattatattttcaattaagtgctaaattaaccagaaaactctag

SEQ ID NO: 153490 - DNA, 1066 bp, Homo sapiens
tcctgacctagtctctttgagtatgaagacctatttactatgtaaagctgtcacctgccttgaaaagattaagacagcaagaaagttcttagaaagtgggtatgtggctggcctcagataaggataaattgctgagaagaaggagttgggttttttttgtgtttttttgtttcttgtttttgagacagggtcttgctctgtctcccaggctggagtgcagtggtgcgatcacagctcactgcagcctcaacctcccagactcaaataatcctccctcctcagcctcccaagtagctggaactacaggatgccgccaccatgcccagctaattttttgtatttttttgtagagacggggttttcccatgttgcccaggctggtctcaaacttctggactcaagcaatccacctgccttcgcctcccaaagtgctgggattacaggtgtaagctaccatgcccagctctggtctcctttcttaatcctgttgaataaggaagattttttttatctgaaccctcctcttactcttctttctgttctccttccatgatcactttgtccatcttcctctttgtcataggcatgtcctatttctaattccctttctcttttctttggtaggctagccttcgagactgcattaccctccccaacttaaaatcttttgataacccaggcagctgggttatccccaatttaaagtctttttgttgtagctgtatggcatttatctagagcatggggtacacacagtaggtttctctcctctcttttttaacatatttattatgtttatgcatgtaaagagtttgttgttggccaggcctgatggctcacgcctctaatcccagcactttgggaggctgaggcgggaggtcaggagttcgagagcagcctggccaacgtgatgaaaccctgtctctactaaaaatacaaaaattagtggaacagggtggctcatgcctgtaattgcagctactcaggaggctgaagtaggagaatcacttgagcctgggagctgagatcgtgccattacactccagtctgggtgacagagggaaac

SEQ ID NO: 153491 - DNA, 1714 bp, Homo sapiens
tcctgacctagtctctttgagtatgaagacctatttactatgtaaagctgtcacctgccttgaaaagattaagacagcaagaaagttcttagaaagtgggtatgtggctggcctcagataaggataaattgctgagaagaaggagttgggttttttttgtgtttttttgtttcttgtttttgagacagggtcttgctctgtctcccaggctggagtgcagtggtgcgatcacagctcactgcagcctcaacctcccagactcaaataatcctccctcctcagcctcccaagtagctggaactacaggatgcaccaccgtgcccattgtttctatatcagggtcttataatatggcagacacaatggcctcccacagagaaatgagccataaaaggaccctgtaaaagcaaggatggctcattgttttaagacagccaaatgtatggcacttggagaatttcaaagagtagaaggccttcttgattgcactcccctttaacagccttgcctcttatggggctatgtggatcgttgaaatggttcacaagtaaagtgaaaaatggttatgcgtagtgtgtcagccccaccctaagctcccagagcctccattctgagtacaaaggtcagttttcttctcgggacaggccaaggatgatggggttttaatttctctcctgatccatggcaaagcattcctaaactaggcactggaagtcttggtaactggaaagagacattcaccaagatgaggaaggccaaaaccaagtgccttatatagtccctagaaagcatttcattttatggaacaatctttggtctctctttttttttttttttttgtgagacagtgactcaggctggagtacagtgattaggtcactgctcattgcagcctcaacttcccgtgctcaggtgatcctctcacctcaacttcccgagtagttgggactgcaggcaagcgccaccatgcccagctaattttttgtatttttttgtagagacggggttttcccatgttgcccaggctggtctcaaacttctggactcaagcaatccacctgccttcgcctcccaaagtgctgggattacaggtgtaagctaccatgcccagctctggtctcctttcttaatcctgttgaataaggaagattttttttatctgaaccctcctcttactcttctttctgttctccttccatgatcactttgtccatcttcctctttgtcataggcatgtcctatttctaattccctttctcttttctttggtaggctagccttcgagactgcattaccctccccaacttaaaatcttttgataacccaggcagctgggttatccccaatttaaagtctttttgttgtagctgtatggcatttatctagagcatggggtacacacagtaggtttctctcctctcttttttaacatatttattatgtttatgcatgtaaagagtttgttgttggccaggcctgatggctcacgcctctaatcccagcactttgggaggctgaggcgggaggtcaggagttcgagagcagcctggccaacgtgatgaaaccctgtctctactaaaaatacaaaaattagtggaacagggtggctcatgcctgtaattgcagctactcaggaggctgaagtaggagaatcacttgagcctgggagctgagatcgtgccattacactccagtctgggtgacagagggaaac

SEQ ID NO: 153492 - DNA, 435 bp, Homo sapiens
cacaccctctaagtggtcaatattttaggctctgcaggccacgtacaaccactgtctcttatttttttctgggttttgtttgtttttaatttttttttacaaccgtttaaatatgtaagatatattctcagctcaacaggctttggtttggtgcagtggctcacgcctctaatcccagcactctgggaggccaaggtgggggaaagtgcttgaacccaggagttcaagaccagcctgggaaacatagtgagaccccctctctacaaaaaagaaaatttttttttaaatagctaggcgtggtggtgcatgcctacagtcccagctgctcaggaggctgagatgggaggatcacttgagcccgggaagtgcaggctgcagtgagccgtgatggtgcctctgcactccagcctgggtgacaaggtgagaccctgtctc

SEQ ID NO: 153493 - DNA, 204 bp, Homo sapiens
atgtatgcatgagcatgaactcgtgtatgtattcgtgtatgtatgtaggtatttcaagcagtgcctacattcccaccgcagctctttcaaacctggttaattctacttctggctgtcagccctatctccatcacctttagcagatgatcgccctcccataccgggggagaaaaaggccattcttcctacttcaaaaatactgct

SEQ ID NO: 153494 - DNA, 145 bp, Homo sapiens
gaaatagaggatgctgacgtgggaatgatcagaaaggataatactaatagatggtgaagacaaacgttgatgcttttcaaaatatttgttttatattcccaaactaagaaagtaaatcagacaccaggctatcaacctctcaaga

SEQ ID NO: 153495 - DNA, 949 bp, Homo sapiens
gctaaacaaaaccccaggccttagcccaatgttgtgaattttacctttattttgcttttgtagacttttattctactcaagtggtcaattgccttggttttatagctgaaatgaaagctcaaagagtaaagagattatttgtaacactgtatgtctatacatttaattaacattgtaaaataatttaagaaactttaagggtcaaggggatgtttttctttcatttaaaaagtatcatgtatattacaagagttggagtaatgttgatctattgcatgtgggtagaattagttactgcctcacaagactatggtgtccttggagcctaaaatgagtaaattaatctctacccagcacaaagtatccagtgtacttgcttagagagtttaaagggagtaagcgtatgaatgcatggcccacgtttgagagaagggagaaacattatcacacagtattaaatgtgtgggtccatttaaaaaaaaaccttgggggtaaatgggcaactcagctccatcaagtccaggaaatagaacagaagagagtgccttcaagcaacgccaggcttcccctgaacgcattcttacacgtgagttgtatttcacattcacagattcagcgaagggtttttcaacactagaaagctctgggaacttattaaaaatgctcggctgctctgaaatcacatggggtgtgggtggtcccatgctcgtttcttgctgtgaattcaacatgcctaaatagatctgaatggctagtgggcggagccgctgaaggagagggggacagtcaccacagactcctggtggccaaagaatgcagtgccttagggttaagggacccttggggcttaagggacccttgggcttaagggacccttgggcttaagggaccctgggctttaggactgcgctaagagacctggactaagccgctctgaggttagacctgc

SEQ ID NO: 153496 - DNA, 339 bp, Homo sapiens
  misc_feature (44)..(44): n is a, c, g, or t
agaactccaggacacttaaccgagcagccccattgtacatctcngtctatctctgcctctctctctcacacacacgcacacacatacagacacacacacacacacactcggccccaccaccacacacaggccaggtggctctgcttacatacatggcttggcgcttttactccttggctaagaccatttcacacatgaacaacacagcctcctcctagagatttgtcatccatctgcttgcagaagagctgtctgtttccctctgaaaattggtccaatcaacattttcctttggccagggtagcttaccagcagctcctccagaaggtccaggtatga

SEQ ID NO: 153497 - DNA, 467 bp, Homo sapiens
aaatgccatttctagaggctgaacacattaacttttaaaaaatgatttaaaaattaccaattgaccgtatccggggctgaacctgcgtgattcagcttcttttaaaaatatcttttctcaacaaattgcttccttaacattttaatttgttgatcatcaaggaagcttgccaaatattagctgttcttttccatttcctaccgcctcaagcttcccgtatttggcctatttcagtggagctgtaaggtcactccctatttttcttcccaaataactgtatttattactgtcaggtattggcgggtttgatccagctgtcatcagaacgtttggaaataccgttttttgccagaatgctgatttaatgatctcatactgacatggcttgttctctctgcagacttgataacttgttgaatatgttccctcttcttattgagcaatggtgctttttgaaaatttttccc

SEQ ID NO: 153498 - DNA, 307 bp, Homo sapiens
aaagaaaagaaaagaaagatggaaaggtgccagagagtagacaactttctctgctagggtaaaaaaggtgaaacaacacaaccatttgccttcacaaatatagcacattatctaaccgccattgttcattattcttggaattcatactttgaatatatttttgtgttactgaagtgaattttttcttatttcttcatttggtctgtctacatttggcataatataagtagctacaaactaaaaagagtgctgaagtattgaattatttcttttatttcagtttcttcatttgcttatggttctgcta

SEQ ID NO: 153499 - DNA, 244 bp, Homo sapiens
agcccgctgactagctctggggataagcaggaggctggagcagcagggacacccaaagatgtccatggaagggaggaccagactcaggctgggccacgctgtctgccccggcctgcagctccggctgtggctcaaggggcttgggagccaggacctcactggccgtgactctctctacaggaccctcgtcccccaggactttagaaacaagccatttcatccttattttggagagatcccattt

SEQ ID NO: 153500 - DNA, 141 bp, Homo sapiens
caggaagagtaatgaccagatgtctgaaagtgctaggattccctcttcccctccaccagaaaagtcaaaagagggagctctagagccagaaagctaaagtcttcctgcccacttctctctctcagtttatgaaaattaatt

SEQ ID NO: 153501 - DNA, 412 bp, Homo sapiens
gcagtattttaaaaacaagcgttattttctataatctaagttgctaaatagactgaatatcaaacatacactttagactagtttatctttatccttaaagtgtatattttcaagttgactaaaaaacctgtatttggattctctcacttgggaaaatgagcttcaatgtgagctcatttaaaaagctggacacacaggagatcgagaccatcctggctaacacagtgaaaccccgtctcaactaaaaatacaaaaaaaaaattagccgggcatggtggcaggcgcctgtaatcccagctactcgggaggctgaggcaggagaatggcgtgaacctgggaggcggagcctgcagttgagccgagattgcgctactgcactacagcctgggcgacagagtgagactccgtctcg

SEQ ID NO: 153502 - DNA, 265 bp, Homo sapiens
ttgtgggtgcttagaggatccccagtatgatgagagaaccaggctcatctatcttcattcaattcactggtcttgccagggctctaaaagaagggggtggaagattgttaatgtctcatcttaacctttgccaaatggagctgtctgctgccacagatccaaaggagacccaggcttcaaaggcacatgtttcattggtgtccctccaaagaaaaaactgctcccctctgttccttgcctcccaggctgaggtcaggagaccagc

SEQ ID NO: 153503 - DNA, 605 bp, Homo sapiens
cctccgccccctgggttcaaacgattctcctgcctcaccctcccgagtaactgggattacaggcatgcatcaccacgcccagctaagttttttgtatttttagtagagacaggatttcaccatgttggccaggctggtctcgaactcctgacctcaggtgatgcatccgccttggccttccaaagtgctgggattacgggcatgagccaccacgcctgacctaaaatcatgtttactttgccagttatttgttacagtattgtggtttaaagtcttggattacaggttatttaggacagtgattcctaaccagaagcatattcaagttagttggggggtgggaggggcagatgttttctaaactttttcttttttcttttttttttggagatggagttttgctcttgttgcctgtgctggagtgcaatggggtgatctcggctcactgcaacctctggctccagggttcaagcaattctcctgcctcagctcctgagtagctgggattacaggcatgtgccaccacgcccggctaattttgtatttttagtagagatgggtttctccatgttggtcaggctgatctcgaactctgacctcaggtg

SEQ ID NO: 153504 - DNA, 213 bp, Homo sapiens
ggggagcatcatgtacatgatggctcacagcctcctcatgggatttttgaggatgacataaaggaatacatttaaactgcctagaagggtgcttggcccagagtatgtgctaattaacgttggctactattattttccttcaacccagtgccggtgcaggtctagaggaaagcatgaggtgatacgggggcacccagaggcggagtgctccca

SEQ ID NO: 153505 - DNA, 401 bp, Homo sapiens
cgaacaggacagcaggaatcacctttctaagtgcatgcggccgttcagaacagtggttctcagatccaggtgtgcatcggagccactgcagggctcgttgaaccagagattgctggatcccacccggggtttatggttccataggtctgggtgggactcaagaaatttgtgtttctagccagtgcccaggcgatgccgctgctggtccagattccccacttgagaaccacagggtttgatcgtattcattaattggccccctccccgaatcaaatgttggctgccctggggcagggattttgtcagtttcatcccctctggtcccctgggccaggcacagactaggtgctcaggaccactctctgccaggccagctcttgtacttgattgtccagggtttt

SEQ ID NO: 153506 - DNA, 358 bp, Homo sapiens
ccagcctcagctcggagccatggcacagcaccccctctccgccacggccccgacagctgggcgtgcgttctgctgtgggcagctgccctgagcaacgtagggtgctaagcagcatccctgtcttgcacactagattccacagcaccctctgaccccgtggaaaatgtccccacatgggaatatcctctgggggtggaactgcccctggtgagaacccctaggctgagacctcagaaggccctgagtcaaaccgagaagtcatcagagagccttgttttcagctccagggagcttgggcaggctggttttctgggccacacagtcccctccccagcccacctgtgctccgtgggtcccg

SEQ ID NO: 153507 - DNA, 335 bp, Homo sapiens
tgggaggcttcactagaggttttcgagtgaagatgcacgtctaaggtgtgacgggaaagggccagaaagagaatgagggaagaacattccaagccacagaaatggcacatggaagagagcagagatgagaggagaaaccatctgtgacttaggtggctcagcagagctggagagagtcgggcaattgagttgaagcacaggctggggccgtgccatgcaaggctttgccagctatacaagggcaccacatgccgtggggagaaccagagtgtttttagcagggtggtgtgatcagattcctacttcagaaagatgggcacagtgtgagggatgga

SEQ ID NO: 153508 - DNA, 629 bp, Homo sapiens
taagaggatatggatccgagatcttcccgtattatgtcctccattctcatgactgtgatcttaggtattgtgtgttgctcgagagacgtgtggtaggatagctttgaagcagaatgatttgtggatcattttaccagtcctttctcttttttggtcaaatgcagatggcatggaggaaatggaaagttctaggcatttttgcaaccactactatataactcttatggaccggataaatttagtagacaaagtaagtggttagtttcttggacctcggttttctggtctgtaaaatcaagagatgcatcaaagtttctttctagctttaaattctgtaattctttctttgagaattgtgtagcatgtataatgtttatgggaagtaaagtttaagtcactaaaaagaggcagaaatcaggttatcactcacagggctgttttttcagcctagtctctgccaatcctaaccttgttaaaactacaatgtggcaagagatgatgtcccattattatttctttcactcgagaatgcttcagctatatagatctatcaaagcagttgttacactggtgagtttccccatatccatcagaagaagaaaatccatcacacttttgactactttttc

SEQ ID NO: 153509 - DNA, 502 bp, Homo sapiens
cactacactgttcccctcctttccgattcttgtttaaagagaaaccttgtttaattcttcttccagtatattttccagcttgtacactgcatattgggaaagtttggtgtgagtctccctctatcttttgttctacttgctgctccagtggggaaagttaactgtgattttatttcccgtttatttgtaaatgtccatctaatttatatgactttgaatgtaacttaacgtcttttcccactcttcctttttaattaaggatacagaaattgttgatttagattcagacggtcctggtacttcatctggaagaaaggtgagtaaataagtgaactgctgaggagatatgttttcaggtttcctgtgtcagtgatccctaagaccaaccccatatttggagaattgctagaaggattcttgcaactaagtatattaggtatgctcattgataatatttattagagtgatgcagtaagggtacccagttgagtcatgggtgaaa

SEQ ID NO: 153510 - DNA, 709 bp, Homo sapiens
ttctgttctttataatttatccaacctcaggtattctgctatagcagcacaaaacagactaagacaatattgatgcaaaaaatcctcaacaaaacactagcaaatcaaatccaacagcatattaaaagaattacatatcatgacaaagtgagacttattcctataatgcagtaatggttcagcatacaaaactagtcatgatataccatgtaatataccacgttaacaggattaaaaagaaaaaacatgatcctctcaactgattcagaaaaagcatttgataaaattcaacactgttttaggattttaagaaacactcaacaaactaagaatagaaggaaacgaactcaacaaaataaagatcatccaacataggaaaaacccacaactagcatcatactccagagtgaaagactgaaagctttttgtctaccattgaaataagtcaaggatatacttctattcaccatagtactgaaagtcctagacagagcagttaaggaagaaaaagaaataaaagccatcaaattggatacgaagaaataaaattatctctgtttgtaaacaacatgatcttaagtatagaaagccctaaagattccacacccaaaaaaaacccacctgttagaactaataaacaaattcagtaaagttacaaaatcagcatgcaaaaatcagttgtgtttctatacattaacaacaaaccatt

SEQ ID NO: 153511 - DNA, 303 bp, Homo sapiens
agacagattggagaggaacatagattcatatttttgggctttttactatcaagtcacccagtctaaaactcaggacagagcagcattaaccattcattttgctttgtgatagagcattcgattaccaactctttaaactcttttggcaattcaaggaggttgcctatctgggtaccatttcttaggatttgctttgttggattttctaaattgtggatgtgagtttctttggttttgcattttttaaaaaaattttttggtcctttttaacttttccaagttttggagaatttttcatgttgg

SEQ ID NO: 153512 - DNA, 425 bp, Homo sapiens
ggtctaagagatgatgaaagcatcagagatggccagggggcgggaggagtgcatcttccattttcctgaggttgctctgtggttattagaacatttctgatataataacaataaatatcagaaaaggaaaaaaagggaaaagtgctttataggggtcccaggagatggagtatcctaggaggcaaggtgtggcagcaaaagagaggacaggcactgggcctggaaaatcctgggtttgatactgattctgtcacttcctaaacatgagcccttaggtaagaaacttcacctctctgagtatcagtttctatacctctgtgaaataggagcatctcagggcagttgggaggactgccctgacgctgtaaactgccctgacgctgtaactgccctgacgctgtaaactgccctgacgctgtaaactg

SEQ ID NO: 153513 - DNA, 491 bp, Homo sapiens
gcccgctctagagtatccccccacctcgtccagccaagtttggatttttcaagaggatgagagattgatacagaattacaagataccacaattgcacttcaatgttcaggtttatcagaaaaagcccttagtgcaaataacaacaacaacaacaaaagtatttactataacaattggggtatcctgacctagctcatatatcatgaagtgaatttaaatagagagatgctcaagcaatagaggaaacctgggcaattgttcttcctcttttaggtggagagtaactcatatttgctagaatgggaaccacctgttgaggattacatttccatgacgttttctgaatttaatccttatgtaggtgatgaaattcattcctttcaaaatcaagatgaaccagaacagtcatttgacccacctgtgcagttttaaaaatattttgagtaatggagactgagctaaaactcagactctgaacaatgattagataa

SEQ ID NO: 153514 - DNA, 286 bp, Homo sapiens
gtgggtcatgcctgtaatcccagcactttgggaggctgaggtgggaggatcacttgagcttaggagttcaagaccagcctgggcaatatagtgagaccccatctccaaaaataaaaataaaactaagacaaggctggaaagtcatctgccattataaacatcagtaatctggccgagcacagtggctcacgcctgtagtcccagcactttgggaggctgaggtgggaggatcacttgaactcagaagttcacgaccaccctggacaatatagtaagaccccatctc

SEQ ID NO: 153515 - DNA, 287 bp, Homo sapiens
gagtgaatagagaaggcaaacaggagacagatagaaaaccaggcatatcagcatatgggagagctgctgctaccacccatagccctggagagataaaagggatgaaatggtgttatcagaaactggggctgtccagcaagaagtaaaattatggaaaaggctgcccactgggagtggaccatagagggaagggctggagctaaacagaaaacaccaccagagggagagaatgggtgagaagaagtaccccaggcttctccctcccttttcacattccagtcttcctg

SEQ ID NO: 153516 - DNA, 346 bp, Homo sapiens
ttatttattcattgattcatggttaaaaacaacaaaacaaaatgcgtgagaatttctataatggggctaaaaaccaaaatttcttatttgcatttaaaaaaaaaaaggaataaggaagagaaagaagggagcatatgtaatgaggagacatggacagacaaatttaaaatatcttaaatgcctctcagtgacagccagttccttcattagaggctttttatttacaatcctagaaaaatattaatagcaagcaatttttcaattggcctaatcacatttcatcctttgccacacaagcaaagaatcaaagcacacttgagagcaaagaaaaacaaaattcaaagtg

SEQ ID NO: 153517 - DNA, 683 bp, Homo sapiens
atcccagcactttgggaggctgaggcaggcggataacaaggtcaggagttcgagaccagcctgaaaccctgtctctactaaaaatacaaaaattagccgggcgtggcggtgcgggcctgtaatcccagctacttgggaggttgtggcagaagaatcccttgaacccaggacacggaggttgcagggagccgagattacaccactgcactctggcctgggcgacagagcaagactctgtcttggaaaaaatgaatgaatgaatgaatgaatgaatgaatgaatgaaaaggaaatgtaccttttcatataatgaacaatttgggaccatgtgactgtttctcacactacttcacgcatgcacacaaacaaaaataaatcaactggctaggcgtggtggttcacgcctgtaatcctagccctttgggaggccaaggcaggaggatcacttgaggttaggagttttgagaccagcctggccaacatggtgaaaccctgtctctactagaaatacaaaaattagccaggtgtggtggtacacgtttgtaactccagctacaggctgaagactggaggctgatgcaggagaattgcttgaacccaggaggcggaggttgcagtgagccaagatcgtgccactgcactccagcctgggcaacagagagagacacggtctcaaaaaaaaaa

SEQ ID NO: 153518 - DNA, 431 bp, Homo sapiens
cactacccgaaattattaaacactataatcattcagtgccagtgttagttaagctcagaaaactcagcttacagtggtctgctctggcatatttccagaaggtactttcctcttttggaagttacatgaaaagggtgaaaattaactaagaaaataattatcctctctttctatccctcttctacaatataagcaaactatcaacatgcaaataatatttcgtgcctccatttctgcattttagtcattaccaattcatcattaactcagtttctgaaagtctaccatatgccaggttgtgttctggacataaagtccctgtcacgtgtgggaacccactcaagtctactttcattaagaaaacattgaactgcagaatttcaaacaatgcaagagattaggggagaggctgagggtggcctggtgtagtt

SEQ ID NO: 153519 - DNA, 369 bp, Homo sapiens
atcacaggtggctctaaaactttaggatgtgtaccaattgaagttagtgactcacctggcccaaaatctagccaaccttcctttcttatctctttttcttgtacttgataaacaatgttgtagcaataacacatattattatacaggccaaatctaacacagtgtcaatttacattagtacaatttgtaaaatggcaaatcagaaatgtcaaggtgtggaaatttttattgttttgagactgggtcttgctctgtcacccaggctggagtgcagtagccagatcatagctcactataaactcaaactcctgggctcaagcgatcctcctccttggccttccaaagcactgggattacaggcatactagg

SEQ ID NO: 153520 - DNA, 117 bp, Homo sapiens
ctggccagaactgtgccctatggccacttttgcttactgatgaccagggattcttaatggagataaggtcagaaacccaaagtatagcacctcacttacatatttagttcatttcaa

SEQ ID NO: 153521 - DNA, 104 bp, Homo sapiens
tgttcacactgaacctcagtacctagcccagtgcctggcacataaagaatgttcaatttgttgaacgcatgagggaatgagctctgaatgctatgagtgtgcat

SEQ ID NO: 153522 - DNA, 361 bp, Homo sapiens
tgacctctgaggtgcttcatccgtttctcagatctcatctaaagcaatatttgacacaattgaatagtggccttctggccacagtatccttacttgggttctaagacatcaacactcctgttttactgccacctcacttctcagtatccttggctgactcttattgcaacctcttctcctcagtcctctgacctcttcaaatattctctggtgctggcaagtttcatggtttaaataccatccttgagtgactactcctaactttatagtctagccctgatctcttccatgaaatccagattcttatattcaactgcctatttggcatctccaatttgaaatctaacagacagctcaaatt

SEQ ID NO: 153523 - DNA, 124 bp, Homo sapiens
tagacatgtttaagtttctttggaatcatcaaatggtgatgtccaagttgttggggttcagaaaagagggtatgcttgagatagagcctcaggtccatggttcattgattcacctcatttcatt

SEQ ID NO: 153524 - DNA, 385 bp, Homo sapiens
tctcaaaaccagcacagtgactacatcagggaaggagcacaacaaatgcgtgaattagcagcagcagctgcagcagcaaacactgatttttatcaaatgctggttacctgtccaagccctttacaaatactttactaagtctcattttacaactattctgtaatgtaggtactatgttgtgtccacaagaggcttagcaaggttaggtatcttgcccgtgggacacagctaaaaaatattgaagttggtctttgacccccaaatctgctgatcctagaattaatgctcttaccaccatataatcatgtgccattgatctgatgtttattattgctaattctcaccatggccttgtgaggcggatcttatattatcctcctattat

SEQ ID NO: 153525 - DNA, 661 bp, Homo sapiens
tagagttggccttccaaatactatttcactcctgtctctcctgttcatggaatcttttttgataacagaaggttacagttgggtgggagagctcttgtgatcattcgtgccaatctcaaattgcccacagggacgttttgggatcccctgcccagaaactttgctgttgtttatagatgaggaaactgaaacctaaaagatgtaaatatggtttccctcaagtcacataaagtgcttttagcaaagccagaactggacccacatctcctaatccctattcccgtggaggatctctattacactaatgcattaacttcactcctgatctttaagtaagctccacgtctgtggtctctgttttaagattgtgaaatgtcataaaggtggtttgcctttgaaaataagccagaacctagagagttaatagaaattgaacagtgaaagtggagtccttttcttctctcctcaactggggagccgccaggctgtttcacttgcaccgcatgtgttccattatggtataatgatgtaattaccagtaatgctgctgctgcttgagtagtggtgaagaggcagcattaaggaaaagactagccccagttctctcctaagagccatttcagcccacttcagtctattagattgaagatgctggaaggcg

SEQ ID NO: 153526 - DNA, 703 bp, Homo sapiens
atagctatttgctttagaggtcaaagtctgatgtacggaaacacaaatttcttataaaatgttaaaagcaatccaatttattcatatatggtaagtactgaatggttcttcccttttgaaacaatattcccccaatgggggaggtggagatctatcttcttcttatattaacatttctattacacagaatttcaatggtctgattttgtacaatactttacacaagtggattaggtgacattaagctaagagggaaatatttaatattttgacttaattactgtatacattgtaaaacatttaataataccaagcttttatattaaaggaaaagataaacatttttcctaaatcatcacacccaaataattatctcaaattggttactaaagttcttcaatagatgttggaagaaaccatttggaaatagcatatttcacagctttaatttttaaaagctttccaacatatatggaatgactgtatccaaacatatataaattttctcactaacaagaactgagaccaaatacacaaaaaattacctagtggtatcaaaattggaactacagatgaaaaatatatcatgagaaaggactataattattttcagtaggaaaaaggcagcacaccatttggttttaggagtttaatctatggaatcaaaccagaaattcgactctagcttactagctgtttgacc

SEQ ID NO: 153527 - DNA, 707 bp, Homo sapiens
aataactatgtctgttctgggccagttttgattgctttttctccacattgtgcctttttgcatgttttgtattcaaacatatttcttgtctttcagaaatcactggcttttgttgtctgatgtccagtgtcttcaaaatcattgtttcatatattttgttcaggattttttgggtagggaggagtgttttaggaaaagagtcaatctgatttctgttacactgtcttgaatagaaaaaaattgcgggatttataatgtagcaacaatcagagaaataaaaagaactgtatgaagacattaacacactatttatcttaagaaagtatttagtgtctggacagattaatagacctgaatcagatattctcattaaaagtttagatgcccagaaaaagaaattcagtatcattctatgtcaatatggtatcttcaatgcttcattcaggcctagttgcattccatttattcagaataatggtgtgtaaggttaaaaaaaaccctatacttttgaattggaatatacttctgatctttgcataaattttaattgcttgaatattaataaaagcccttggcaagggaattgatatataccagatcctgtaatatgaaagaacacgtcagtttttgacacttaagagagtctatccaaacttgaaagtgtctcctgccttaaaagtttccatcttgattattttactcatcag

SEQ ID NO: 153528 - DNA, 111 bp, Homo sapiens
caagccatctctttctctgctagggaaaaacacatccctcagagcccttaattcacagccttctagctcaataatgtgacacatgtcaaggggctacttcctcttccctaa

SEQ ID NO: 153529 - DNA, 111 bp, Homo sapiens
tgctgggattacaggcgtgagccactgcgcctggcaatcatggacaatttttgatagtcttcattcttcacagtgccttacacaattggcactcaataagtgagagctgct

SEQ ID NO: 153530 - DNA, 329 bp, Homo sapiens
taagcttctctgtgaccatggaacactacccccagccccgctgcttttgcctccggtcagtgggttttgcggggctctgaggtgtctccccactcacccagctctgggcagagcagctgggctgggctggggctgagctaaccagaacctggaagtagggctcggggttctggctgggtccccatccctgtcctgacaaatgaactccagatccacaggaccctccgtgtttcttaaaaccctggcaaaacagtgtctgcctgtggcatgttcatgcccacagctcaacaacacactagctgcaaggggccttcagataccagccggcc

SEQ ID NO: 153531 - DNA, 296 bp, Homo sapiens
accacctgaggcccgcagttcctgctaagagcaagactaagcttccctcctgccttcactcattcattcctaattccctccgcctcatcttcagtgccacctccactggaccttccatgaccattcccccaccacaggacagtcattctctttatgaatgcacagttcatagcatgtgattcatagcacaatttacatgaaataataaccaactgtccattggttgctttatgtctctctacgtgctccgtgtgtacaacactgcccccagccctgagcactgggcctggatgtag

SEQ ID NO: 153532 - DNA, 572 bp, Homo sapiens
aacctcagtatatatgtaatgccgaagagaggttagggtttctttaggtttccgtactttcctgttgagcactgcggcgcaactcgccttgctgcggttggtggtggcgatggagattgcagcgcggctgaagggaacctactgggttggtgacatttacaagagagtcttgaagattttccagaacgggaaagattttggaagaacaaagaggaactacagaatcattgcttacattgacacaattgaatgggaagccatcattctttaaagggcaatgaccaagcagtaccagcagaaattgaagtaccagcagaaggctaagaagggatcatggcacaagttgcagtttccaccctgcccattgaagatgaggagtccatggaagatgaggagtctgttgaagacgaggagtccgttgaagatgagtccgcggagagcaggatgctggtgacattgctcatatcagctcttgagtccacgttctggaggccacaagtccaaaatcaaggtgtgggccagaaatgctgctccctctgcagactcttggggaggatccttgctttcttcca

SEQ ID NO: 153533 - DNA, 812 bp, Homo sapiens
aaaagtgctattacattatatacctctaagaaggaaaaaacactcaggacagggagttcagtaggagacctaacccacaaggctggtacacccagggataaatgagaaattaacttggccatccagaaaagggaccataaagaaacatgcaggtctcaaccttgacactacatagagaatggaaaaaaaaaaatttctcagaatttgaaccacaagccctaagctttgggtgtgcagccttaccaccagtgtggtctacaaaggcctgccccaaaggattaattcagatggtatcgggctgatagcgttcccagatgacagcagaagcagatgtacatcttctctgggaaaattcttctctagtcaagacctatgaacctactgggttggtgacatttacaagagagtcttgaagattttccagaacgggaaagattttggaagaacaaagaggaactacagaatcattgcttacattgacacaattgaatgggaagccatcattctttaaagggcaatgaccaagcagtaccagcagaaattgaagtaccagcagaaggctaagaagggatcatggcacaagttgcagtttccaccctgcccattgaagatgaggagtccatggaagatgaggagtctgttgaagacgaggagtccgttgaagatgagtccgcggagagcaggatgctggtgacattgctcatatcagctcttgagtccacgttctggaggccacaagtccaaaatcaaggtgtgggccagaaatgctgctccctctgcagactcttggggaggatccttgctttcttcca

SEQ ID NO: 153534 - DNA, 421 bp, Homo sapiens
tcacgccctgtccacaagtagctgggactacagccatgtgccaccatgcctggctcattttattttgttatgttttgtggacatgggctcttcacgtgttctggccctcggttgctctctcatgcccttacctatctcctgtctcaacatcagcctcccaaagtgctgagatgacaggtgtgagtcactgtgctcagcccgtttttgtttttgacaatttggtgatctctggtatattcacagatatgtgcaaccaccatgatagtcaattagtaaagcattttgatgacctcaaaaagaaacccctgtgtctttagctatcacccacttccatcattagactattatttttgatttgttttttatttattttgagacaggaattcgctctgttgcccaggctggagtgcagtggtgcgat

SEQ ID NO: 153535 - DNA, 278 bp, Homo sapiens
agctaatttttgtatttttagtagagacggggtttcaccatgttggccaggatggtctcaatctcttgacctcgtgatctgcccgcctcgacctcccaaagtgttgggattacaggcgtgagccactgtgcccggccaacagaacatttcttatatccagtgttttatttattagtcttcatcaatgcaataaatacactttggctttcttggaagtatgatatctagtctggtcctttaatgaggaaataggaaatgaagacttgggggaaaacact

SEQ ID NO: 153536 - DNA, 269 bp, Homo sapiens
ctgggccacacatacgcagccaaagtcagagaactcagagaatctgagactgatggagaatcagctaactttagtcttcttggccaaaaataaacctcacttttttttcgggagacagggaaaaacgctatcaatttctcacacagctagttaatggctttcctacgattcaaaaagccaggtctcttgggttccagcatttgatacatctgtgctaaatgtctgcggaacacagaaccttctagaggaaatctagcagtaggccgggc

SEQ ID NO: 153537 - DNA, 393 bp, Homo sapiens
gggttatgtgctggagagtgttattagcgggctccttctatggggagcatcaacacttggggcctctggcctttgggatgactcctgtcctggctgattcgatggctctgcttccactctgaggagcaggagccccctccacagctcatgccctcagcccctcactgctgcatgaaagctcaaatccctccctgctcagaagcctccatcccagaggaagacggaacccacagaaaacgcagcttcaggctccatcctacagaaccaaccccatgccaggtactgctggaggaacaactgggctcagaaggagagagcctggagtctgtgagacaagagccaggcctcccccttctctaattccaggagtacaggcctgcacccccacttcct

SEQ ID NO: 153538 - DNA, 121 bp, Homo sapiens
tctaaacaagctggcaaaatgtgattcactgaattctgagtatgttttcaactggaatgtctcactggaaggataatgacacttggttaatttggcatagaagaggaatgaggtgctccac

SEQ ID NO: 153539 - DNA, 295 bp, Homo sapiens
aggtgccgggattgcagatggagtctcgttcactcagtgctcaatggtgcccaggctggagtgcagtggcgtgatctcagctcactacaaccacctcccagccgcctgccttggcctcccaaagtgccgagattgcagcctctgcccggccgccaccccgtctgggaagtgaggagcgtctctgcctggtcgcccatcgtctgggatgtgaggagcccctctgctgcccagtctggaaagtggggagcgtctctgcccggccgccatcccatctaggaagtgaggagcgtctctg

SEQ ID NO: 153540 - DNA, 167 bp, Homo sapiens
atttttttaatgacttaaattataaattaaatgaaaggcaagagattaaatggtgtggagtttgggaatggagagaaaatcatgtgtttctttttgtaaagtctgcttataggcatgtattaccaaacttcataatgaacacatgtgaatgtagttagctaaaagtt

SEQ ID NO: 153541 - DNA, 273 bp, Homo sapiens
gcagaacgtattttgttttgtttttaaagtctcagcaaagttgttacattcatctttcagttgtgtgagctttatagagcaggattcatgctgtgatgtgaccttgttacagattcactgaagatttttgtatgttttgtgaaaagtcaggaaaattaaggttggcatgtgaacgcctaagcttttctgagtttggtaaactttctaggttatgtgaggaggatgcatgataattgagttcttgagaagtgattgaattgtgaattaaagtga

SEQ ID NO: 153542 - DNA, 333 bp, Homo sapiens
ctcgtggcttgagaggactttctagaggcagcatcacaagccgatttccaaaggctggatcatgtagctgggcatgacgacaggctctggagcaccgtgttaggtggtggtaatgatgtggatattaaagatgcatgtgaaagtgggaatacagtttttgaagaaatatgagtgaaaatcacataatttacttatgtttttgagatggggtctcactctgcagctcaggttgtagtgcggtggcgccatcttggctcactgcaacctctgcctccaggatcaagagatcctcctgcctcagcctcctaagtagctgggactacaggcacacac

SEQ ID NO: 153543 - DNA, 777 bp, Homo sapiens
agagcattctccaaagacacaaaaatatactgcaagaaataaacatttttctttgcaaatggaagctaaatccttagaatataaaagttcccgtttatcgcctcgcagccagcccagacatctagaattttttgttcttcatgaacaagggctgaccgtacatcattctgtaattcccttcagctttctcacgaactattcgtgtactatttcagaagcagaaacacacgagttcagtgtttttgtgttgcatacgccgtccccagtgtacagagacatgaaaatgcactccgagcgctccaccggcacagcttggtcacacgggatttctgtctgtttctgtgcttacctctagtctgtttagctccttgagggcagggaccctgcctagcttgtagttggtgctcagtaaattcttctgaattaatgaaaggtgaagggcaggctgattgactttatacgggggggtctgtcacatctcatatagtccacagaaatctatgatgtccttttgtgaccccgagatagaatgccatttgagaactataattccatcttggaggtactgctgccattgcaattccagctcagatggcaagaacttgcttccttcctcctagagcagggcatgggcctcagcctcatgctgctcctgaccttgagcgagccttggtcagggtgctcctggggactaagctggggcggcccagggactggagaagaagacagaaggatgtgcatgggagccccttgcctcttgtgttctgttactatttc

SEQ ID NO: 153544 - DNA, 339 bp, Homo sapiens
ccaccctaccacaaaccccctacgggggggtctgtcacatctcatatagtccacagaaatctatgatgtccttttgtgaccccgagatagaatgccatttgagaactataattccatcttggaggtactgctgccattgcaattccagctcagatggcaagaacttgcttccttcctcctagagcagggcatgggcctcagcctcatgctgctcctgaccttgagcgagccttggtcagggtgctcctggggactaagctggggcggcccagggactggagaagaagacagaaggatgtgcatgggagccccttgcctcttgtgttctgttactatttc

SEQ ID NO: 153545 - DNA, 453 bp, Homo sapiens
ggagtggagtgattccagctgctttgagctgaaggaaaagtagcctggccagtaaagcgtccgtgtgctggaggagtgcagccacccatcccggcgggccttgcaggacgaccgacaccaggaaggctttgtgccaggcccagcagccacccccagccgccttatgcaagtgggtacatgccctcgccagacgccagctttctgatctgcgtctttagattttttccatcgcctaagcgttacttctccactgatcggttttagagacctgaaacatcacagaagcttctgagtggttctgaagattcaagaggtttgcaggttgctatgttaatgttgtttgtctttggagtcttacttcatgaagtctcactgagtggtcagaatgaagctcctcctaatactcacagcattccaggcgaacctctgtataactatgccagcatccgcttg

SEQ ID NO: 153546 - DNA, 280 bp, Homo sapiens
tatataaagaaagttcctttctaaccctctgctgcaaaaatccatgtcacatgcttcctaacacatgaggattattacttgatcttagcctgaaaacaggacatttatttttcctcaaacatgtaaaaaggattgaccaggcacagcagctcatgcctttaatcccagcgctctgggaagctaaggcaggagaatcattagagcccagaagtttgagaccagacagggccacgtagcaagaccccgtgtctctataaaaaaaagtttgattttaattagc

SEQ ID NO: 153547 - DNA, 398 bp, Homo sapiens
  misc_feature (47)..(47): n is a, c, g, or t
gcttggacgctttgatctagggagaaaataagcatcactgctacttngctgggccagtgtggagactgagtctagctcccacctgtaagtgaaaactgtaacctccatctcccgggttcaagtgattctcccgcctcagcctcccaagtagctgggattacaggcatgccccaccacgcctggcttgtatttttagtagagacagggtttctccatgttggtcaggctggtcttgaactcccgacctcagatgatctggccacctggtatgcagtttctttaatgcactgatgctggaagttcacttcttcctgtcctccttggcactgatttacaacacctgcccccactgtggtcttctgggctctcacctcattgttagaatccatctcatgaat

SEQ ID NO: 153548 - DNA, 362 bp, Homo sapiens
tcgtgatctgcctgcctcggcctcccaaagtgctggagtttctgttgttttaggccaccatttctaaggtattttgttttggcagcctgagcagagggatatggttccttttccaacagttggtggaaactgcataattcatgcaacatcagttagagtatttggaagagttttgcctcagtaatggggcaaaattagccccaacttaaagctgctctggttctacctaacaaaccacaaaaccataacatctaaacccaagcaaagctcaagaatatagaaacacaaaaatatgcagcattcaataaggtaaaattaataatgtctgcatcaaatcaaactaaacagacaagcaaagaagg

SEQ ID NO: 153549 - DNA, 356 bp, Homo sapiens
gtttctgaattattttcagctgattgacaatgtttctaactgcaaaagagaacaaactcatttctatgccaaacaggactaaaaaacattcatggatgtgtccacttccttgtaactcaccaatttattttggttggggggggggcggtaatacgtccactgattgatatttgatccctaactttattcaagacttatttatttatttatttgagacagagtttcgctcattgcccaggttcgagtgcaatggcacgatttcggctcaccacaacctccacctcccgggttcaagcgattctcctgcctcagcctgagtagctgggattacaggcatgcactgccacgccctgcta

SEQ ID NO: 153550 - DNA, 626 bp, Homo sapiens
gagcagcatccaattggctgccagtgcaactagtacaaagcaggggggaagaatgtgggataagctggcttgctgagtcttctggctttcatctttattccatgtctgatgcttccttctgttcctcctgtccttggacatcagactccaggttctttgccactggactctcggacttaaccagtcgtttgccaggggtctgtcaaggctttggccacagactgaaggctgcactgttggcttccttacttttgaggcttttggacttgtactaagccactattaacttctttcccagcttgccaatggcctatcatgggacttcaccttgtgatctgtgagccaattttccctaataaaatccctttcatatacacatatatcctattagttctgaccctctagagaaccctaatacaagggagaagaaagagaaatgatctagacccaagtttttaagtgaagtaaaaagatgtaataatggtagagtgaagttagcgttggtcttgaaggcatatgtcacttacccatgtcactgttgctcagtacagacaatgtggcacgtaaaatcgtaagagtcactagtgatgtctttggtcctgtgggcacttggctaaacttaacaa

SEQ ID NO: 153551 - DNA, 471 bp, Homo sapiens
ctgatgtacattaggacatgggagtcattacttatctcattaaaatataactgttaatatttgtctctggtatgtgtcctcagggcagggaccacatcccactcagaagccaggccagtgtcccatatcttatccttggtaaactgaagagagatcattctgggactactgacaaggtctgtatgactgtgggggatggggaagtgttccccaggaagacagggcaggaaggcagtgttcaggctaccaggaaatgagggcaagaaaattaagtaagctaaaataggcaaggaccagctcatgcagggtcctacggcccacattcagccttcaaagctcatttccagctatctctttcaggcagtcttgttaatctgcctaactagatatggtctgggctctcttagcattttgtgacctccatcatgtacagccaacagttaactgtaaatcgaggtctgggtctttatt

SEQ ID NO: 153552 - DNA, 165 bp, Homo sapiens
cagtcaaagtgcactccctctcctagatgaacaggaagtggggtcaatatctgcaggcctctcctctctccaccacccagtcctgccaggatttctgcactctggtactagcctcccagctcaccttgttcccccccctccttgttacctagcccaccttatggc

SEQ ID NO: 153553 - DNA, 265 bp, Homo sapiens
ggtcctcttagacccctactactactgggatctccttaccaggaaagcctttggcagaacaatgtattaggtaagaaggacttttaacagcccctcaccatactgcttcctgttcctacagggcctatttccagcagaagtaggtggggggtggtgtgtagagtaggcatctgatggcccagtgttgtgactgaccctgatatttgtgccagcaactaccctgatgactttgactctggcccttgagaaaggcccaagctttagg

SEQ ID NO: 153554 - DNA, 388 bp, Homo sapiens
  misc_feature (52)..(52): n is a, c, g, or t
  misc_feature (110)..(110): n is a, c, g, or t
  misc_feature (113)..(113): n is a, c, g, or t
gaagttttattttgttgtgaattgaatctgggcagagtgtacaagggatctnctctgtattatttttacaactacatgtgaatgctataattatctcatcaaaaattcanctngaaaaaggtatcacggagcccatgtttgctgttaccgtctttgctcctcccaggttacaatgccccgtgcctctcagtgcacagtgaaaatgcagcagacgtttttgatgtgagctccacggaatggatccagactgtccccttcaacaaggtaatttgaccttaagattatgcaactaatgagttaatgactgaaacgcggaaacagaaataatccattgtacatttactgtaatgggtacttgctagtttggaggcttaacaaagagtataaa

SEQ ID NO: 153555 - DNA, 303 bp, Homo sapiens
ggagccagggttcctcctgggagcagccgcgccctgctgcctgctcgccgacctatcggtatcccgatcgttgttttgtcctcttaaaaatgcccaaggcgaaacagccttcccatgtttgaaagttattgcaagcctaaaaccttgtagactgggaaacccagagcctaacgcgcagtgtctagtccaatgtagccactccagaaatatttgttaaatgcagcgtcagaaaagtgagtggaggaaattgatactgctcgaacggtagaagacccctcgccagcgcctaccctgcgattaccc

SEQ ID NO: 153556 - DNA, 355 bp, Homo sapiens
agtgtgagtgagaagtgagagagtgtgtgtgtgtcaaatcaagtataccaaaggcccttgcttccccaatacaggaagggggtgataggatcatcatgaccagtgcttggttgatggtgggagtgtgggggtaaggattttaggcaaaaggaatcatctcaagtgaaatatgtcccttctgccctctgagcctcctaaaatacaaacatccagtatcccatgacttaagcctctttccctgctcactcacactctcacactcacatactctcacacacacactctcattttctcacacacactccacactcacacacgcacacactctcacacactttctcacacacacacccac

SEQ ID NO: 153557 - DNA, 374 bp, Homo sapiens
acatcagctattgaatgacgaagatgagcgcattggcatgggataagaatggactaaagtttagagcagcccatgtaattcagtgtggcttttgtttgtggtatccagatacctgtctatacttggtaagactcatggtgcctgcctttttttacagggaaaatgacagcaacttcccctcattcttttgactaggtttgtgaggatagaatgtgaccagaggaaaatagttttggtaaagacaacacagtgcttgggatcagacgaattttggatttcagggttttttttgggatttgggaatgtttgtattgtacttaatggttgagcattcctaaacaaaatccaaaatgttctgatgagcgttactgctg

SEQ ID NO: 153558 - DNA, 909 bp, Homo sapiens
tgaagcgattgcaggcgctgtggctttcccgcccattcgcggcgttggttttcccgcttctgagacttgtttggggaggttaaaatttggaggataactcccagctagaaaggaagaaaagctctaaagtggaatcgccttcccccggaagctgttgtaaaaattaaaggatgtatgtgagtgcacaggcaaaaaaaaaaaaaaaaaaaaaaaacaaaaaacaggtgtgagcgcggccctacagaaagcacacacaacaccatcggtcgggagcccgagggcccaaaggaagaaaagtgaaccagtgggcaacaagggagtaacaaagaacaccccgggacagaaaaaaagggcagggaacatacacacaaatataaaaaaaccaccggggtgcaacacagaagcctctgagaacaaaatctccaactgacacaacacagaagaacacaacggagccacataaaacgaggacacaagacagagcaaagaacagcaaaaataagaaccaggaagggggaaaaaaaaggaaaaaaaaaaaaaaaaaaaaaaagacaaagaaagaaaaaaaaagaaaagaaacagaagagacaaaagacgaaaagagcagagaaaaaaacagcgacgggggagagcgagagagcggcacggggcgaagggcagagaaggaagagcggagagggcggaggacgcggagaggggcgagagagaaacaagcaggaagaagacggggaggaggggagggggcgggaggacggagagcggaagggagaaggaggagggagggagcgcggggggaggggacggaggagaaggggggtaggggagggaggatgcaggggggcaggagaggggaggaagggagagaagggagggaggagaggcgagagagggggggggggagaagggagc

SEQ ID NO: 153559 - DNA, 326 bp, Homo sapiens
caaggctcctcgtccgcatcctttttcctccctccttcggccccggggctcacatcctcgctgcctcacaccttgggcgtgtgtgggagcaggagagggattctctggggtccccatttggaacctggagacccacttctgccaacaagtccttcagcccctctgggccttagtttccccccagtgaagtggggatagtgacagctcccccgggagccagtgaaaactttgtgaagggagtgattactgcgggcgaaggcgcttggcacagccacaactgaagctcagccgtcggatgtgattattgttgctattgttaccgctcc

SEQ ID NO: 153560 - DNA, 1268 bp, Homo sapiens
acacctgttatgtgtcaacttgattgggacatggggtgcccagatatgtggttaaacattctaggtgtgtttgtgagggtgtttctggatgagattaacatttaaataagtagagggaggtaaagcagattgctctccccaattttggtaggcaccttttaattcattggagactgaatagaacaaaagggaaaatttgctctctttcctaattgcttaaattagaacaatggtgttctcttgcccttggctagaacttaaaccatcagtgatcttggtactagagccttcagacttgtactaatacttacatcatcaggtctccaggttcttgggtgtttggactcagactggaagtatatcaccagctttcctggatctctaccttacagatggcaggctgtaggacttctcagtcttcataattgtctcttcacccagagacacaactctccaactccaatcaaaaaaatctttgggcagaagattgattgatccatcttggatgacactgtcatctgtggatggaggactatggatcagaccctttaatggctcagctgcagtgttcaacctgtggttagaaggagttgacctgtacaacttttatgtcatggttgtgaaggaatattttccaggagaatgtaactgctctgggcagacaaggcaatgtgttcagcagtatttcataactaacatgatgcttttcacaaattagatgctagaaaattacttattctactattacactactagatttcttaacagctttgttaaaatataattcacatacaatagcatttacttaaagtggttttttttatattcagagttgtgcaaccataaccatgatctaattttagaatattatctgaaacttggttttagcctagtgagaatttctaatgtaaaaaactgtaaaatagtaaattgggggttgttttaagccactgaatttgtggtgatttattattggtttataacaataagaaaccaatatggattcactcaccctgagattctgttttctcatatttaaattgagcataataatgtatatctcacaggattttatggaattaaatacgataatatgcatggtagaaacttctgaagactcagtactaataaatttatcatttaagtttttaattttaatgtattatagtccaaatattttacagtttattgtaaaagattatacaaaataaaacatgatgcgtgccgcccgttcctttgccttagcactttacatccggaccagttga

SEQ ID NO: 153561 - DNA, 142 bp, Homo sapiens
tgttggccaggctagtcttgaactcctgacctcaggcgatccacccacctcggccttccaaagtgtgggattaccagcatgagccaccgcacccggccttgtgatgtgaattttaatcttctagggttaaggaaatttcagg

SEQ ID NO: 153562 - DNA, 269 bp, Homo sapiens
ctgtctttaggagaatgtgttgaaaggtgaaggtatagcaggttaaaatagtggcaattcaagtcacaggggctttactatgtcttcctgtgctggcagtgctttgccaaggtgcaaatatttattgtttgattacctctctgaggctgggtgtgcatcagtgggttactgtggtgaggtgactcacattgatctgtagatagaagcctgagagtgatcttggatacctgatctgagggtgtcaagaagaattttttcaagggagtggt

SEQ ID NO: 153563 - DNA, 203 bp, Homo sapiens
agtatttagttgtgtgatcacatttcgtcacatacagtaaaacctcccaaattttacttgtagagttccagtgagttctggttgaacaagtatatggatcttggtttttaaaatattctcaattgtttttgaatttcaccattatttaagtgcttattctattccaggcattgggtaggcatttgtaaacacaagacatggtt

SEQ ID NO: 153564 - DNA, 475 bp, Homo sapiens
ggcgacaggcttcatttaagaaatggaaggaacaacagcaggctcatctctgcggctgtggctcagaggtggctgggcccacaacagagtcaggacaagcagcccaccccctcctcctactccgcagccgacccaaggtgcaagcaatgcggacaaaggcaccatacaacaggggtgagggacaacacatcccagtcctcctaggggagggggaagctctccaagtctgaaatgctcccccaaaggtacaatcttcccactcaccactgcattcagaagcactgctcccacaccactgaaggtgcacagcaccccaggaaaggagcctatctgtggacaaaaaacctcaaataaaccacggtcagaaatcagctacgcctaggagtgtgtgaacaagaaatgcccactcctctggaaaaggggaagccctctccagagcagggtggaaagcaagaggagaagcgctccacacagc

SEQ ID NO: 153565 - DNA, 518 bp, Homo sapiens
cctaaggtttgcaggatgggtaagactgggacttgcagagataaagaggcaactacctactgagaagacagtgcagctgaagtacagaggcactttcatatcacactgcagagatctggggggaaaaggggtctattgggctttgtcttcctggtggctcagctgcacagagagaagcaacggtggaaggggctgagaagtggaggaggggccaggtctaagaagttaagagccaagaagatggggctagtgatcacagatgatgaaggtgaagcgcctaggttaaaggcaaggggccaagccatagtgcggtatggaggtccgaagttacaggtctttggggccaagtcaagggctgcagggaggaagaggagagaggagctatgaaagaccaagagcaaggtgctaacagggtaattgtacagggaagctagataacgggtcagagatacaggaggaccaaggaagtcagagggtcgcaggagacggtcagggaagaggaagcaaaggctgccaga

SEQ ID NO: 153566 - DNA, 368 bp, Homo sapiens
  misc_feature (169)..(169): n is a, c, g, or t
  misc_feature (205)..(205): n is a, c, g, or t
  misc_feature (211)..(211): n is a, c, g, or t
  misc_feature (214)..(214): n is a, c, g, or t
  misc_feature (220)..(220): n is a, c, g, or t
  misc_feature (246)..(248): n is a, c, g, or t
  misc_feature (299)..(299): n is a, c, g, or t
  misc_feature (312)..(312): n is a, c, g, or t
ccatggcactctctggctgcttgagtctcctctggccacagcaggcagtgtgaaatggccagggagttaaaacttccaagaacaaccctcagccagtgagggatggaaggtggtgaataaacaccccagcacccgcagcctcctcttctgtcaccaactgggaacccanctcttcctgaaagtcctcccccactgactcaccggnttgccncangcttgncaagaatgtcccagtaaccagggggnnngcactgaagtgactgaggggttaccttggagttgatgccttggctcagatncagctcccctgtnttcttcctctgtaaccttggacaacccaacccctctaagccacgtcaacccacggg

SEQ ID NO: 153567 - DNA, 184 bp, Homo sapiens
tgtttaaatctacatatgcactttacgagtacacccaaagtgcacacctggaaacaaacaccaaactgtctcctgagacccaggttataaaacacgcttagagaagcctggttggttctcagtcattggcctgaagccagtgaaaggacacagttgcatcatattcccctagtctacagtgttt

SEQ ID NO: 153568 - DNA, 407 bp, Homo sapiens
acacgcaaacacaaaccaatctggatgtcttttatttctttatcttgcccaagtgctttggccatgacttctagtattattttgaataaaagtagtaaaagtgagcatccttgtcttgttctagatcttagaggaaaggcattcaatttttccatgttcagtacaatggtagctgtgggttttgtcatatagcctttattattttgaggtatgttccttctgtatgcagtttttggagcattttatcataaaaggatgttgaattttctaaaatgctttttcagcatgtatcaaaatgatcatttttttcccttggtgctgttaatgtgatatatcatgtttattgatttttgtgtgttgaaccatacctgcatccctgggatgaattccacctgatcttggtgaat

SEQ ID NO: 153569 - DNA, 193 bp, Homo sapiens
tactaaaattcatcaattcaattaaaatggaatttgtggatactaaatgctcagaaaataaaaaaaaaaaactgtaagacatcacatgggaactaaaaacttctagataaaacaaatccagataacagtagaacatatcctaaagtgtgatagatactctagaagtacagggaagagttacagcaggggagat

SEQ ID NO: 153570 - DNA, 207 bp, Homo sapiens
catttgtgttcactaagaagaaagagataatggttaagatgtattatatttgtcaccatgaatgaatttctataagtctaaaccacaaatgttaatttcctatatgtgttttaaacttaatacaatgttatatcctcacattaaaaatgtgtcatattttatcagtgactaaataaaaaacaatttagaataagcgcctacactgag

SEQ ID NO: 153571 - DNA, 246 bp, Homo sapiens
cctgtgtttcccccatttaaagaaatcgttcagccaactgtgctcttgaagtactctttctgtcccttgggtctatggagcagtggtgggaatgtagcagacactcagtaaatacttgctgaaccaataacagggaatcctccttttcctcttcacaataaacgccagagcacacgctgactgccgacaccagttctcaccatcccttccatcccgcctttgtagcctgccccactggcgtcccca

SEQ ID NO: 153572 - DNA, 442 bp, Homo sapiens
ccgtaaggtttgaatataaaaccctagttattattcagttgtgtttcctaacttccactatgatttctttttcttctttttaaatttagatcttaggatctcaggagcccagaatcaaattaatcacgacccttggttcaggacacattctcctcatttgttcacgcgtggcccgttttacttgtctctgtgattataactgtacctgttttcgtgggtagcgactaactgaggccagtggtgcaggtggtaaaggaatttaccaagacagttgtaggtcaagaaaggcagatttattcgagaaagcaggaagataggttgcaagaaagcaacgggcgtgtcagcaagagagaagctgactggcaggagacagagccttgccgggggttttaaaggtggtgcttgcgctggagagggccacgagcggtgctggtaacgccag

SEQ ID NO: 153573 - DNA, 510 bp, Homo sapiens
cctcctccccattctaaagtcactttatatgccagagtcagatatctctcctttcttcattccagttcacaacctaaaatttgtcaaagacttctcattcagataaagaacaaattcttaatttggcatcatttttaatcttctctgaaccactctctttaaaaccactctcacatcctaaaatttttcaaagcattctcattcagaaaaggcacaaattcttaatctggcattgtttttaatcttctccaaagcactctctttaaacaattattttcctacctttgttttagccacagtggtgaactcattgatttcagataaacaatgtcctccctgcttcccctactgcctacttcaggtgctagtgagaatgaaataatgtgcaggaaaacacctagcatgttctgccatactgagccctgtgaaatgggtaattcacttgaacttcataccccatgcaatgaggatgaggctcagttattcaacaagctgttagagtggagcctg

SEQ ID NO: 153574 - DNA, 184 bp, Homo sapiens
cacttataattcctacatcatacttttagaattaccagcagaataaatacctaaagttaattatgtacctggtccaaggaactggcatcccctagcccttactgctgcccaaagattggaagagagttgctgaggattctggtgctggagaatgagctctgtaactgttcgttcacctaaagat

SEQ ID NO: 153575 - DNA, 584 bp, Homo sapiens
cacccatcatctattccccttcatctttcgcagttgaatcgagatttggcagagtttccacccttcctccatgcagcagtgtattattactgagaagctaacgccttacaggggtggcccctgattagtcttagccattgaaatttctgttagttggaggatagaatatcctaattcatacagtcaccatttatttcctgttattgctttgattttgctgctccagccacaaaatttgagtcctattgtccttgactaactgcatcttcccaaccagatttacttctgtcgttcattatgtctcctccacacaaaatgactaagttactttaccattctttcattgttataattttctctacagtggattcacctctttgcaaaacttacgttctgaagccaatttataaggcaataatttcttataattactcctgaatattcttccttatttgatcgctagaaggagttggtttgttttttggccacaaaagggaatggtctttattatttcaatttattttctttctttgatttttctcatttttttaaatgctttggttgaattggtatggtttaatttc

SEQ ID NO: 153576 - DNA, 489 bp, Homo sapiens
gaagggagtaagtcaagaaaaggacacaggatccggaaaagggattcaacatagaaaagagacagagaaatgctcctgaaaacaaggcaaccagtctctcacccccacagaagatgcagttgataatggatggttggcctgaaggctttatcacaacccattatctggttgtgggctggcactgtaagccacagccatgccccaagtctgaccatacctgctgtggatgataaggtcagtggtcagtaaatactcacaggatgaaaagcaaaacaaaccacgtgttttttccatctgacccgagctccaccagagcttgaaacatagttttgactgctcacacgtcaaaactgcttcaagtggacttcagctaggtgtagggagaagatcatgtgtgtctgtgaacttggaaataacaggtcttggtgcaggcaactgatccagagagcttgacgctgcccactagttggagcaccaaatgctgattca

SEQ ID NO: 153577 - DNA, 506 bp, Homo sapiens
ggctctgtgtccccaccaaaatctcatgtcaaatggtaatccccacatgtcaagggaggggcctcgtggaaggtgattggatcatgggggtggatctcccccttgctattcgcacgacagtgagtgagttctcacaagagctgatggtttaaaagtgtggcactttcccctccactctctcccctgccaccatgtaagatatgccttgcttcttcttcaccttccatcatgattgtaagtttcctgaggcctccccagccatgtggaactgtgaatcaattaaagctctattctttataaattacccagtctcaggtagttctttatagcagtgtgaaaatagactaatacagccctttttgatataatctttcaaaccctagctggaatcctgacactttcagagtcaacagaagaggaaactatataacttaaggagaatgaattaatctgtcccactcacattcatgtttattttatcaacctctagttcacaagtatatggt

SEQ ID NO: 153578 - DNA, 395 bp, Homo sapiens
tccggccccacagccaaagctgagctcggccccttcgccaagtctgtccctcccgccgcctgcccactgcaggacatggtgtcgccgcccacccggcctcgttctgctctcccccacccaacacggccatcgtctctccatctacaaaaggaagtaatcacaagccctacttcacagggcagctgtggggattaagcaatcagatacccagaaagcaatcaacacagccgccgggtgcagagaaagcacgaggtaaacatcagctgctgtgactgttgctgctgctgtccttatgatctctcatctctccaagccactctccaccatccagaagaatctttgaaaagtggaaatcaggtcgggagcagtggctcatgcctgtaaacccagcactt

SEQ ID NO: 153579 - DNA, 352 bp, Homo sapiens
acaaacaaacaaaccaaccaacaaaagaaacagcagatgaatggtctcaattctacaactacaaactcccagggctggatcagagctgaaatgccactgaggccagctgctgtggtgttgagtgccctccatgacctccctatcagtgcttccaccgaacagccttcaactgagctcctcctttcatggatatcctctgttgggaagattatcctaaaagggagctgacatatgtttccttgaaaaatcattcctcccaatcgctgcctctcaggtatgggaaattctcataagtcagctgctcatctccatgccaaatattgcccaggttttttttttttttttttttttt

SEQ ID NO: 153580 - DNA, 365 bp, Homo sapiens
ggtgaaaatcacagcactgtattacagacttgtcaactgctaagcttactgtaacacaataccctacaaaatataggaaacctacttttttgtattgccccagcaggtatgggctggctgagtgacagcaggagctggacatttgatctcctaaccctcttaggaaacagcaaatgcctttgctcttcagtttcccctacagggagattccagccatgcttcctgtaagacacacctgacatggtgggcgaaggaaaatgagagggtaggagacttctttacctgctcctttagggctctttgaagctcaagagtgtttttgttgttgttttcctttgagatggagtttcactcttgtcacccag

SEQ ID NO: 153581 - DNA, 141 bp, Homo sapiens
gtgcataagtatgtgtgtgtgcatgtatgtgtgtgtgtgactgtgtgtatgagtacatgtgtgagtgtgtgggtgtgtgtgtgcacgcctgcccatgtgcacagtcactggggtggcccggcctcacggctgctctacccc

SEQ ID NO: 153582 - DNA, 388 bp, Homo sapiens
agaggggcatcggctgggggtagaaaccaaaggatgttgctcagactgccaagcagctccagcggtcgctatgcacagccattctttggggatctcatcatggaaaagggtaaaaaagaacattgctgtgtcaaggctgcacagcaggaaactggagaaggtgaggtgacttgctcaaaaagacagacccaagtgtgggtgaacttggaagagaaccttggaattctggctccctggatcccagagaagtccgtgtgccctagacagtgtggtttcctattacataagcaactcttttattactcacactcgcttgctcctgcaagactcctacagcatctccccctagaaaacacagtggaagaaaagggttcttagttccagctga

SEQ ID NO: 153583 - DNA, 472 bp, Homo sapiens
tgtataggtccatcatgccttggagtagtgttatgcatgcacctaatacatgtgaagtaaagttttagttgattgtgcagttatctggctgtgggtggctcagtctactgaggaggagcttcagttaacagtttacttctgattccttgagggatgttgataaggaattagagaaaggcttccaaactttaaggaccacataattctctggggcctctgcttgtttctttgttttctggtgtgaaaatcttgtctttcccccaccctcagcacttcagcacacacccagctctgcctctgggacagtgctggtttcttcccttcctctttaccacccttctttctcgtccctctatttctttcctggccccacaggtgattccaaggaacacccacttaacaaatagggcttggggaatgtcaattaatttgccaaaacctggttcagtttcattcttaggtttcaacagac

SEQ ID NO: 153584 - DNA, 276 bp, Homo sapiens
  misc_feature (16)..(16): n is a, c, g, or t
  misc_feature (33)..(33): n is a, c, g, or t
  misc_feature (42)..(42): n is a, c, g, or t
  misc_feature (44)..(44): n is a, c, g, or t
gggaaggagaaagggngggggaggggaaagggnggccgcgcnantgcggtaatggtgtatgagagagcttagtgtggctcctgatgaagaacttcattgtctttggccaaattgacacattttgaagatacagcttccttctcggccataagatcatcaaactgcattaataaaataatagagcttgataatgaagtaggctgagaataatctaatacaaaaccaatagcaaattttgaaatgcatccacttgcaataaaatgttatctataatgt

SEQ ID NO: 153585 - DNA, 428 bp, Homo sapiens
atggtggagaaatctggcaacaccttggccaagggatcaaaatttgcatcacaataagggacagacggacgtcatatgactccatctcagagtatcacattgcggatgcagtattcctgccaagaatccataacatcttaatctaatcacaaggaaatttcagaccaacataaaatgaagaacatctccactgaacagagtaaaggggttagggaagggttgtgttctcaaaaatgccaatgtcataagagataaagacaggctgtgaaaatatcccaggaaaaaggaggccaaagagaaataataactgaatgcagaacctgaccccagactgtagtctatacaggaagcatagaaaatgctacaagagactttcttaggtcaactgacaaaactggaatatgggcgatagatttcatcgatgtcca

SEQ ID NO: 153586 - DNA, 1308 bp, Homo sapiens
tataaaatgggcatatgataacatctaagttttcaagagtcaaataagataatttatgaaaatgcattcttttaaagtgccatgttgtgggcacccaataaacgttaattccattaatatcatgattgtgactatttccagtctcacctccagctccacacccttgctcccaatcatgcagctgggagaaaattagtatttgattttttgataactggcaacctttgtctggtatgtttttgatttgccattaattaaagcatttgataactagaagatcatgttttccaatcaatccatgacgtgtttcctttagaaaaagagagactgaagagaaaatacactcaactcttttcagccttttagcaaagtcactactgtaaattggtccacttttttctttcaaagaaaatcaagctgctatcttcaaggccatcttctcacatgattactttctccagatagcttttcattttccagggtgcctcaaataaagagtgtgtgtgtgtgtgtgtgtgtgttcccacccactaaatctcctgcttggcagagattgtttatgatttctgtgaaagggtctttttgtccctttttgtctaagaagctttttcattacaagcctggaagtcaaggtaagtgccacagggattcgaagatctcttggcttttctccgatgttcacattatctcccagaaaaatgaagtcctacattccctgcaatcagttaatagaagtgacagctgtgagagcttcaaatctggccttaattaatgggcagtgcatacatgtgaccgatgcatatttgctgagaagaggctttaaatagcatcaaatgtttgtgagcaggaggccatgcgatggcaggaaatatctgacggtcttaatgggatcaggcttttgtgtgcaaacaatggcaaacaatggcagcaaaccacagcccagctgacagccattaagatggagtattcatttgtcatggtgggtaaaggctcttcaatagctgctaatcaaaatagagaaaaatgaatgtatggcacgatgcaactctaataagactgggtgtccaaatgagtgactccacataggtatgcgtaaggcgtacatggaatgaccttctctttgaacttgctgccaccgtggagcagcatatctcccttgagaacttcctcccttgacttccgaggagatcttactctctcatttctgaccgacctttctttaccttgttcttcccacccattccctcaatgagacagtcccccagccactgctctctgttcaaattccctgcgtgactgatgccctgg

SEQ ID NO: 153587 - DNA, 546 bp, Homo sapiens
tgtctgcaggctgaggaggaaggagagccagtccaagtcccaaaactgaagaacctggagtccaattttcaagggcaggaagcatccagcatgggacaaagatgtaggctgggaggctaggccagtctatctttttcatttttctgcctgctttattttcgctggcagctgattagatggtgtccactcagattaagggtgggtctgcctttccccagcccactgagtccaatgttaacctcctttggcaacaccctcacagacacacccaggatcaatactttgtaaccttcaatctaataaagttgacagtattaaccatcacacctgcctaagtaaagattaaatgagatgatcatcacaacgcatatttgttgctgttgttgtttaaaaaagtgaatggagggccaggtgtcgtgactcacacctgtaatcccagcactttgggaggccgaggcaggcagcccactcaaagtgagtagttcgagaccaacctggccaacatggtgaaaccttgtctctactaaaaatacaaaaattagtggg

SEQ ID NO: 153588 - DNA, 471 bp, Homo sapiens
ctgtagatgtttgatatttgtcagaacaggtgcccagcccttgggatactttgcttaagaataagagaatataaaaactattaatcacatatgttcccacaaggaaatacaaaaatattatatggttgtgccagaaggttgaaataaataaagctagtgaaaataagagccaagtcttgttgggcttcagcagagagcagtgtctctatgggagatagtgatctatatagaaaatgtaggtgagaattgttgttaggtgtgtttcaacaaagcttgtgaaaaattctgattggggtgggaaagagcaaaacaaaggagggtactttcttttccttagctaactctgtttagtcaactcttattactcagttgaagcaagaaataaaaatgccaagatgaactagagacacttactgcttttaaggaatttaaactctaaaagttaatgtagggaaaagttagatacatgtt

SEQ ID NO: 153589 - DNA, 242 bp, Homo sapiens
atgagttttttttgtagagatctttaacttctgtagttaaggttattcctacatattcttagtaggtattgtaaatggaattacataaaagctaaaagatttctttttcagattgtttgctcttggcatatagaaatgctactgatttttcctctcttcctatttgaataccctttatttctttctcttgcctgatttctccagccagaacttccaatagtatgttgaataggagtggggag

SEQ ID NO: 153590 - DNA, 362 bp, Homo sapiens
atacagtgattgtcaaactatgggtaaagggcactggataattgtaggttggttcgttggtttgttttaaggaatatttttatttttcaaagcactataaaacaaattttcttagaaggtctggaatatgaaaatcatagccatgaacatttgtatgcttacaaagctgccaaatgatgcatggctagtgagtctcagagtatttcactgatgctcaaatgctgcttgtccatttatttgccttctgtatgcattaggaaacagataagctataagtagtaccagcattttaaaatatggtagaaaagaggctgggccaggctcatgcctataatctcagcactttgcggggccaaggcgaa

SEQ ID NO: 153591 - DNA, 227 bp, Homo sapiens
tgtaagggggagattcggggacagggtatttggaacatctcacccttcaccctcacattccctccctcccttgagtgtccagagccgggctgaatgggtggcaattggagacttcacagtcatgtatgtttccaccccccagggcaccatcaaaagtaaattaacattttttccatttcccctttattgcaaacacgttgaatactgttgcacaaactccgtctctc

SEQ ID NO: 153592 - DNA, 235 bp, Homo sapiens
agatggcagagataaacaggcgttctatttcaaggggcctgttcaccaaattaaggagtttggattttaacctgaacacaatagggaactttgaagggttttggtgagtaaagatttcatgatgagatttgcattttaaaagatgactctggttgcactgtggagaataaattcaggaggtagggagcatggtaaaactagaggtaggtaaacaaattgagagacttgcagtgag

SEQ ID NO: 153593 - DNA, 220 bp, Homo sapiens
aaggaagtctttgatttctctcatcagtgtttttgatacttttcaacgtacaaatcttataatactttgttagattgatccctcagtatcacatgtttcttggtgctgtagtaactggtgctttttttttttttttttttgagatggagtcttgctctgttgccaggctggaaaatctcagctcactgcaacctccacttcccgggttcaagcaatcaag

SEQ ID NO: 153594 - DNA, 562 bp, Homo sapiens
cagtttacagcgtcagggcagtttacagcgtcagggacttcctttctcaaaaacttacggtggttctatgattgtggaagaatgagatcccatctggtattgaagcttttatcattttctttaggtttcaagatctgctctcctgagacaactttctttgggcagccaagatgggtacttttctgcctcttttcttagctcatctccgatcttccatcatgacatctgtacctctcttctccaccaacccccactattctctgatccttcttagatcccaagattaattttttttaactcaacatatactcagttttcttttgctgtgtcaattctaagatttatcatagtttatgttgagaaatattcatgtatttatttggagtacaaagaaattatgtattttttcttttctttctttttcttttttttttttttttgagacggagtcttgctctgtcgcccaggctggagtgcagtggcccgatctcctctcactgtaagctccgcctcccggattcacaccattctgcttcagcctctacgagtagctgggactgca

SEQ ID NO: 153595 - DNA, 320 bp, Homo sapiens
aaacagtcagggagactcattctgatgaaatggtatctacagtgtatatacttcccttcctgggaaaagaaggaggtgaaaaaggaaatcagttccctagacgcagatgaagaaattgcaggtgtggaatggacacaatagtagtgctgataacagggggctcacagcgtgactagccctgtcccagctccttactgctttgtctcactctaacctcacaaaacccattattcctattttgcatagcaggagaccaaggtcagagaggttaatgaacagctaggaatcggccagccggggctggagccccatccacctgg

SEQ ID NO: 153596 - DNA, 125 bp, Homo sapiens
gtgattctagaggtatcctggatagatcaggaaggcgcgtcctcattcacaggattatggagtattgcaacactgcctcaatggaaaagttgggactggagtcctacaaaagatttctttttttc

SEQ ID NO: 153597 - DNA, 425 bp, Homo sapiens
ctgagacgtgcggagcaagaagtgagggcagaagtcgcccatacgggtcctgttggagcacagcctctgtctacacagggtgtccttggcacagggaagctgggagggtctggggtgtggtggatgaggccttgctgtgtttcctttagtgtctttctagtttggggctgtaggtgtgcattacctactgaaaaataaaagcagtcattaagaaatctcccccaaagtgctaagaccatctcccccttggcacagcactgccagaggcgagtgtggggctacttagggggacccaaggaagaggttctgccctctttcattggcctccccctggtttggggtatggaggacaagttgacctggggcccaactctgagaagatgtgctcacaccatgtcctgttttcttctccagaggaggcgacc

SEQ ID NO: 153598 - DNA, 465 bp, Homo sapiens
ccatgagtacttttgctaccccaccctacattagactcttgctgtcaaaagcaaatgggctggaccatggatttttcatgtaaatgttatgcaggttaatatttgaatggcttggacagaaagagcattctccctgctctgtgctatcggcatgtgttagattcattgacttgagccaatcttctacatgtaagtgaatctctcatctgaactttctttttcttattctttattttccttgattttaaattatatctagtagattatctttctcatgatctgtccaggtgtcacagttggtgcgtgctggttatgttctgctgtgggcctggtttgctggtttaaatagaggtggctttagaagctagaagaaaagagcccaaatgtggaaagtttttgccccaaccccttgagggtttcatctccagctttcatgaactgttgtcctaaatttgaaaccagatc

SEQ ID NO: 153599 - DNA, 710 bp, Homo sapiens
gcctaatagaattaagggaaaaactgccctgatgaagtataatatctggagccgctgtgattcttttatacagaaagaccagaatacaatttttagaaaaaaatactagatatgcaaagaagcaagaatgtatggttgataataaggcaaagtgcagacaataggagtagatttacagataatagagatattatactcagtggacaaggactttaagataactacaattaatatattcacaaaaataagggaaaagatgaagaaagtagatgaaaaaagtaccttttcaccagagaactaaaaactactttaaaaatcagataagcattctagaacttaaaagtacagtaatgaaaactcattgaatgggtttaataacagattgaacagagcacagcccagaattggtgaactagaaaaatatacagacagaaccacagagaaaataagggagtgtggggattgataagagcataagaaacgtgatggaaaaactccaaagatctaacatacatataattagggtctgggagatagagaagtaacagaatcgggcagaagtgatatttgaagaaatgggctagaatgttccaaaatggatgaaaggtagcctacagattctagaagctcagcagaccccaagcagaataggtacaatgaaaagcacatctaggaaaattaaaagcttaagagccaggaggaaaaatatt

SEQ ID NO: 153600 - DNA, 922 bp, Homo sapiens
agcaaaatacagggcaatggccaacaaaagaaacaatttatttcagcggccactgggtggcagacggaattcgttataggcactctcccaaggcggcatgtttcctaaatgtatagcggttacacccacatttgagattttttcctctacacgttagtacacttgaggtttatgtaagtgatttcatgttcaaaagtttattttcctctctctcttttttctttaggaagttgaagatattcatatagattttatttatttaaaaatggaaattgtcgatctccataaagacttaagatttaattctgtatttcaacgcaattttccccccatatgtgattgagtaaaggattttgaaagatatcccatgacaacgtaataaagcttaaaacaagatctgaccgaaaaggaatagggattccacccagggaccctaaatttgataacctttgtgttagcggacattcctcttcctccatgcctcaggccccagtttattttctaccataaaatcatgctctcaatgaagtaattgatatgaatcatttaatttatagcataaatttaagtcatttggttgtttcaactagaaggatttgcattttatcccttgtcctctattaaagaagaatttcacataccctgggagccttaccctcaccctaaaaactacaccaacctggttaaaggcaaccttggccctaatgtacaccccgcgaagatcaccaaataaaactatgtccctaaggaccattagccttaagcttagagagcttgaagtttacacaaccaataacaataattttatttgccccaatcttttatatgataagaatgatagaaacatttggaatttgtagatttggtagtaactggatgaatgggttctcctgttgataaatgccattgtttcccatttaat

SEQ ID NO: 153601 - DNA, 488 bp, Homo sapiens
cccaagatagatttgagtatcatctgccccacaccagccctgtgaccttgaccaaattcatttgatctccttgagcctcagattctttatctgtgaaatctgggaatacttacctaggagggtgggtgtaaaaatgaaatgagataatgaatccaaatgcaagaaaatggccaatgtagtcagttctcaatgccctcctctggcaaacggggaagggagcaggctcagtggtgagggacgggcgtggtgtcaaattcctgttctggagggaaagaagggtgcctagtgttgtttgctctggagaatgagcattttaggtggctagtccgtctactggaaggaagggaatactgaatggacaggtttgcagagccccaagcagtacgactagggcctgaacaggtgcagttatgggaggcaaagtgttgttcaatagaataaagtggtttttttgccttaaaaaatggcgacacatatacacacacaca

SEQ ID NO: 153602 - DNA, 468 bp, Homo sapiens
acacacacctactaggtaagccacaacagttaataaagtttttggagttaggtaagaattgaaaccctagcactgccgctagttggttggataactctgggagagccatttcccttcaacaagcctccatttcttctcctgtaaaatgggaacagtaaataccatctctggagggcattgggatgttataaagagtcagtggcacttgaggccagcagtttgagaccagcctgggcaacatagcaaaaccccatctctacaaaatatttttaaaaattagttgaacattgtgatacatgcctgtagtcccagctacttttaggttgaggcaggaggattgcttaagcccaggagttcaaggttacagtaagcaatgacagtgccactgtactccaacctgggtgacagagcaagactctatcttaaaaaaaataaaaatcccaaaataaaaagcgtcagtgggacagt

SEQ ID NO: 153603 - DNA, 488 bp, Homo sapiens
ttttaatctgtgtccttttactgtaataactgtaactgtgagtctaacagcttctctgagccttgtgagttctagtcaatcattgaggccgaaggtggtcttggggattcccaacacagtgtctttattagacaccttcaaaaaacaaccggttagcaaaggaggcagcatgctattgtggagatacccaatctctctgagaatgagcagtcacatccgtaaattagcagttaataatttttagtaaaaataacacccattatgggtctttcagggtgatctcataacccatccctggctagaatcatagtgattgattcaaggatgattatgagccaatgggcattggcctgaggactttagctatgactcctgggagaggcacctttttttcctggggtggctgagctggtagatctaggctcaaggatgccggcagccatctctgtcaccctacaggcagagccttcctgacagtgcacacagat

SEQ ID NO: 153604 - DNA, 670 bp, Homo sapiens
ggaagaaaatggaagattatcacaaaacgcaaaatagagtgtttcaaggagggcaaacaaaggtcaactaggcctaatcgtgctgaaaggtcaagatttcctggtcaaattgactggtaaagaagaaatggagtggtggagggcagcttttgaatatatgtgagactaggaaaaaagttaacctagaatctaaaaagttgttataattttttaaaaatcagtataaagatactttaaaatttttcaaccttgtgtagtttctcttaatgagccaataaagcatgttcttaccatgacattttcaaccttaacaaaagtgagacggcaaaaaccaaccaccaaagttctaatactgcagcatcagaacaggtcatgcttaacagcttcatatttttaaattaaactttctcttttatcgaattttttaaatcgagatggggactatgttgcctaggttggtcttgaactcctgagctcaagtgatcctcctatcttggcctcccaaagtgatgcgattacaggtgtgaaattaaactttctaaacaagaaataaaatttacatgttttgtatttctgaagctaatgctgcaaaagctgatctaaattattaaaaaattaaaatggttttcctaaaatttccacataagtttcaaaagaaaaaataaataaa

SEQ ID NO: 153605 - DNA, 520 bp, Homo sapiens
agtgggagctaaacattgagtacacatggacacaaagaagggaacaatagacactggggcctccttgaggacggagggtgggaggaggatgaggataaaaaaactacctattgggtactacgcttattaactaggtgacgaaataatctgtataccaaaccccgggacatgtaattcacctatataacaaacctgcacatgtatccctgaaactaaaataaaagtaaacacaaacaaaaaattgccacacgttacattcccgcttagtgaaattgaacatctagaaatgtgggatcctttctcaaatgtctggctgactcattctgttattctcaccccctaaaaggatgcagtttatttccaggatcctgatttcctatttctgttgatcttttattaaagctaatatttgtgtgtccttatgttttgagctgcctttaatccttttttggaaagttgtagaatagatactaaaaacaaaaaagtaaaatgggaacataaatttaaccagttcccataa

SEQ ID NO: 153606 - DNA, 337 bp, Homo sapiens
gactgaatggcaggttgtggcctggaaaaagaggcctcgaatgatggaattagaaaacttagtgtttaaaatgtatggtgaaggtgtgttcagtatataaatccaatctgtaagtgatatggaaagtggaagtttattcaatgccttatcacatattcaaatgaacgtatggctgctctaccacttaaaaatagctctgttcattaaaggaaatgtaacctagattttcagaaaattaaaatacaatgttcttaagtcagtttaaactttaactgagattcatagtttggttctgccttcctaagcatttggactaaggcagagagtataaatctga

SEQ ID NO: 153607 - DNA, 179 bp, Homo sapiens
tttgcaaatcagtcaatgtaatctaacagaccaacaagctaagaagaaaaaccagatgatcatgtcaaatgatgcagtaagagcacgtgaaaaaaagtaagatttattcatgtcaaaaactcagaaccaattagcaatagtgaggaataacttcaacttgattaaaaaaaaaaatcctt

SEQ ID NO: 153608 - DNA, 475 bp, Homo sapiens
tgaggtgcagggtgggggttaggagatgggaaattattatgaaaaaacaccaggggtaaaggggatttgcattaaaaccttacaagattcttgccaaagacaggctgaggtaatcagatatcacctgatggatggtgaaggatgaggaacctgatcagatatcaagggtgatcaggtatcaagagaagggggcttaggctgggcgcggtggctcactcctgtaatcccagcactttgggaggccgaggcaggaggaatgcttgagcccaggagttggaggccagtctgggcaacatggtgaaaccctgtctctacaaaaaatacaaaaattagccaggtatggtgtgccactcctgtggccccagctacttgggaggctgaggtgagaggattgcttgagtccaggagattgaggcttcagggagccatgatcacgccactgcactccagcctgagcaacacagaaaaactctgt

SEQ ID NO: 153609 - DNA, 234 bp, Homo sapiens
tgctgggattacaggtgtgagccactgcgcccggcctctaaagggtgatttttttttcttttttaaaggtggcggtgtaaagtacttactgtgtggttgttggttgtttgaagtggagtctctctgtgttgcccatatgggtcttgcactcctgggctcaagtgatcttccagcttcagcctcccaaatgtgtggttcttaatagaagtgtaaacctttggaaggatgtcatta

SEQ ID NO: 153610 - DNA, 387 bp, Homo sapiens
tgaaatacgtagaataaacagttgattataccagcaagctatccatttggtagatttttttcatagctaatttttaatttcatgttgacttttcggtacctatcatgtttccttcttcactttactctcagatagtagctactcagaaaatttattcaaaaacagaagttatctactgttttggactgtctcttttttagggaattggaatttacatgcattaggatgcttctaaaaattaatactctcctttctcctcttttcataaaaatggttatttttaacttgaaaatccagcaaaagaaaagcattttctatgaagttaatttcttttcccccccatctccagtcctcccactaaaaataaaacaaaaaaataaaaacaat

SEQ ID NO: 153611 - DNA, 324 bp, Homo sapiens
accctcttctgttccctcttctggacacgcccttcccttctatgctgaagcacagccccctcccccctcgccctttgccagacagccccacgccagagggtcccggcacgcccaccctgcacacacaacacccaccagactggcacagggacaggtgcggggactgcccagcccttccggctgcctgctgcttctgagctcagccctgctggggaggggagggccgcacacagccccgcctccagagggccgaggctggccacaggccacggaggtcacgtttatctgctcgcagagcaaggccacggctaatcggagcggccg

SEQ ID NO: 153612 - DNA, 310 bp, Homo sapiens
aggatactgtgctgtggggactctgctctcaggtggatgctgctctcaggggaccctgttctgaagagatgctgttcgcagggggatgctctgagaggaccttgttttgaggagaccctattcagagggggaccctgttctgggtgctcactaccctgagggaactcttatgtgaggggaatgttattctgggggggacactaccctgagcggatctcgttctaagtggggaatagtgtcatgggggaacatgttctgaggaggatgctgttctgaaggggaccctgttctgtgggggattctgctctga

SEQ ID NO: 153613 - DNA, 654 bp, Homo sapiens
  misc_feature (62)..(62): n is a, c, g, or t
  misc_feature (68)..(69): n is a, c, g, or t
  misc_feature (71)..(71): n is a, c, g, or t
  misc_feature (73)..(74): n is a, c, g, or t
  misc_feature (81)..(82): n is a, c, g, or t
  misc_feature (84)..(84): n is a, c, g, or t
  misc_feature (92)..(92): n is a, c, g, or t
cggtcctgaatacaagatgcaaatttatgcaacatagtgcaaatcactcatgtctcaaatgncatgannanannctggtgnntngagataanaaagcccctgccagcatcatctctcctaattatcgaatttcctttttgtgccatagaagtttggtttggattttctttcatttgacccagaaggagtcctaactcttggagaatgggatttgacttgtgtattttaaaaatgggcaagatattgatatgcccagggaaatgatagggtattctgggcaagcagagctgctttaatgaaggtccagagataagaatgagcatggtatatttggggaatctgagaaaatcagcctgaatgaagtaaattgggaataagtaaattaggtgggttataaaggaagaggtcagtttgggagtttgtttaaactagataagagtcgaggcttgattaaaaggaaacaaagagtttctaaaattaaaataaagaaaaactacatctgtttaaaggcaaaattttaaaagtctgttgcattaatctgctcaggctgccatgacaaaaatctcacagactgggtggcttaaacaagagacatttattttctcacacttctggaggctagaagtccaagatcaaggttctggcaaattcggg

SEQ ID NO: 153614 - DNA, 516 bp, Homo sapiens
ttacccatgaatgcttttgtgagaggagagaggcctctgtacttcaatattttccccctggacagaaacttggagtggagaagggaggaaatgtctctgtcattttattgtttttagcttcctagttatttaagaagtttcttcttctaccttataagcttcaaacctaagaacaaaaaagcaatttttccacaatattattcattgctatttccaaacaaaaaatatattattaaagcaactcaggatggaaagacatctccagaaatggtgcctgattcaatggatattttacctgaaacctagtaggtttgacagttagtaggggaagctataagggagagaaacagacaaataaaattctctctatatatgcctcgtctgtatcactgagattccctacacactaattttacattatttgtatatgcctatacaatgttgtccatgttgagtcaaaacaatacatctagaataatcctttgctagggcatattttcttaatatgacactctt

SEQ ID NO: 153615 - DNA, 160 bp, Homo sapiens
tttccacgtgacacttgttttcttggaatcctaggaaattaatatctcctttcttccctttccttattattctattttttctcctacccctctcttaatgacaaggccttacctaataattgaagacagtattgttgagacaggtataggggttgaggag

SEQ ID NO: 153616 - DNA, 471 bp, Homo sapiens
tgtgtagggacccaccccccagggagtatgggacgttccactcatgcccttgacagccccaagcatccagccatccttccctttagcagaggaagaatcagaaatccaggcgctcgagagatttttccgaggtcacatggcagcaggcctctccttcagaacccacgctgcttccaggaaacgagggccgggggcctcggcagataccgttggagtccccctttggggacccgggccactgactctccgttgctggaaggaagcctcgtctttccttgtcccctcaaacatttacttcccttgtgaaaaaccaagtgtttcggtcagtttgggactgtttacctgtgtggttgaagggcttcgaaaagaccaggaaattcaagggaagctgtcaaagagaagagttagaaccgctgcgtcctgtcccccgtcagtcagcaccgagcctttctctgtcccactgcagaaaaa

SEQ ID NO: 153617 - DNA, 329 bp, Homo sapiens
cagattctttaacggtgggaaatccaaactaaagacgaccaaatatatctctcagtagttaaagaaagagagtcttcttgggctatatatgaccctttctaaagaaatctgttcctttcaagatctattctttctttctttttttttaaagacagagtctcactgtgtcacccaggctagagatggggtttcactgtgttggccaggctggtctcaaactcctgacctcaagtgatccatctgcctcagcctcccaaggtgctgggattacaggcgtgagccaccatgcctggcaagatctattatttctatattaggatatgttctat

SEQ ID NO: 153618 - DNA, 597 bp, Homo sapiens
aattggctatagtctctctccatgcttcaagaattccaaactttgaaaaaacctttccaagtgatttgccatgaaaggcactgctggtagtgttcctggaccaaaccaagggtctggctgcttactttcatggcccaataataagatgcagatgaactgggaaagaagagagtttatttctgtaaccgggtacagggaaaaggttaggaaaatatcaccaaaccaacccaaaattgcaaagttttctagagcttatataccttctaagttatatatgtctgcgtgtaagtgtgcattcatctaaatacataagtgattaatttctagtctataactaaggtctgaatcatgaagaccttattctagagcctcagtaaatttacttaatctaaatgggtccaggtgtcaggcgtgattacccttatcttgtctcctgttaaatcatggaggtttgggagatccttcagacccccaacaaaacttgtttaatctggccgggcacggtggctcaccatcttaagcttgtgcttggacaagctgtcctatccatgcggaccagccatcccaattctgcagaaatgacgcctaccatctcat

SEQ ID NO: 153619 - DNA, 608 bp, Homo sapiens
aatatgtatgtatttgcatgcccaccacgcacaaaatatgtgtgaatgtttgccctatgctacactgaggcccagtctcatgtgacattggctttaaagtttaaggccaagcgatcaacctacctaagtaattttagttaatctgattcttaaaatatttgttttagataaaatggaggatactccatctaaagatttcacacactcagagataacaaagtattccaactttgcttcagagaacatgtctaccttcatttcattataaataactttcaactgcgagacacacaagaggtaccaggacatgagtcttctacatgggttcccatcttttagatttttttcccctagaaagccagcttttaaatgccatcacatgtgcacagcttgctttaatatttctcagaagctcagatcacatgggagggcgcttcagcctgtcacaaggctgcaatgtgacaagctgagctggatggaggctctcacataaagcctagtcaacaggggcctctgaaatcagcttctatttatatctcaaagcctgccaactcctacacaaccccaagaactaaggatgcagcgttcatatatctaacataagaaaa

SEQ ID NO: 153620 - DNA, 792 bp, Homo sapiens
gagttcgaagggagggtgcacacgtcttaggtaatggagaacctgtgttcatcagttagaatttgtggctgtgaaatacttttcagaagttggttccttaatgacaggctggatgtcaggctctaggggccctgactagggagcagcctgcagcttcgagtgaagcgtgcaatcagggaatctccagggaaccaccaggatttccccttcatgggaggaagtggcagaaaagggactggcgccgagcagtgggggaagatcaccaagggcctgagtggaggctgacagtgaggaggctccagaagcctgggagggaggagcttggcaagagctccctgcagggctgtggccactgagtcactgagtgtcagcaccgtgccaccaccctgagtttgggatgtggtcatgttcataccagtgtgggaggggagccggtccctgtgataaggaagtggattcaggagggcttggaagcaaaggcaccatctgtgtactgcctcgggtgcaggagggggtggttgggatcctttcagacttgaggggaagggatgaggctggaagaggagaaaggagtcaagacaggcagaaagacgagagtgggagccactcggaatgctttgcacacagtcagggtccacgctttgttctatccttcttgctgcatgcatatgcacacgtagacacacatgtacacacagacataggcacacgcagacaggtaggcacacaacagacatagacacacatgcatacacatagtaacacacacagacacatagacacacagacaac

SEQ ID NO: 153621 - DNA, 784 bp, Homo sapiens
gagttcgaagggagggtgcacacgtcttaggtaatggagaacctgtgttcatcagttagaatttgtggctgtgaaatacttttcagaagttggttccttaatgacaggctggatgtcaggctctaggggccctgactagggagcagcctgcagcttcgagtgaagcgtgcaatcagggaatctccagggaaccaccaggatttccccttcatgggaggaagtggcagaaaagggactggcgccgagcagtgggggaagatcaccaagggcctgagtggaggctgacagtgaggaggctccagaagcctgggagggaggagcttggcaagagctccctgcagggctgtggccactgagtcactgagtgtcagcaccgtgccaccaccctgagtttgggatgtggtcatgttcataccagtgtgggaggggagccggtccctgtgataaggaagtggattcaggagggcttggaagcaaaggcaccatctgtgtactgcctcgggtgcaggagggggtggttgggatcctttcagacttgaggggaagggatgaggctggaagaggagaaaggagtcaagacaggcagaaagacgagagtgggagccactcggaatgctttgcacacagtcagggtccacgctttgttctatccttcttgctgcatgcatatgcacacgtagacacacatgtacacacagacataggcacacgcagacaggtaggcacacaacagacatagacacacatgcatacaggcttggtggggaatcactagtgaattcgc

SEQ ID NO: 153622 - DNA, 397 bp, Homo sapiens
actatccaacctgcctgcaacaaataccaatgctgagaccctgatgaggctgtgaagaccaactggtcgcttgatagcaaattcactatggtaggctcattctttcctagaagcaccagcagtttattcacacaaggacagacttcctattctaggtatgtggttcctttcgggcctacagggtcctgaacacaatctaaggacttacaaaacatctgaactgtcagcgtagatttgctgaatacgtgatctatacatgttaacacccaatcagggagagttcgccagcggtcataggatccactgctcctatcacatactgcgccacctagaagctgctagactgatggaatgttggcatggcctgctttagtgccaggtgggagacaataccctg

SEQ ID NO: 153623 - DNA, 329 bp, Homo sapiens
cagaaggaatgctattaaacacatgcagtgatgtgccttgaatgtgagttatagttgaagagctttagactcacactgtttctgtgaagacaaaatgaaaacaggccaaccaaactgcaaaagccagttgcagaaatcttcaaagactgataagaaatcatcctgtttcaaatgaattgctgtcaactttagaaagagccaagagaaaaaatatgaaacggcgcaggcgtcgagacattttacgagtacaactggtacgaatatttgaactgctggcagatgctggtgtcattagtcacaggtcagtattggattcacattgttaaaac

SEQ ID NO: 153624 - DNA, 749 bp, Homo sapiens
  misc_feature (19)..(19): n is a, c, g, or t
  misc_feature (46)..(46): n is a, c, g, or t
  misc_feature (106)..(106): n is a, c, g, or t
  misc_feature (117)..(117): n is a, c, g, or t
cgctaccccagatagcggnctagcatggctaaattattggctcccntcccttcatccttgaagcacatagttccatgatgcgttctgagagctggaaatcacagantccttgttctnggtcttggccggaccaacccaggagcagggaactaatagaggaattacatcccataattaaagagcactcgaaagaaggccagagaatatgaaacggcgcaggcgtcgagacattttacgagtacaactggtacgaatatttgaactgctggcagatgctggtgtcattagtcacagtgcaagtggtggccttgataatgaaacacattttctcaacaacactttattggaatatgtagatttaactagacaactcctggaagcagaaaatgaaaaagactctgacacactgaaggatatacgatgccattttagtgccttagtggcgaatattattcagaatgttccagtgcaccagagaagaagtatttttcctcaacagagccttcgtcacagtctatttatgctgttcagtcactgggcaggtccttttagcatcatgtttacgcccttggacagatacagtgatagaaatatgcaaattaatagacatcaatactgtgcgttaaaggctatgtctgctgtactgtgttgtggccctgttgcagataatgtaggactttcatcagatggctatttgtacaaatggttggataacattttggattctctggacaaaaaggtaattatga

SEQ ID NO: 153625 - DNA, 592 bp, Homo sapiens
ccgtgaatcgcgggcagtagctgttccagaggtagcccctagatgaatatgaaacggcgcaggcgtcgagacattttacgagtacaactggtacgaatatttgaactgctggcagatgctggtgtcattagtcacagtgcaagtggtggccttgataatgaaacacattttctcaacaacactttattggaatatgtagatttaactagacaactcctggaagcagaaaatgaaaaagactctgacacactgaaggatatacgatgccattttagtgccttagtggcgaatattattcagaatgttccagtgcaccagagaagaagtatttttcctcaacagagccttcgtcacagtctatttatgctgttcagtcactgggcaggtccttttagcatcatgtttacgcccttggacagatacagtgatagaaatatgcaaattaatagacatcaatactgtgcgttaaaggctatgtctgctgtactgtgttgtggccctgttgcagataatgtaggactttcatcagatggctatttgtacaaatggttggataacattttggattctctggacaaaaaggtaattatga

SEQ ID NO: 153626 - DNA, 238 bp, Homo sapiens
tatttttatgccttttgttcatgctgcctcaaacaccctttgcaatggattttgaaaaggacagtttgaaactctgtggctggtttgtagttaatgggaacacctttcctggcccacattttgcccttatcttccttctttacagttggtgagaatcaactgtgctgaaactgtaatgcatttttaatacaatattaatattatttcaatctaagtgattaattaactcagcaaggcc

SEQ ID NO: 153627 - DNA, 197 bp, Homo sapiens
gaacttgttctggggtgaattttggccaaaaccaagcaagagattaaagtctcgaatgaacacagaaagactagaaaggcaatatattgggaaaagattttgttgtagttctgccttacagtcacataatgaaaaggaccagatattggctaggtcatattatctatataagagagtataataccatgttgcttttt

SEQ ID NO: 153628 - DNA, 387 bp, Homo sapiens
taaagatgtacatgagagatggtttaagaaaaacaaaaatttgtgtttatggattgtgtgaaaagctttaaaaggaaaaaaaaaaaagttgtataaggagaagcaactgaccaggaagtaaaaagcaggcaaagaaggtgtctagcccgaggccgggcaggatgacacaatctctcagatttccaaccgcttcatgaagaagccattaagcaccggaggaagcaagaaaaacacaaggaaaagaaaggcatctgagaaaaacaacaagggcccaaaatgaaacccatcaaagacaaaatttcaccagaggacattagagactggggtaaatatggaaaacttagacattcattccacagtgggtggtggctttgtgtgaccatctgg

SEQ ID NO: 153629 - DNA, 408 bp, Homo sapiens
cacggtgcgcttgcattcctcagcccttgggtggtcgaatgggactgggcgccgtggagcagggggtggtgctcgtcgaggaggctcgggccgcacaggagcccttggagtgggtgggaggcttagggctggccggctgctccgagtgcggggcccgccaagcccacgcccacccggccttggccagcccagaaaggggctcccacagtgcagcggagggctgaagggctcctcaagtgccgccaaagtaggagcccaggcagaggaggcggggagagcaagcgagggctgtgaggactgccagcacgctgtcacctctcggttttactttattttaggataaaatatctattgtgaattttaaaaacatgtaaaataaaattttaattaaaaagcctaaaaaatctt

SEQ ID NO: 153630 - DNA, 501 bp, Homo sapiens
cgcgggaaggcagctaaggctcggtgagaaatcgagcgcagcgctggtgggctggcactgctgggggacccagtacaccctccgcagctgctggcccgggtgctaagtccctcattgccaggggccagcagggctggccggctgctccgagtgcggggcccgccaagcccacgcccacccggaactccagctggccggcaagcgcggcacacagccccggttcccgctcgcgcctctccctccacacctccccgcaagctgaaggagagggctccggccttggccagcccagaaaggggctcccacagtgcagcggagggctgaagggctcctcaagtgccgccaaagtaggagcccaggcagaggaggcggggagagcaagcgagggctgtgaggactgccagcacgctgtcacctctcggttttactttattttaggataaaatatctattgtgaattttaaaaacatgtaaaataaaattttaattaaaaagcctaaa

SEQ ID NO: 153631 - DNA, 503 bp, Homo sapiens
cacggtgcgcttgcattcctcagcccttgggtggtcgaatgggactgggcgccgtggagcagggggtggtgctcgtcgaggaggctcgggccgcacaggagcccttggagtgggtgggaggcttagggctggccggctgctccgagtgcggggcccgccaagcccacgcccacccggaactccagctggccggcaagcgcggcacacagccccggttcccgctcgcgcctctccctccacacctccccgcaagctgaaggagagggctccggccttggccagcccagaaaggggctcccacagtgcagcggagggctgaagggctcctcaagtgccgccaaagtaggagcccaggcagaggaggcggggagagcaagcgagggctgtgaggactgccagcacgctgtcacctctcggttttactttattttaggataaaatatctattgtgaattttaaaaacatgtaaaataaaattttaattaaaaagcctaaaaaatctt

SEQ ID NO: 153632 - DNA, 266 bp, Homo sapiens
acagtgaactctaaaactcacagactggagtagtaattctcaaccatcgtcagtgggggaggggagctgttgaaagtccagatgccctcaccagactccacaccaattaagtcctaatctctgaggctgagcccaagtacaggcagtgtttaaagttcagagggattccccaaccagccaaggctgagaaccactgaggttaatgcaaagggatgctacttattaaaaaaacacacgtgacctggagaatttcctctatcaagaga

SEQ ID NO: 153633 - DNA, 509 bp, Homo sapiens
ttggggaggcacagtgtcaacaggaaatatctgccagcgacacagaaaaggcttcaggaaagataacaggaggagaggccagatcccgtcgttgccttgcactatgcagatcgaggaagtggggagtgattctgccttgtacagagcgtgtggattcacacaaagttctcttctgtcctggcaggaaacagatcaaccctcggttggggaaggtggaggcttgcttttctctgatcacacactcttgcaaaccttaaagcagtttccattaaacatattttatttcttccaaattaaggatgacaatgtgaaccgtgaatggcattattcaccgtgggaagctgttttccttcaccctcgggatgtttatgtatgcaccttcattttccttggcgtttggatgtgatttcttatgaaagacttggaaatctgcaaaaactcacgagttacaaacctaccggtactcagaactctcctgcattttctaagtggtcagttcctttattgta

SEQ ID NO: 153634 - DNA, 539 bp, Homo sapiens
tctttctctttactggcttgtctgcaaggagtccacatacttttacgtgtgtacacgtgtacacatcttgcttctccaaggcagccatttctggttccttccattttcaaacttcttcccatagccagggctatggactaccaagtcctgtataatattttggcattattattgcacttttgttttctgggagtaattttggctgtacttcctctagttcctctgttactctctactttttgtgtgtagtcttttaataagactccttttatttacttttcatacttataagcttatagcagctggaaggctacaggaaatctgttggaattttttctttttatctctacttagaggtaatttgaaagttgcagtgttttttgtttccttgtatgctgaagatctaggtcctgtgtggctttgttttccttgttgattatattttggggagttgaagaaaatagagggagagaaaagattcataatcaaatgcctgctgtgcttaatccttaagtcctgagaatatattttcaaattat

SEQ ID NO: 153635 - DNA, 280 bp, Homo sapiens
tgtccatcagtgttggctcagacactcacacaaacccacctgtattctttcacgccgtaaatcctctttggaaaaaggcgacattcaataaataaacatcaattgattggtctgctatttctttgtgtgacagtcataaaccagaactggccagcaacgtcctcatggacccaggcccagctgtaactgcccatgtgcttatgtgaccagctgtgaggactgcaggcagcctgcctcccggctcctctctcccgtgcatgctcttcatgacgcacttctt

SEQ ID NO: 153636 - DNA, 572 bp, Homo sapiens
acccaggctgcagtgcaatggtgtaatctcagctcactgcaacctccaactcctgggttcaggcgattctcctgctccagtttcccgagtagctgggattacaggcacacaccaccacacccagctgatttttgtaattttagtagagacgggggtttcaccatgttggccagcctggtctcgaactcctgacttcaggtgatcttcccgtctcggcctcccaaagttgtgggactactggcctgagctaccgtgcccacccacctctttttctttatagattacccagtctcggatatgtctttatcagcagcgtgaagatggactaatacagtacacaatttaatcaaaaggcactcccaggaagcacaagcaagaatgaagggagaacgagagaatgaagagagaatagtcaacgaagggtccatttagtgagtggattgtcactgtggacgatctgagctcagtcatgctgggagccctttgagagactatggagcatacctcagaattgtcccgctagagggcaggagggtggagataccagtgcactgcacagtccctccttggtt

SEQ ID NO: 153637 - DNA, 537 bp, Homo sapiens
tccgttgaggctgcagtgcagtgatgttggttcgctgtagcctcgcctcctgagtagctgggattacaggcacacaccaccacacccagctgatttttgtaattttagtagagacgggggtttcaccatgttggccagcctggtctcgaactcctgacttcaggtgatcttcccgtctcggcctcccaaagttgtgggactactggcctgagctaccgtgcccacccacctctttttctttatagattacccagtctcggatatgtctttatcagcagcgtgaagatggactaatacagtacacaatttaatcaaaaggcactcccaggaagcacaagcaagaatgaagggagaacgagagaatgaagagagaatagtcaacgaagggtccatttagtgagtggattgtcactgtggacgatctgagctcagtcatgctgggagccctttgagagactatggagcatacctcagaattgtcccgctagagggcaggagggtggagataccagtgcactgcacagtccctccttggtt

SEQ ID NO: 153638 - DNA, 642 bp, Homo sapiens
aaattttctacttatatgacagtatgctatttttccttaactttgggtaaataattttatggtgtgattaaaccgatctgacattttgaaaaagggcatgttttttaatgaaatataaaagagttgtaattttagttattcactgttgcacaaacctacttttttggcttcatttgcaaaaggttgttggataacctttatcttttaccactaacttcttactctgatccaaaatatttggcttttaaaattctccttatttcattatttgtcttcatatttaaaatatcttctgtgatatttcacttctaattttttaatatttttacataaaaagagatgaatactgatatccctgatttttaagagaggattttaatttggaaataaacatgcgataatatgattttaaaatgctaaagtggagctctagcaattcaactgaaaatagcattatgaataaactatactgtggcaactctttaacataataaaggaggacatcaacagagcagaaaattgatgaattttggaatatatgaagcatgttgtatcaaattgccagagaaagtaatgatcttctgttactgaacttaggtcacaaagcctactgcctgctaatcggcaagtggacctgtttct

SEQ ID NO: 153639 - DNA, 542 bp, Homo sapiens
tcccttttctccactaccttgccggcatctgttattttttgactttaataacagccattctgactggtgtaagatggtacctcattgtggttttgatttacatttctctaatgatcagtggtattgggcttttactcatatgcttattggctacacgtatgtcttctttgaaaagtgtctgttcacgtctctttttaatggggttgtttggttttttccttgtagtttaagttcttactgatttttcataataggaaatgttcttagtataggttttattttgttttaaataaaatcctattaactctattaactgtttgggaaggcaggtacgagggaaatcaaactagatacagcctaaaagccaaaattttggcatcaaatattatttgaagataacttagaagttagcataaacattctataaataaaaatagaagatagaaatcagtgtataaaatacaatttacacaccattattaaaatatatcttgtgtaaagtgagacgcccatctgttcggatttgctgtaaggttaccaag

SEQ ID NO: 153640 - DNA, 494 bp, Homo sapiens
gtcatgacacctgtgctcacggcacagaggaggagacaggatagtagcagagctgtgtttacatgtgttgcggctttgcctgaatatagggagtctgggaaactgtctagtttagctagtagttagtgatattacacttatgataaagtaaaacaagagggcagggattggagttaggtattaggtgagcctactgtagatctacctctgtatagtatgcagtggcatttccccatatacctaaacctaattcattgtgatgaatttaaaaggtgaaaatgtaactaatgtatgtgatatagttccctgagaagtgcattaagctctctttgttcagtctttgtgggaagtgatggaaaacttttttttttttttgccaaaagatactcgaacttagaaactaggcagttactttcacataaactctttgaggtataggtagtgttatccctaacgttacaaattaggaaactaagacagagatgttaagcagt

SEQ ID NO: 153641 - DNA, 141 bp, Homo sapiens
gcatttgtctttgacggtgccctggatagtggctgaagctctgaacacttaagaactaaagaacattaggggaaaggaatatcatattaggagacaggactgtgcagctgggagcagtggctcatgcctgtagtactaaca

SEQ ID NO: 153642 - DNA, 313 bp, Homo sapiens
tgtgagcacctgaggaggagaagcccctggaatagggggaggggccacaacactccaagcctcccccatggactccatatcaggggttagactggatgactcaaaatggaccattttatacactcttcccatcttctgtgggtacaagaatggccttggaggaagccctgttggggcttagaccatattccctatcccttccagcatgatgctggtgggtaataccctgggtatcagaaatggggagcagttgattattattctcactgaggtgaaagtgcaggatctcccagaggaggtcaacattctccaa

SEQ ID NO: 153643 - DNA, 350 bp, Homo sapiens
tacaggaactcaatctatttcctacctttataccttaaccgaccaaccttcaaggaaaagtggcagtaaaggtcacaggtgttgataccaggtgtcacactaaaagagataagcccacttctgcaggtctatagggctctcattaagtggaataagaaggattcagcatactgtgaaaacagcataaaaggagctatgacaaagtacaatttatatcatgtacattgtagaagatgaacaagtatatgaatgaaaattcagtacataaagtaaattactacctgacttctccatcatttaaaatacctggtgagtttcttataggtggtagttaactacagcatgttaaa

SEQ ID NO: 153644 - DNA, 639 bp, Homo sapiens
cccactttgtaagcacgaatatttaccaggtttcaaaccagcaaaaaatcaagaatgataacttattattcaatgccaaatgctatgatatataggacccactgaaatcctctaatagattatgaatttgccgaatcacttgctgttcagtattctataaaatagtatccatcaagagcataagattgaaatttaagactacagttctactttgttcaaagaagcgaaaaatactccatttccccccaagtaaatcagctaaaaattacacatctaaattaaagctgtctcctttaaatgtcactgatctggatagtggtggaactacttggactcaatactacattccactatcctaaagaacaaaaatctcattattttgaaggaggactggatatttacaaaaacaatagcaaaatatcattcaccccaactctactaatgttacgagttttaaaaaagtggagtcaaaaatcatttgaagtcaaaaattacctcaacctccagttgagacagcagagagatctttctaaccccttctctccaaagtcacaccaacatagagaaaacaagaaatataaacttttcctccatttcaatgaatagacattgcaactgtaaccacagtagatgaaaaca

SEQ ID NO: 153645 - DNA, 532 bp, Homo sapiens
agtacgtacagtatcaaacagtctccctccttttctctgtgattttggtctttctccttagagaatgtcctccctccaactccaaaagacattgcctctgtggtatagttacagtccttaaatatatgtcttgggtgccctgtggctgtgattttttaagggaaattaacttattttaaataaaataaacttaatttaaaataaaattttgttatctaaagccaaatagaaaaaattccacattttttcttacagtgctcattcatcagaaccttttttttttcttctttttttttttttttttggagatggtctcactttgtcgctcaggctagagtacaaaagcgtgattatagctcactgcagctttgaactcctgggctcatggcatcccctttcctcagcctcctgagtagctaggactacaggtatgcaccacaatgcctggctaatttttaaattttttttcagagacaaagtcttgctatcttgcccagacttgtagtgtattttttatagatatatttttagg

SEQ ID NO: 153646 - DNA, 272 bp, Homo sapiens
tgtagcactgaatggcaggcaggcagaggccaccagagccagccccccgagaagccctgctgagccaaaggggagcgccctgggacctaacccagagccccatctcaccttcccccgttctttcaaagtgcctcccccaaccccagtcaggacttcgtccatcccagttcaggaagcacaagaggctccccgaaaggaagagggggccaccaagaaggctcccagccgactcccactgcctcccagcttccacatccgccccgcctcccagg

SEQ ID NO: 153647 - DNA, 476 bp, Homo sapiens
gtggtctagaaaaaaaataccagtaatgtggcttgtctgttttagcccaatctctggaagaaaaattctccctaagacatttataaccatagatttgacttcacttgtgtttggagcttgaattacaatacttgtatgggctggaaacatctatgttgagaaattaacactaaaattaacattaaggggtggtaatactcctgggatttttagaagtaaatataagacattctggagggataaatgttggattttttcactgaagcactggtgaagatgaacttacaattgaacatttaaaaacagaatccactatgagagattgcaaatagaacaaatgctgattagatcataaagaatttcagataatataattatcttaggaagactataatactgtatatttaaaattatttaatttaattaaattcaggaatccaaacataagaaaaatatagtccctcggtaaagagcag

SEQ ID NO: 153648 - DNA, 551 bp, Homo sapiens
tctgccatggagaaatggtaatctcagtgaagacagctagatgattatattggaacctttatagaatgcctcatgagaagatggttacatgtaaacttcacaattagaatctgctagaactcatacgcctatcacattccactctatcctagtaataactacaccaaagacctttaaggatgtgttgacctccttcgtttctaagtcagtcttgattcatctttctcctcctatcaaggcctccagaaaatgcatctggtagctcagtgaagacatttgctctgagaaaatacttgttcctatggatgggacacagtcttgcatggatgggtttgttacttctgagggatccacccagtacaatcatcaagtcaatccagaaactcatacaaattttaaaatttcaaggccagaggtaatctcatctctatttcataaaaaccagtagggtttttatttgttcagaaaagtctcctttacttttctgaaaggagtctgtttcaaatctgcttctttaaaaatgtataacactcctcaatacctccaagaaa

SEQ ID NO: 153649 - DNA, 414 bp, Homo sapiens
atctagagcagaggttggcaaactgcagcctgcgggacaaatttggcccactgcctgtttttgtaaataaagctttattgtaacacccatttgtttacatatcatctgtggctgccttatgctatggtgacaggattaagtagttgtgacaaaaaacatatggcctgcaaagcccaaaatatttaccatctgggacattacagaaaaagtttgctgagccctagtctagtattatagccagggaaggtgtagggaggaaagggctcttggccaaagaagggcattgctgctgattactgatggaatgatggaatggagagggtcaacagagggaacactggatggaaagcagtgggatgaatgctaagagagcccaccaactgccagacctctgccaggcctcctggaccctct

SEQ ID NO: 153650 - DNA, 177 bp, Homo sapiens
ccaggatgatgctgcccttaatgctcagctgattacagactaaacacaaaagttcccagaggaaaatggtggacttgggagctgctgcctcaggaggatcttgagtgttagtggttcctccctatcagatgtacctaatgcccaggatttaataaaggattggcctcgttggcctca

SEQ ID NO: 153651 - DNA, 207 bp, Homo sapiens
cacctgtttctctctactggtactctttccccagcagataaatatgcaatactctttttctccagcaaaaaataaacctccccacatcttttgatcctctcagagttaagtgatcctgctttcttttcctatattacacctaccagagatgtacctctattaaagcatttttctggatgccctgtaatcactgatttttgactatat

SEQ ID NO: 153652 - DNA, 259 bp, Homo sapiens
taattttgtaattttagtagagacagggtcaggctggtcttgaatccccgacctcagatgattcgcccacctcggcctcccaaagtgctgggattacaggcatgagagtcccccacaactggcctacccaaagcttttgataatcctgggcagcaccgctcatccctccactcttcagcccattctccattctgggtaagttggtctcctttctgtcttccataggttctattttcaattttcttacaccttcgggtca

SEQ ID NO: 153653 - DNA, 328 bp, Homo sapiens
tctggtgcagtgtggaggagggacagatgataggagagcaggggacagccacagctaggagtgcatggtcagtggccaggccagatgctacccagggaaacccaagtggcagggcaggggtggtagagatgcctcaggcattgccaagccccctgcaccgtcttattcaacaaggagaggaggctggtgtggtgggacagagagtggtgggaagccccacgtaaagcattacatcagagaacattagacacatggagaggcctgtttgcaacccataggtctttattccttccctagagctctccatgcctctatttcctcacttaag

SEQ ID NO: 153654 - DNA, 174 bp, Homo sapiens
aggggccgcaggctccgtcactacctagcatttttcacaggaggagagctcttttaaaaaacacctggtcaccttccatagagatttctaaaggcattgagagcatggtttttctactggggggtgggctgggggaaaatgcagagttgggtacacataagaaaagagagccca

SEQ ID NO: 153655 - DNA, 401 bp, Homo sapiens
gggtgctggacttctggtctctgccatgagttgtagcatcacgaggcctcaacagatgggccacctgatcttggacttcccagccttcacagctgtgagccaaaataaacctttcttctttataaattatccagtctcaagtattctgttatagcaacagaaaatggactaagacaaaattggtactgagagagtggagttgttgctataacaatacttgaaaatgtagaagcagcttgaaagtgaataatagattgtagaaggtccaggtatgccggcatacctggaccttctctcctggtaaaatctcagagaaccatttgattggaccaggggagtcatgtgcctccccttgaaacaaccacagtggccagaagaatggggcttagctgagataacac

SEQ ID NO: 153656 - DNA, 424 bp, Homo sapiens
tgttcattgaatactatcagcagcattatttagccggaaaaccagtagataacatatatttcctgatcattgaaaaaaataccagaagcaatgaatgttgttatatcatccggagtgaggagatgagaaagaatgctggctttgaccttccatcctggagggcagcgtggaaagggagaagaaaagcaagctgtgcgccatgtgtgtgggcaagggggagaagggatgagaaacagactgcccctggcaggacacagagcgtttgtgggacccccgaggaatttgaactctccacagaccaaggaggtggcaggagtaagacatcggtattctgtaacatcgagggaaaataagaccagactaagaagaatacaataatgttaaaatacccagatccccagaggctggtgtgtcgctgtgggtt

SEQ ID NO: 153657 - DNA, 332 bp, Homo sapiens
ggcatccaaaagtgaataggattacaggtgtgggccaccacacctgccatttttttaaaaaatattttttatttttaatggaacatttcacgagtttgtgtgtcaccttgctcaggggccatgttaatcttccctgtatcgttccaattttagtatatgtgctgctgaagtgagcacggaatcaattatgataataacaattacaatatgataattttatagctctaccatttcttccatatttattagttggtatttattataagaaaaagttttcctggccagcatggtgactcatgcctgtaattccagcactttgggaggccgaagag

SEQ ID NO: 153658 - DNA, 410 bp, Homo sapiens
tcaaacgggcttctttaaaagagcaatgaatcacttgctcattttaaatctcctatcttgattatattaaatagtactactttttaaaataagaaattattgattattaattagagtgtaggtaacaaattagccgggcgtggtggcaggcgcctgtaatcccagctactcgggaggctgaggcagagaattgcttgaaactgggaggcggaggttgctgtgagctgagatcgcaccactgcactccagcctgggtgacagagtgagactccgtctcaaacaaaacaaaacaaaacaaccaacaaacaagacaggcaccttgtctgccctctgagaggtaggggtagagctgggaggatcaaaagagaatagtgagattcttactataaatggagcaggctggctggaag

SEQ ID NO: 153659 - DNA, 595 bp, Homo sapiens
tataatggagattgctgggcattggtaagtatatgtttaactttataagacaccaccaaacttttttccaagtgactgttccagttcacactcctgccagcaatatataagagttccagttgttccacatcgtcaccaacacgttattaccgattctcctaaagtttagccattctagtgagtgtgtgatgttatctcattgtgattttaatttacatttccctaatggctaataatgttgaacaacttttcatgtgtgtttattggatgtttgtatatcttctttttgaggtatttgttaaattttttttgcccatattttattttggttggggtcttactattgagttattagatttctttatatgttccagatagaaatcttttgtcaaaagtatgtattacaaaaccttctcctagtgtatgacttacctatttatctttttaatgctgtctttttcctccttttatagtaagttctttctatgatctctgcctaccccaccatcatgaagaatttcttctttctttctttcttttttttttttttgagatggagttttgctcttattgcccaggctagagtgcagtggca

SEQ ID NO: 153660 - DNA, 297 bp, Homo sapiens
ctaaagacttatgggggttacatatagattgaaccattttgaatttctaaagtatgtatgagtcaagaaccaaaatttgagggtgatcagaatgtcatgtttattttccttagtttaacatatctgagtatagtccctgttccaccaggtggtgggaaagccagcttagacattattcaggctttgtacccttcctcagactttggtaaagcttccaggacttaactcagtgccaaaatacaaagcaacccacccagtcccttatctacatgggttaccattgttccagcccacatg

SEQ ID NO: 153661 - DNA, 434 bp, Homo sapiens
agttcacggagcagaagactgatacaaaaatatacgatgaaagtttaccttgttaggtattatagtggaagtgagtataaagcactcctagaacacaaatgaagaaatgactgaccattctgagaagtatcagaggaggcaaagcttaaactgtgttcagaaagttgagtagtaagttttcaggaagaaaatgagtaacgaagtttaaggaacttgagaaagtaaaaaagttcatgatgaatgtaagggactgcaggaggttcattatggctaaagcagaggttgtgagtgggcgcccttccacactgtcatgcatgctgaagagaggagacaagggagatagtgaggactgacagtcctcaagttcatataaggctgggactggaaatcagatgaactggaagtacaaggaagcatggggattgaagatgctg

SEQ ID NO: 153662 - DNA, 260 bp, Homo sapiens
tgttgggattacaggcacgagctactgctcctgacactattgcacattttaaacaaagaggccagtccatagaccatctgacaaacactccttcatgactcccttcatctataattggtaaacctctgattaacctgtatgttgagcctatatctcctatctctggaatctctaatttaaaaagcactaacaaggtatgtcgacatttcaagggagtgttatacaaaaaagaagttgagccagtgtttgcggcacggaga

SEQ ID NO: 153663 - DNA, 508 bp, Homo sapiens
atggctaatctgctgaagacctatccactaagtgttgaacttcaatcctatctctagtcgtgtttctgcagaatctacttatgctttactcatgctctcttttcttttttttttttttaagaagaaactggggtctcagtatgttacccaggctgctcttgaactcctgggctcaagcaatcctcctgcctcggcctcccaaagtgtcaggattgcaggtgttaagccatggcacccggcctcttttatttcttaaaataaattattaaatataacgattttatcttctaagccttaaaaccccaacagccgaggctgctgcagggccgactctgcagcctgtggcttctgtggggcctgtggcttctgtggggcctgtggcttctgtgctgcctgtggcttctgtggggcctgtggctttccgtggggcctgtggcttccgtgctgcctgtggcttccgtggggcctgtggcttccgtggggcctgtggcttctgtgctgcctgtgg

SEQ ID NO: 153664 - DNA, 413 bp, Homo sapiens
taggtggtagttgcgtgagctgagatgcgccactgcactccagcctgggcaacagagtgagactttgtctcattaaaaaaaaaaaggtcattgatgtgggctttcaaagtctcattgtctcatttccaagcagttgtgtttgagggcaactctgaggggtgcagaggtggtggtttggagttaggaccctcgagcacaagaaggctaggacaaggaggatggaggccacgcctgaggccctctgctgctgcccccagctgtgtggacgctccaggtagctttgctgtgattgatgtgatgctgtttgtgatgcttgactccggctgggcttggaagtaagcttggatgtgagactggaatctgcttgccgcatgtaccagatgcatgctgctgttagctgtcactgatcacac

SEQ ID NO: 153665 - DNA, 425 bp, Homo sapiens
ggcgattatagagatagttaatgtcggccgtataagaaacattattaaagttactcttcggtcctttccgttcttgataaacaattcctgcgccttcctctcgaattctattttccattcctcaagtcactttaatggctcttcaatacaacaaatatttactgagtgcttactaagtgccaggcactgggctcagcgctgtgagggatgagaaagaagtggtaccttccttccaggcgattgtagtctagactacaaactgccttcctctgccaggacaagtttgtcgtctgctctgagctatcaagccccttaggagacctaggacccagctgggtcccatccctttggagtagctgcttcagactagcctaggaagcacctaattcttgtgggcaaaggagccatggaagatagagctggtg

SEQ ID NO: 153666 - DNA, 349 bp, Homo sapiens
tggccagactggtctccaactcctgacctcaagataatcctcccacctcgacttccccaagtgctgggatttgggattacaggtgtgagccactgcacctggcctaaaatgttccatttctaataaaatttttagaagagtccatttacatgatttactatttatatagagagatgtaattccttttttttttcctttttctttcttctttttttttttaaacagtcagggccatattatgattttcctgttggtcattggtaacagttataactatataattggggtgtcggtaaaggtctttctcccatgctgaacttccaatttaatgaggataggaccctggtca

SEQ ID NO: 153667 - DNA, 134 bp, Homo sapiens
agccccccgcttttttttttcactacaagacacttgctttcttctattaactcctgcttctccctgactcccagcagaaggtgccagtgataacttaaactctgcaaacgagcaacttaagggcaattattttg

SEQ ID NO: 153668 - DNA, 296 bp, Homo sapiens
gagacctacttagcactctcaggttacgagctagtcagtgagatcacacagggttatgagagccaaacatgatttatggcaagattcacatactgtgatgccttaacaggcaggatgggtaacttaaacaagggaaggtggctggcaatggggtcatgcaatgtcttattttaacaagctgttataacgccacacaggaacagtcttcaattaaactaagaaatatacttttttgttgtttttctctcaaaatgcatggctctttgggttccctattactattgtaacagtgacta

SEQ ID NO: 153669 - DNA, 339 bp, Homo sapiens
taagggataagggacaattatataccagtatgctaactagtctcaagaaaagagctagctttattagacatttacgtggagttctatctgttccacctaaaacttccttgcaaggagaaggctcctccttatcagacgtggataggaggctgctgtaacactaactccctcccactgtagcctaggaaaaactcggtcttgacatgcacaaaacaataacttctgagaacttcagagcagctgtgttcagacagagccagtgactttactccaggcaaagaagtagtttaagagttggttgaaaaaacaattttcattttgggttggaaatgaggaaag

SEQ ID NO: 153670 - DNA, 245 bp, Homo sapiens
tagaaaatgaaggcacaaggcctgggctgctggaaggggcccgagggcctggagatggaggcttggcaggcccagcactgctgaagccaagggaatgagtgacttctccaaaagcaggttgagtcatgctgaacctcactggttccccagtagcaggagcatgaggaccaaggacggacctagaagattcatggtaggggctgaggggaagagcagccaagagtcaggagggtcagaagtgtgtc

SEQ ID NO: 153671 - DNA, 577 bp, Homo sapiens
ttggaagaggttcctggtttggagaatggtcccacggtggccagcacaggagcaaatgagagggtgggacagcgggaacagacacgtgctgctctccttccaccctgagagaatgctctccagacattcctgcatcccaccccaccaaactcagaagcttgctgggatccttcgagtccaataggaagtccgggagtgccttcagttttcactcaaagcaggcccttttttcgttccttccctgttaggggaagatacacctggacgagaatatatcctcacctcaccaccctgaaaagctgctttctcccttgcatccatatcctctcttcctgtcacctccccatacagcttcacatttgcctcatcgcacttttcttttctgtccacctttcataatcccatccactccaaatcccggaccctgcacacgccaactccctgaatccaattcaggagtgccccagttcccctttcgatccatctcctttctactgtagcggagactacaagtcccaggatgccccgctagcccgtgaccggctaggaaataaagagccttctctccgcggtaagg

SEQ ID NO: 153672 - DNA, 453 bp, Homo sapiens
gttacaagaaaaaaacatcattttgaaaatggtattaataggatgattaatgtaagcatatgacacagagacaggaaagaataaagagattaactagaacacactataggtataaggttctcactgagcaaggagcccaaacctagagtccataggatccattaatggacttcagagttgtgactccttgaaactgtaaaattgtgaccatgtgcaaagatacctcaacgatggcactaagcaccgacaaatgcatatctgtccacagtataatctaaaatggtacagaattattttatggataatttaaaggctatcttcgttggtgctacctttcatttaaatcaccaaagcttgcaccttggacaatgtaagaatatgatatagtaatggctgacctatatatccgttattgtataacgggaagcagctcatgatgagggatatgctatc

SEQ ID NO: 153673 - DNA, 419 bp, Homo sapiens
gttacaagaaaaaaacatcattttgaaaatggtattaataggatgattaatgtaagcatatgacacagagacaggaaagaataaagagattaactagaacacactataggtataaggttctcactgagcaaggagcccaaacctagagtccataggatccattaatggacttcagagttgtgactccttgaaactgtaaaattgtgaccatgtgcaaaggttctatggaaagctgaaaaatgcacccctccacaaccccaaagatatccatgtcaaatccctggaacctgtgaatgttactttatatgataaaaaatgtgattaagttaagaatattgagaggaagtgcttatcctggattatccagatgaaccttaaatccaacgactcgagtccttgtgtaacagagatacacagag

SEQ ID NO: 153674 - DNA, 459 bp, Homo sapiens
atatttgtatttatttttttaataagacgtggtctcactctgtcacccagattgaagtgcagtggcacaatctcagctcgctgcaacttctgcctcccaggcacaagtgatcctcccacctcagcctccccagtagctgggaccacaggcacacacaccaccacgacagactaattttttgtatttttagtatagatggggtttcaccatgttggccaggctggtcttgaactcctggcttcgggtgatccacacacctcccaaagtgctgggattacaggcgtgagccaccacgtccggccagagctagtttgttttttgtttgtttgttgttttggtttttgtttgtttgtttttgagacagagtcttgctctgttgcccaggctggagtgcagtggcacgatctcagctcactgcaacctctgcctcccaggttaaagtgattctcctgcctcagc

SEQ ID NO: 153675 - DNA, 508 bp, Homo sapiens
ggagctgtgggaggttttctagaatgtcagttataaagctacttgttgcacacataaaatggatttggaaactcgtatttaatcttaaaaaaaatcttttagtgtttgccagagcattttaatctgaaaatatttaaaaatactcgcctgtaatcccagcacttcaggaggccgaggcaggtggattacatgaagtcaggagttcgagaccagcttgggcaatattgcgaaaccccgactctactaaaagtacaaaaaattacccaggcgtggtggcagtcacctgtaatcccagctacttgggaggctgaggcaggagaatcgcttgaacctgggaggcaaaagttgcagcgagcagagatcatgccactacactccagcacgggcgacagagcgagactccatctcaaaaaaaaaaaaaaaaacaaaaactcatctgttagtataactaatgctccaggaagctgccacatatttacctcaggacctatttctatcttcgccccac

SEQ ID NO: 153676 - DNA, 597 bp, Homo sapiens
aaactcctcctgccttggcctcccaaagtgttggcgtcaatagcatgagccaccatgcccagcaatatagtgtttaaaaatacagattttagagttgggggagggaggccatggtgcaaaaataaataaataaaataattttaaaaataaaaataaagattctgtaactaaattacatgggcaaatttaactttccaaaccttgattttctctcctgtaaaaaggaagccgtaatagtatcctatgagaattaaatgagaacacaggtgaagtgcttaccttatctcccaaacagttcaaggcaaatcccattgctttgtgttcctgaatcttcaccagcattctctattagctccttcctcaaaggctcttagtaagtttttgtcatctccaagcaagaagcaaaaatgtcttacccaatcttgaatctcttttttgcctcagcactatctcttttcccttcctttccaagcttctagaaaaaaataatctgagcaaaaaggtcagcagcccttgctattcttacttttcccatgttcttccatcttctactatcacaataaaactgctctgacatagtgaccaatgaccccttag

SEQ ID NO: 153677 - DNA, 272 bp, Homo sapiens
cctcgtctctattactaaaaaatgcacaaataaataatttttttttagaaaaagaaaaatggccagcttgctaaataaatcataggaactcccaagaaggataagtcaagcagggagaatcaagccagggagttagtgtcgggaagggctttgttggtcagacgcagtggctcatgcctataatcgcagggttttgtgaggctgtggcaggaggaacactcagctgggagttggagaccagcccaggcaatatagtgagatcacgtctctac

SEQ ID NO: 153678 - DNA, 406 bp, Homo sapiens
ccccaagtccaaatggcaccacctgtatctttagaacctatgggcagtttatctgccagcttagagaaccaactagaagctttcttggatggaactttaccctcagccaatgaaattcctccactacaaagcagcagtgaagacagagagcccttctctctgatcgaggacctccagaatgatctgctgagtcactcaggtatgctggaccattcacactcacccatggagacttccgagacccagtttgctgcaggtactccctgtctgtctctcgacctgtcagactcaaacttggacaacatggagtggttggacattaccatgcccaactcctcttcaggactcactcctctcagcaccaccgcgccgagcatgttctctgctgactttctagacccacagg

SEQ ID NO: 153679 - DNA, 624 bp, Homo sapiens
tcctcagcgcgcactgtgccagagcagtacacaggtacaaagggcaaacgtgttcatgatttcatttgaattctgttgtttttacatcgttctgccctgatgtaaaacaaaccaggattttaaaggcagtgagtgatgaggagctactcccacttggggaagagctgctaactttacttttccgctgctgttggttccggttcaaagctcggtttgggaagtaagaggaggactcggagactttgaccagagcactccaggccaaagttttcttccagttcaggtctgtctcttcgtcccagccccgacttaagatcagaacctagatatttgaactagcccagtgaccctgtgaattctaatgcacaggtctgtactgcatgtaagacttggctcagatttatgaaccagaagcaatgcatgcacgcgcacgcacgcacactcagagaagggggcgatccctagaaaataccacatcgggctgtgtgtgctttggttgtgctgccacctgcacccctttgtcccttagagccacttttataatttccatatgttcatgcctaaggatggtgggagtcccaggtattcttttctgaactcatcctaaaattggtaacagaccgc

SEQ ID NO: 153680 - DNA, 178 bp, Homo sapiens
ctcagctgccactgcagatctttttcactcttttcagaggcagtgagagaacaggtctgtttgcattccttgctgtccagtcctacggggcgggtaaaaaaagagaaagatggggcagcagggaccctggctttccaaggactgtgaccattttgcctcatagctcttcacaccttgg

SEQ ID NO: 153681 - DNA, 753 bp, Homo sapiens
caggaggatcacctgaggccatgagttcgagaccaggctggtctcgataaaccccataaacacagataaaccccatctcttaaaaaagtaataataaaataaaaataaacttagccaggcactgtagtgaatgcctagtgtccaagctactcaggaggctgaggtgggtggatcgtttgagcccaggaattcaaggttatggtgaccaatgatcacaccaccgcactccagcctgggagacagagcaagaccctgtctcttaaggggaaaaaaattaaaactaggccattcccccttttgatcctgaattagtactacttatgtccaattaccgaaccttttaaaatatcagctttgatggggacaataggaaagagaagaaggaagggagacagaaggagtggctccaagttcccatattatttagaatacagtaattagttcaaaatgatttagaagtagtgcagtagagtaagacccggattctaggactcttctcagcaatatgcccaatcaaatcttttaacctctgtaggccagttgcttcttctataaaataaaagtgttgagtaggtttctaaagacacagctatcaaaatactaacacatgagttttgaatcttgtcctcctaagaattttggctaagttgtgcctctttaaaaaatattaacgaaaaatcaaaatcaaaggcttaagaaaggatagcacagcagcacaaagaaaagactagatggacaatttcctcaaagaaa

SEQ ID NO: 153682 - DNA, 431 bp, Homo sapiens
agtgttgtgaggaagaatcttttctacgtgtgtctcttagcttctggtggtttgctggcaaatctttggcatttcttggcttttggaagcgccaccctgatcactgccttaccatcacatgacattctccttgtctgcttgactgtgttcaaaattcccctttttatgaggatactaccacctaatccaataaggatgtttgattagggtagcaaaaagcaagggaatttccttgaatataaaagctaaaagacattttgagcactttgcttgacacactctagacctgggaatcaatctgatcagagccatagagagaaaactgcagccagtgggtaaacaggcattaagtgatggtttggatttaaaactattattcagactctgaaaggaagacaatagaaagccacagagcaaaaaagagcaattta

SEQ ID NO: 153683 - DNA, 453 bp, Homo sapiens
acctcacggagactctcactggtgtccccagtgagagcagattcagctatgattcaccgtctgattacagaagttatcttatgattgcttttagtttcttagtgaaatgaggatctaagttatctgatgaaaaatgaggagggagggaaggactctggaggtttgtgaatagaggagaagctgtacatagttgtctgaggagtgaatcagctagaaaaatacagtcagatttcaaacagaactaagaactctcttgttagttaaggtcataaatttaaatgagaccagacagcaccattgtatgcttttctccagcctgttcggctgttcaggtgggtggaggaggcagagaataggatttaagctaggttggttttgctaagcaaatatgatagagagaagaggtactggggatgtattcatgaatacaaaaggagagattataattataat

SEQ ID NO: 153684 - DNA, 300 bp, Homo sapiens
atcagcagataaacacatgtaacaacatggtaaagtatggacagcttttcttaataatgctgcaaagcctcagaatgttcatttttcaaaaatgtttaaataaaatagcaaatacttaactttagcactgtcgctgtagaaaagattgaggaacttttaaaagcatcagaaaaaaatttacaatctgttgtaatggggcattttcattttaagctcatgcttcaaaacaatttgttattatgcagaatgtaaaactcttcccccttttgttgaaaaactctcatgaagattactttaatg

SEQ ID NO: 153685 - DNA, 215 bp, Homo sapiens
aacgtaggcccacctgttaggagatttaaattttctattttgctaattcagcaaatattcactgagcacctacaaatgctagagcctactctggaagcttgggatacagcagtgaatatggtaggtggggtatggcagtgaatatgacaggtgggatacggcagtgattatggcaggtgggatctgccagtgaatatggcaggtgggaatatggg

SEQ ID NO: 153686 - DNA, 435 bp, Homo sapiens
agtcagcccgaaggggtggggtcaggagggcttcctagaggagctgctcttggagctgagtaggagcctgccaagcagggagcagggaagcaaggcatgtatgactgcagggaaaatgacacttggagagagggtcacgagcaacactggcctggttatataggaagagatgcgcgtgatacgaggcctggtgccttgacccaccccgctgtgcctcagtgggccgtcctgagctgaatctggactgctgggacttcgtgagttctgtgtagacttttctctcaaacattggctgggcacagtggctcacgcctgtaatcctgatactttcggaggctgaagtgggaggatcacttgagcccaggagttcgagaccagcctgggcaatgaagggagaccccatctctacaaaaaaatttaaaaattagctgggca

SEQ ID NO: 153687 - DNA, 470 bp, Homo sapiens
atcccagcactttgggaggctgaggtgggcgggcagatcacctgaggttgggagttcgagaccagcctgaccaacatggagaaaccccatctctactacaaatacaaaattagccaggtgtggtggtgcatgcctgtaatccctgctactcaggaggctgaggcaggagaatcacttgaacccaggaggtggaggttgggtgagccgagatcgcaccgctgcactccagcctgggcaacaagagcgaaactccgtctcaaaaaaacaaaacaaaacaaaacaaaacaaacaaaaaaaaacattagctgaagtcttcaagcccaggtaatatgcacatcaggaaggactggagaagttatgtgcttactatgtgacagggcagtaccctgtcatgttctttgccaaagcccttcaagaatctaaccaagaattcagcctgggtgacagagcgagactgtcaaaaaaaaaaa

SEQ ID NO: 153688 - DNA, 667 bp, Homo sapiens
ggcacccacagttctcagaaagctgcatgcctcctaacacccagggagaagcaggctggccctcgtccccatggtgacacgtgtacttggcctgtgtgtagacttgtgacctcaccccgtttactgtggcttcagagcctctccctcctggggcgggagccaggagccgccaaagatctcggcaacccggacaaccaagggcccagaagtcagaactgggtgggtgacagagagagaccccgagctctgcaggcacagcccgtcctcaaccctgactccagggagtgcaggtccaaccccggcccactccccgctggccagcctcaggggtcggggtggcacagcaggcagtgcccatgctgagttgctggctgggcaccagccactgggtgctgtggcttggggcccgggagcaaacagacctctccttctcctgtcccacacgcccacccggatgcgcggtttgcccaggggttttgaccttcacgggctcccgtctgcacccggctgagcgaggaacttcaccaggagagcgcctggactccgaagcccgttctgtcctgagcctctatcgcgaggcagtgcccagcatggagctggaactcagggatgtgggggaaaaatcctgcccatcgcataacaaccaccaccgtctactgagagctca

SEQ ID NO: 153689 - DNA, 164 bp, Homo sapiens
catggtcatcattcccttgatgctgattctgtagcccctgtttgagaacgtcagctttcaaagaggatataaagtttatggaggacggagccccaaaaccagctgacttctggcttcagaaatgaaagggccagagaatgagatttgaaggtaggccccatctg

SEQ ID NO: 153690 - DNA, 234 bp, Homo sapiens
ctggttgcacaactttttggaatacaacttggcaaaaatcccacttataagaacaaagaccacagtgacacaaaagtgcaaaacactcgttgcagcttttaggtaagagggaaaaaccagaaacaaccaaaatgctccttggtggggaattagctactatgtacatcaacataatggaagcattaaaataatgcaggaggctgggcactggggctaatgcatgcaatcccagca

SEQ ID NO: 153691 - DNA, 548 bp, Homo sapiens
tcacagggtccctgaggctgaaggcaaagcagcatgaaaagtgacattctacagaagtgatcagatgtcctcgtatggatttctgcttttaaaattttggtgtaggagtttcatgatagtcatttgcttgctcacagaatcaatgctgttttttgttttgttttaactcctgggaatataaatgggaactccttggtgtattgttctcagacctgcagcagatgggtgccctttgaaggagctcccaccatctttctgtggttcagagaaagatgtggttatatggctttagaattgggtgccacatattggggacaaaacataggtaaaaatgagaagtctttccttagactaaggtttcactgtgataattgtaagaatgtgttagtatgtcttcaactcccatctttcatttatattgcagataacaactttgtcttttaaaaagttttgagctttaaattattgagataccagattaccaaagaaatagtttcacagaacaggtataaacttgatttgtccagtttgactaaaacagcttttca

SEQ ID NO: 153692 - DNA, 382 bp, Homo sapiens
agaggggtcagaaggtgagggggacgcgagggggagtgccccaggcagggggcgccacggctgcaagcaccacagtcggggaagccctcacgcagttcccatggtctccacgcactcaaaaacttgggggacctcagggagactccagcctctaccgcgtgccagtggtttcccgcctctgtgccaggcctacttctctggaccatacgctcctcatgggcagcaatggctacttgggctttgcagccggcaccctggggtttagcccggttcagagctaggcacacggcaggctcgaagggagaccacacacccacagaaaacctccctctgagaagcgccccatgcctcaccgcagacagcgggcaggcagaggctgggg

SEQ ID NO: 153693 - DNA, 454 bp, Homo sapiens
aacccgggaggttgaggttgcagtgaactgagatcccgccactgccttccagcctgggtgacagagcgagactctgtttcaaaaaaacaaaacaaaacaaagaagggtatttccagatatagctgatgtagtatttgcgtgtctagaggaagcctcactcttttcctagtgtcaacataataattgctgatgtgcttttcaactttgctggaggctctttccttatctcgtgataaggtgtttgtgagtctctcattcgtcttgttggccgccttgttattgtcctctgtgtcccttttttcctcactggactgatttgaatcttgctgattcactagaggaagtggaatgttccagcagtgatcagacattgaaagggactagccttgctgctttgcgtctggttctcctcggctttcctctcagcaatgagtcctcgtatgttctcagtggt

SEQ ID NO: 153694 - DNA, 320 bp, Homo sapiens
attgccaagttcattattcagattcacaattggggtaatgtgtttcccttttgttcactcattcattcactcaacagatggtacttgggaacagacttgcgtatgcaactgagttattcattcatcatagtgactgtgcacagcaggggcctttataagtgagtggaaaatctgcaactctaaaccactaacaaaccgttctgactcagggaccatcaaacgcgggagtattaggcagggcctctgccttgaagaaggccctggatttctgagtcagctttcttcctactccttcggtacatccctggaggtagatcatg

SEQ ID NO: 153695 - DNA, 269 bp, Homo sapiens
tctactatattgtaaatgctgagtgatggaactaaaagactaaaatagtacccagttaacccagaaatgcatagtttgcacgacaggtattgaggacatgaaagacttggagcagagagtggggtggtggaagggaaggtacagttgatagtattagcacagaattttcaacactaataaacaaatagctcacaataagaagtgatcaagttaggacagaagttcttagggggaaacacagaattcatagaaggatttttttttttttt

SEQ ID NO: 153696 - DNA, 550 bp, Homo sapiens
ggcaactttagtgtcgttattctgaagggcaacattagttaaggcaaagagcagcaatgtatacttttggaagtctatgctttgcaaaagccattttggacatgatatagcaggtaggaatattttctgtccttgcatatgactctgcaggggttccagctccatccttcaggaagtagaaagttctttggaagtgagttccttcaccaaatgttttgccaaaaaacttaggcccatttctgaaagcttccttgaagcacctctggatttatgaaggaggcactgtttgctaagaccacacatgttttattgctttcagcacaagtaaaatgaaaaatgttggaaaatttgtatacatgcttgccaatatgtggtgctttagaaattacaaataatatttcttgtattggcaagatagaaactccgtatcttttaatataatactatttttggcttctggagttaagtcatttgaatttcctgtgggaaatcatagagtcaggtttaccatgacagtttaaaatctgctacacactaatggaaataactt

SEQ ID NO: 153697 - DNA, 219 bp, Homo sapiens
cataatgggcttctcttgacctaataattctctctagtctaggtctcagccttcatttcttcatacatctttcttcaataaatcccttccctaaggcttcaatcttaaatggatgcaaatgaagtcgtataattttaaaacccaaagggcccacaaatacagactgtcttcttggaaactgatgcccagagagatgagtgacaagctctgagtcaccca

SEQ ID NO: 153698 - DNA, 510 bp, Homo sapiens
aattagctggacaggtggaggtggaggatgtcccaggccaagtcctgggacatttgagacaggtggtgggcagggctgtacttgcttcctgattttttgggaactgcacacccagcaaggttcaaggcctggcacaactaggccagcacctctgttctgctaggtgcgaagttggaggtgtttgctgcatttaaggtatttaggctgggggggtcctcctttctactgtgttttccccacaaggccccaggagtccagttggctcagctaggaatcttagctgtggttgtcggggtaggtggccttgctgagggattcaaaacagggccctgtcctctgggcctctctctgtctccacccaaactgctccttgggcccaggacctggcctggaagcctgcctcttcttcccatcagcattttccccggggcttaagttggaacctgtgggtgtgtgcccctcctgggccccgttttcccggctgcctgtcaactggcaccaacacccggg

SEQ ID NO: 153699 - DNA, 399 bp, Homo sapiens
tggcctggtacttctcatctgataatacatgtgatgttaccagcacactgtatcgtttaaacatttattttcacttccactggcttggtaacttgaaccattacaaaatggctcatcaatggttttgatgatttcagagaaactgattttggaaacattggctggacctctccagtcatcagattaaacaacagcctttgggtttcaaatcatcactctgtaggatgcatctacctttcccaaaactcccttccaccctcccttccttctttcattcatttttagcttattcttatcccaaagcacaatattccatctggtcttttttctacagttataaaagttggtagtgtcgacaactctaattaaaagaagcttttaatgactgaggcaggagag

SEQ ID NO: 153700 - DNA, 500 bp, Homo sapiens
aggaaaaagtgtgaagagtaacaagaatgtgaccaccacttttccatgttttcttttttgtataaatttgattcttgaactgtataaatcagctaagtgttgaaaataaatttaaaattagaaaacagaacatttatatagatataaaaacaataaaaccatctatatcaatacaattatactagtaatttttgtgaaatacagttttcagttaaaaggttaagattagaaattttggaaaaatggaggtaacaagtagcaggcagtttttaggacttattgacatctacatagaaacaaatggagcactacatatcaaaactaaaatgaaattgacaatgtgtacaacaaaacttgttgacaaagtattcccacaaatctcaaaacataagaatggaaacaaagtgtattaataggcataaaactggcgtgttatcaacatctaggcaggagaatacagaggaaagcagaggctgtctgacagatcaaataacaaggct

SEQ ID NO: 153701 - DNA, 286 bp, Homo sapiens
ggtaagtgaactaagtgaaatctacctaattaaggtcacatgacagagtaaaagttactcaaatgatcagtcacttcggttttccaatttattttcccaatatatcacaccagggttaaataatgatacagggagctatctgaaagatttgatgtctataaaatgtcctctgtggccagacacggtggctcacgcctgtaatctcagcactttgggaggctgaggcgggcaggtaacgaggtcaagagatcgagaccatcctggccaacatggtgaaatcccgtgt

SEQ ID NO: 153702 - DNA, 618 bp, Homo sapiens
tcccccatgccaccctgcgcctagacctggctgggcgggaactgactgactacctcatgaagatcctcaccgagcgtggctataggttcaccaccacggccgagcaggaaattgtgcgtgacatcaaagagaagctgtgctatgttgccctggactccgagcaggagatggccatggcagcctccagctcctccgtagagaagagctacgagctgcccgatggtcaggtcatcaccatcggcaacgagcggttccgctgccccgaggcgctcttccagccttgcttcctgggcatggaatcctgtggcatccacaaaactaccttcaactccatagtgaagtctgatgtggacatccgcaaagacctgtacaccaacacagtgctgtctggcggcaccaccatgtaccctggcatcgcccacaggatgcagaaggagatcactgccctggcgcctagcattatgaagatcaagatcattgctcctcccaagcgcaagtactccgtgtgggtcggtggctccatcctggcctcgctgtccaccttccagcagatgtggatcagcaagcaggagtatgatgagtcaggcccctccattgtccaccgcaaatgcttctagg

SEQ ID NO: 153703 - DNA, 479 bp, Homo sapiens
taaaactagaacagcagaccggctcctacccaggtcaccagctccaagactctcaaactagaacagcagcactgacttcttgccaggtctccagctccatgaccctcaagcttgaaccgcagcaacagctccacccaggtctccagctccacaaaccttaaacaacagcaccggctcctccagaggtccccagctacagaccctcaaactagaacaggagcactgactcctgcccagatatccagctccacgaacctcaaacttgaactgcagtaccagctccttcccgggtctttagctccgtgaccctgaaaataaaacagcagcactggcttttccccagatccccagctccacgaccctcaaatttaaaaagcagcaccagctcctccctgggtcagcacctccatgaccctcaaacctgaactgcagcactggctcctccccgggtcaccagatcccagaccctcaaactagaa

SEQ ID NO: 153704 - DNA, 654 bp, Homo sapiens
ggcaccaagtgtggaagtggaaggccacttagaaagctattgcagtagatccctgattcctgactcctagaccaaagctcctttcccaggtctctgctgcttcctctcacacaaggactccgctccagagaaaatagagtaagtaaaaagcatgtgaacttgtcgtagttactggaaattttcttaaatgcaaatgaaaatgagagagacgggaaggaaaaatcattgaaaaaattcagactgcagcagcagcctacctgaaaagtcacagcaacaggcaaaaaataaaacaaccttgggaaaacctcaggttgcacctggacagatagacagctttaagcacagataaacaagcacaggagtgggagagtctcgacttcatactcatacaatgggccccagtaaaaactgtgagacttaataagtacattcctttccgtttaggcacactaagatacggaagcgagaagcttatacagggagggtggggggatgcctgcagctgcaagaaaatgtctgggaacagacacagaaacttaagcgacacaaagcagcacagagcagcataaactaaaagcctgcttatgtgatcaaggaattgggtaaaggctgttaggaactctgctctatgccgatagcacacctggtcccaac

SEQ ID NO: 153705 - DNA, 463 bp, Homo sapiens
gagattgaatactaggatcagagaaaatatgctagatttaagtatattttactttgtcaagaagaacaggaacctggtaatagaggagtaattttaattttgtgatcaggaagggtttacttaatggacctctactgataagaacaaaataaaaacattcagatgaatgaaaaatcttttaatagtacctggcaatttccaaagtattctagcaatccttatcacatatgaattttatatctaatctgtgactgaaaacagggaaggtattttagtcccagtttaaaaaatgatgggactgagatctagagattagagcttacctaaggtttcactgttagatacaatagagctattattcaaactctggtccagtgttcattccaacagcatgatacactgctacttaaaataatcttcatcctctacaccaagcccagtggccattatcttgcttgaatta

SEQ ID NO: 153706 - DNA, 343 bp, Homo sapiens
ttgttaaactcatttgctttgaagacgacttgagtttccagtaagctctgtgactgtttaagagggttcagtctttcagccttgttacaaaagtaaaggtcattcttagctgaaacagttacttaaaactccaggaactagtctgagaatcccagctcttacaataaagtctagagggaagtcattttataaaacaacgataaactgaaagaaagctagtcaaatggcttttgtctgaatacccttaaagatctttgtccattcaatcttcttttcaggaaacttgatctgagcctctatccagacacccagttatacggtaccagttagtggaatatgtagg

SEQ ID NO: 153707 - DNA, 377 bp, Homo sapiens
ataataaattaccacaggcccagcatggtggctcaaacctataatcccagcacttcgggaggccagggaggaaggatggcttgaggcctggaatttgagaccagcctgggctatatagccagatgctgtctttacgaaaaaataaaataaaataaattgaaaaaaatcacaaacttagtgccttaaaacaacacaaatgtattgtcttatagttttgaaggtcagaagtctgaatgggtcttataggctaaatcaaggtattgtcagagctgcattatttctgagaactctagaagaaaatctgttctcttgccttttccaccttctagaagccacctgcattccttggctcacagggtgccttccttcttcattaa

SEQ ID NO: 153708 - DNA, 118 bp, Homo sapiens
cctggttgcctttttttggggggtaagaacacttaggaccgaccctcttaacaaatttcaagtacagtactattacctgtagttgccatgcttacatgttggaggtgcagaactcact

SEQ ID NO: 153709 - DNA, 548 bp, Homo sapiens
ctgccagagtcccctttggtgacactacaccaactacaagattacagatctctcatcttccgtgctcccctaaaaactcctacactctgaggtcacagcaacccaagcaaaaaggggagctctaacaagtgaggcattccagtgtctagaactaaagattctacaggaagatgcattaaacatgtacttttctgccttccatttctcttaaaactctgcacatcattaacaaaatctaaaaagtgagataaaaataaattcactaataaacgatacctctgaaggcaagaaaggaccttaaacaacatccgaactagcacagacacttgtagtttatagatgtcattgaataaatattataagtttattagaaacaggccgggcctgatggcttatgcctgtaatcccagcactctgggaagccgagatgggcggatcacctgaggtcaggagtttgagaccagcctggccaacatggtgaaaccccatctctactgaaaatataaacattagccaggcgtggtggcacatgtctgtaattccagcta

SEQ ID NO: 153710 - DNA, 352 bp, Homo sapiens
gagggagacagggctgaggaagtggagagagtgagacaggcaaagggaagcgggaagagtgttccaggtagagggagagtctgagcagaggcccagagactgaagagacaggcacatctgagaagctgaagggagtccagtgggtacgtgcatcaggacgcatgctgggaggtccctggggtggggttatgaaaggtgccaaagagactgaatggccacacagagcacactgaagccactacagttgcatattcagaaatgcctgagttcctggacctccaaggccaaggaccataatgttcacggtgagaagacaccagaaccttcagaccctgcccgaagcccttcttcc

SEQ ID NO: 153711 - DNA, 323 bp, Homo sapiens
acctgctccaagaacttgggcatgttttataatctttccaaccgcctgccctatctgtaaaatgggcatgataatatctgcttgataagtataatatcatacatctcagcaatttccaagctcagaatgcccatcacatagcaggaactcaacaataaataatggtttgctatgtatgtcttttagtttggtataagaaaagctaaatcggccgggcgcggtggctcatgcctgtaatcccagcactttgggaggctgagacgggcggatcacgaggtcaggagatcaagaccatcctggctaacacggtgaaaccctgtctc

SEQ ID NO: 153712 - DNA, 615 bp, Homo sapiens
taagtctctgtgtcgttaaaattttttaatatttagaggtcaaaccaaattccagaaggttatcaatgagaaaacgataaagtgatgttagatctctttaaagctttagctttaccaaaacacacaaatgttgaaagctatcagcaaatatttatggggcatccagtatgtgcaagtgactgtggttatgggttttcaaagaggtgtactccaagtgtgattcctggatcagcagcatcagcagtgtttcgaaactggcttaaaaatacaaattatctctgcttcccctttactaatcgaactctgcatgtggagtccaccaatgggtgatttaacaaagctctccatgtgattctgatatactttaaagtgggagaatcatggcttcagatgatgatgatgattattattagagggtcttgcactgttgcccaggttgagggcagtggcgtgatcatggctcactgcagccttgacctgccaggctcaagcaatactcccactgcagcctcccgagtagctggcatgccactatgcccagccaattttttactttttgtagagacagggttttgccatgttgcctaggctggtcttgaactcctgggctcaagc

SEQ ID NO: 153713 - DNA, 410 bp, Homo sapiens
ctgactgcccagattgtggctcccagccctaatatggcatacttttcacacagctgtcgctacttatttacaggtctgtttcttccaaaacactacaagccccttcagtgaatgaagattggagtttagaacctagatgctatgaagcagacaagtttagtgtcttgatggttggtaagacacacttctggtagcataaaaaggagcagcattctcccaagccctggagaattaggcagctaccaaatgagatattacagaaagagaactggactttgagccagaacgcctgagttcaaatcttttgtctagaacttgccttctctgaaccttaagagttctttcacctgaataagaggaaaggcaatctgtcttgcctacctcaagggctgttgtggggacaaaatgag

SEQ ID NO: 153714 - DNA, 264 bp, Homo sapiens
ttaaaaaatggaatgaggtgggattccctccttctcaaaaatgtttctagagctactaaaaaacttgcatttacaaaatagttgataaaaatagtcctctggaggccgggcgcagtggctcacgcctgtaatcccagcactttgggaggccgaggcgggcggatcacgaggtcaggagatcgagaccatcctggctaatgcggtgaaaccccatctctactaaaaatacaaaaaattagccgggcgtgatggtgggcgcctgta

SEQ ID NO: 153715 - DNA, 396 bp, Homo sapiens
ccaagcgagccacagtctgcttaggtcccacaactggtaccaatggcactggggccaagccccacgacttctaattcccaggtcactgctcaccattcctttaactcctccactatgtcctcaccttggcttacgtgtttgtacatattgtcaatcctccatgcagattcaaatttgacttcatatacttccactcatcttggcagagaaaatggactttatagtgattgttttgatttctttctttgcgttgtaacttaggttttattatagcatatccagtaggacaaaagtcacattgaaagactattgtgagtgaaatccagtctttgattgccttgcaaactaaagtgtacaattacaggtttgaagacctttcgatcggtcggccagggg

SEQ ID NO: 153716 - DNA, 162 bp, Homo sapiens
tgagagcttctttttttaaattaaatatcaagtttagagaagtctagagaacaacattgcaatgccctatgcacccgtaattcagctttgttaattcctatcactttgccatgtttgcttcagatctttttgtttggtttaataaataaatcattgcagaac

SEQ ID NO: 153717 - DNA, 388 bp, Homo sapiens
cctctctttcaggttgcaagccggccaatgccggtccacacaacaagtaagaggccgtgcgtggaccctgaactcgctgatcgctcagctaccgaaatgtctggcagaggctccgtcttggcttcactgtctcccctcagaaaagccagtctgagatcctcctcaagtcttggaccaaaggaaagacagacaggtgctgcggccgacatccctcagcctgcagtcaggcaccagggccccgagcctctcctcgtggtgaagccgacacacagcagccgtgagggtggctgccgagaagttccccaggctgcctccaaaacccacggcctgctccaggccgtcagaccccaggcacaagacaaacgtcctgcggtgacctgacagcccg

SEQ ID NO: 153718 - DNA, 486 bp, Homo sapiens
ttgggcccctcctattccctagaagacattccagttttcttacagctgaaaggtcctttggggatcatccaggttcacccctgagacagaaagactcactgacttgcctgaggccaaaccgcttttcagtggctaggacctaggctgtccctcctgtcctgtgatcaggtccctgctgcagtcatcctgctgttaggtgctagagacttgttaaagagaagacttaggtggggtggtagtgtgtctgctggctttcctgttgtctgaagttggggaaagcgtgttgcccagatgatgtgagcaattctgggggtggaagacaagggcgcagggaatatcaaagcaattcaaaaaaacctctgacactgtgtaatggcttaggtggcttaagaggaaagctgagggtaatgtttgtgatttggaggctgtgtgattttaacaggagtttgatgtttgccttttcaagtaggagctggagattaaagg

SEQ ID NO: 153719 - DNA, 788 bp, Homo sapiens
gtagatgggactacaggtgcatgccaccatgcccggctaatctttttgtatttttagtagagatggggtttcaccctgttagctaggatggtctcgaactcctgacctcgtgatccccccacgtggcctcccaaagtgctgagattacaggtatgagccaccgtgcctggctgaacaactatttttagagcacttcctgtgataggtgagccctgtgctagggtctagaatacaaagctgaacaagagacatgatctctaggtatccttataaaggtagaaagtgttcatggtgacagattgggcacctgaagtctaggcttcctggagaaaatgttgttaaaattcaagcctaaagagatgagtaagaagaggcccactgaaagaatatttgttgaagtagtcaggacgtgagaagtgagtctcacaggcatcgatggggcagcattcattcagcacttgatgtgtccctggcactatcctggggatagaaggatgagtgagatatgctttttttctttatcataattattttagcaataatgtgaccttgagggaaaccacattttggaatcttgtatgatttccatctgttttctccaatggaatagtgcaaaatttttctttttagcttgcccctttagttggcctcctgctgtttctttttccttttggagggatatttgtaatacttagttcatttccagagagcggagacaggcagaccatgagcccaatggataaacaagtcttttcctgattaggttaccagttcaggaattttcagtt

SEQ ID NO: 153720 - DNA, 386 bp, Homo sapiens
agcgccagagacgtggacattacaggatggaggggtgagtgtagggcagatcccttggggaggggagcggtctactgacctgtgaagtgttagccttggctgagaagatgccttcagctgcaagtgacagatgacccaacaaatatggcctgaaccatgaggagtacattatctcatttcaaggatcaggaatagacttccaaggacccacccagctcaaggatccaggtcattttctccactagactagtgaccgtgtccttggttgattccccagtggttttatggctctggcagctgcaaacacaactcaaggtggccaaagacagagctttctccccttgtccctccgtcggggaggaaaaccctccctatgagtccctgca

SEQ ID NO: 153721 - DNA, 197 bp, Homo sapiens
tgaagcctcaccggtaaactgtctaggtagtgatttgctacataaatttaatgccatcatgcaatgtaatgggaaaggtgtttttattcccctgacctgagaccaaacttcaaactttctattttccctaattgagacttgtcctctgaagaggatgcaacctcaagtgatgttccaactacttctaatgactgatg

SEQ ID NO: 153722 - DNA, 451 bp, Homo sapiens
caccactgagctgccacgtcctatcccacatactcccttggatgtccaatcccagtctgtagccattccgggccagatccccacctggctgaggtgctcactgttgttcctgccctgcagggctgagagtctccaggctcaccgggggagctcttatctcacctgcctccccctaccccctcctcccaggcacaattcaggtcctcagcctgctctgtggaggtgactcaggctgccagagttcacaggggtggtgccaccaccaccaaaaccgatccacccgcctttcctcaacaggcccacgagtatcttcctagcccctacccagccactgagtagatgaggcagcgggggtgggggcgttgggagggggtcagcgtgaattaccattttgaccttcaggtgagccacagtcttgggcttcattagcttcagtctatactagcacttc

SEQ ID NO: 153723 - DNA, 309 bp, Homo sapiens
atgaatgatcctgtcatgcaggtagtaagtatagtacccaaaggtttttcaacccttttcccccttccttagcaaccccactcagcagtctccagtgtctattgttcccaacttatgtccaagtgtacccaatgcttagctctcctgaggcccaggagagctgatggtggtgttccagtgtgagtccgaaaacctgagacccaggagagctgatggtggtgttcccgtgtgagtccgaaaacctgagacccaggagagctgatggtggtgttccagtgtgagtccgaaaaccatacgcccaggtaagca

SEQ ID NO: 153724 - DNA, 210 bp, Homo sapiens
ttactccattttttgaccttctcttttatctactctggggaaaagagataccaggatctcatccactgctctggctcctgcaccacctttgcctcaagcacaccctgcatctcctgtctgaagccctcacctgtctccaagacccctccctccttttctcccaatgagacctgctcctccatgaagtcagcccagccatgactccaggaa

SEQ ID NO: 153725 - DNA, 272 bp, Homo sapiens
aaggacattggatgtaagtccagccctcattctacaggaactggggacccagaggattcaaatggcttcccaaggctccacagctattgtgcagagccaggactagatcccaatcttgcaactccacctggtcccaagatttcaggaaagaagctgctcacagggaagacttggaactaattcatttccgggaaagacacagccgtggaggcctggcagggtatagagagtgagggcatggcagcttcggtttcttccccatgtcttactca

SEQ ID NO: 153726 - DNA, 727 bp, Homo sapiens
gtgcatgccatcatgactggctaatttgatttctttagaggtgtgtttccagggctggtcacgaactcctgggctcaagcaatcctctttccttggcctcacaaagcactgggattacaggagtgagccactatgcctggcctttaagatcacgtttgaataaaagattcctcagctacaatgtagttagaaaaccaaatctcttgcctacccctgctttttcctgtaaggaaaccctggcctagaggtgccaccatgacattggaaccagcctggagaactcaggctccaaaccaacagtgcctccctcctttatggcccagtggcctaggcctggggtcagagtgggggcttcatggcatggagtccattttccttcttgtcactctgtatgatttgtgtgatactttttcttccatttctgtttcgtgtcagtctcccttgtgggacactctaaggtccacaggggcaggaatcacatgttttcttatccacagtgtctccagggcctgccactgtggctggtacacgataataacaggaaacacttggaagatgctcactgtgtcccaggctctgttccacatcctgcacacacattcacacatttaatatggaaccctaactcaacatgtgtgcagaattaaaggcttcacgtcacttctgcatctgggtttcttcacctctttgaaccacagcgtcgtcatctgtaaaatggggaatagca

SEQ ID NO: 153727 - DNA, 231 bp, Homo sapiens
catgattgctacaccggctcctttacatgggctctgatgtgtaagttctgggatctcctgacctcgtgatccccccgcctcggcctcccaaggtgctgggattgcaggcatgagccaccacacccagcctgtacacgatgttttgagcaaaagctcaaggatcaccctagaacccaggcagcagggtttagacaaggggttgggggagaggatggtgaaccagaaacaggg

SEQ ID NO: 153728 - DNA, 393 bp, Homo sapiens
ttgtggttgtggtgggagagcatgggccacagaaagagggaatggtggtgtcagagagtggaatttacagtcatagcattttcaagtattttcatgttccagtgtgtgatcaagagagtggactactgaggcgaagtgaaggtgaatgtctttggaattcaggagaaatcgtgagattaaagtgatctgtgtcatcccctcatatgttaatgtgtcttgcaaacatgtcaggatctcatgatccaacactctagagctgttgccggtataaaaccaatgtttcatttcagtttcttttgctgaactacctagaatctatgcaaccagtaacatgaaaggagtaagatttagtctggttttgtgttgctataaaggaatacctgagactggggg

SEQ ID NO: 153729 - DNA, 150 bp, Homo sapiens
agaagaaatgacgtgtgattaagtgttgttgcagagtgaagtataaggatgctattgggaaggaaggcagttaagcagcagagcacataacccagtctgtggtagggtaggtggggcagagaaggctttctggaagaaaaaattacattg

SEQ ID NO: 153730 - DNA, 245 bp, Homo sapiens
ttctttcctttcctttgaagttaagcaccagaattcctcaatattgcctacaaggactatcatggtcttaccctatctacttttccagcctaatttcatataacgctcaccactgggacatcttcatctctcttccattcattcacatacacttcattttatgtcttcatttcctctgcttcttaaaattcttgctttataaaagaaaaccatcatggtgggcagacacaaattggggctgacaa

SEQ ID NO: 153731 - DNA, 608 bp, Homo sapiens
tacttgttgccaactagcagaccatagcagaaagtctgtgatatctgagggaaagatggagaaagtcttcatttctgcttcagcagatttcagttagtctctgacagttggggggctacacatttgggagcaatctcctcagtaatttcttggatcttgctgtcagtaattccagtgagtcaagaccatgccttgcttctctcatgggttttgtaggacccaatcacagtttctgttcaaatagccactgaaacatctactcttttctacacttcactgtaagtgtgttagaacacagtgcgttttcattcctctttatatctttttatcctgaccttctagatcttatttcccatttcatttatttttattgtttatttttcaagacagagcctctctctccctctctctgtcgcccaatctgcagtgcagtggcacagacatagcttactgtactctcgaactcctgggctcaacccatcttcatgcctcagcctccccagtagctgggactacagttacacactgtcacacccagctaattttttaaaaaattatttgttgagatggggtctctctatgttgcccaggctggtctcaaactcctg

SEQ ID NO: 153732 - DNA, 176 bp, Homo sapiens
cacctccctccatccagtgtctcccttgcaggagactcttccctcctctactttttccctgagtgttcatcctgctccacaaaatcatgttctcagagaaggcatatattttaattgagatataatttaccgtaaagcccataatttgccaggtgtgatggatcatgcctgtaatc

SEQ ID NO: 153733 - DNA, 439 bp, Homo sapiens
attactacagctctgccaacgggggagacagaaaggtgcacattcatggggattgggggtgaattttcaaaagacacacagcccattctgattaccaccatagcaagccacttacgcatactggtggttacagatccctgaggtgtgtgtgaggtagcacaaatatgataaaagctgcttttagaggctcttgtgatactatgtaatcagtcatgttcacaaaataaatagagttaaaaagaaacttagttttcacttagttgagccctcccctacaaataaatgaagcccaggccagcatggtggcccaggcctgtagtcccagctactcggaggctaaggtgtgagaatcgcctgagcccgggaagatcaaagctgcagtgagccgtgatcgcaccactgcactccagcctgggtaacagagcaagaccctgtttca

SEQ ID NO: 153734 - DNA, 571 bp, Homo sapiens
agttcatttttgtgttcccattttctaaaaaaaaaaaaaaaaaaaaaaaaactcacaaaaaaagcccaagcctttgtggggtctgagtcgtggcgagtgcggcaggtgagggtgcgcagacccacgaccccgcctctgcgctgccgcccccccttcctcctggcggggccgtgagtctggaaaccatttcccttcattgccttggcagtgctccagccctcccgtgatgatttccctgtggctggtcgggggtcattcaagtccaggtgtgccttgctctttaggcatgatttagattggaatctcctgccttctctgaagaacaagtgctttctgtccatacctcctgcctccccaaagaaaagaaaaaaacagacattaaaagtgaggctcagccagcaggaatttatagtcagagttgccccatgcatgtcaattatgcttaccttacaattttagaacacggagtatgtatttcaccctgtatgcccttgtctggaaaataaaggtaattaaatctcatgccgtcatgatttgaacccaaagcagcaatgtaaaacaaagccataca

SEQ ID NO: 153735 - DNA, 464 bp, Homo sapiens
agagagtagaatattagcccattgtaatgttccgaatgtcagcctttggccaccatcacctatgagcacggctgctgctcttagtaatcattgtggtcacttaggatgaatgggatagaatggttgtccaaagtacataagtctttaaggagttaaggacttgcatcatattcattagccccagtattttaccactgtgatggaaacatagaaggtgctcagatgtttattgatctcaacatcaagaacagaaactactatatgaatctagcatacatatggcctttaccgccccatttcccattcttggctttaacaaaatttgacaaaattatttcctgtatttcttccatattgtcaagcgtgtattgttttatagctagaaaacctattatttaggtttgattttggtgtatttactgattgagcatgactagaagaatattcgaaaggtctttgtgaaa

SEQ ID NO: 153736 - DNA, 763 bp, Homo sapiens
ggtcatgaggccagttctgccattgtgtgatctgtaagtggaggtcttcttctttgggcctcagctataaaataaatgagtcatgttactgtggctttgtttggttttgttgagacagggtctcgctctgttgcccaggctggagtgcagtggcacaatcagctcactgcagcctcaaccatctgggctcaagtgatcttgccacctcagcctcccgagtagctgggactacaggcacgcaccaccacacccagctaatgttttcattttttttttttagagacagggtctcactttgttgcccaggctggtctcaaattcctgggctcctgtctcggtctcccaaagtttcgggattacaggcgtgagccgccgcacctggccaggttactgttggtataggaagtctacccgcaagtttagggagctggaggcagccctaacacggagggaagcattgtcttctcatgccaggtttagctcccaccattagccgcaaattttatgtatttatttactttttgagatgaagtcttgtgctgtcgcccaggctggagtgcagtggtgtggtcttggctcactgcaacctccacctcctgggttcaaatgattctcctacctcagcctcccaagtagctgggactacaggcatccgccaccacactctgctaattttttttgcatttttagtagagacggggtttcaccatgttggccaggatggtctgaaactcctgacctcaggtgatccaaaagtgctggg

SEQ ID NO: 153737 - DNA, 841 bp, Homo sapiens
gacaaatccaagggtgtgaggtaaacgagtgtctgcatttagattccacaaaaccaaaatccatgttgaacaaagttaagtccgtacacagtgactttttgggtgagccgtgtgtgtctgtctgttgtgtgtgtgcctcaagccctgttttcctgtgaagatactttgagtggcagccattctctccacgtgaaccacacgtctggagcacagacaggcctctcaaggtcattgatcttacgcatttactgtttaccgaacaaatgtctgactgtgtactcgggtgtactccgcagcattgtcgactgcagtcccctgtgtttgccagagatactgtgctcgaagtagaggttttactctactcatcactgcgatttgcacattgctccgtggacactcggaggcctgcgttctgttccctataaatggaagcgtgctctgagcctgtctgcctccctcggctgctgctggtcctcagtaccagcgcccgggggtgtccacaaccacttgggacagaagaaggtggaatttcagacagaagcttgactgggtcttcaatgacaggcttggactagctgtggcccagacatcggccctgcccagaattgccaggaggaggctttgcaggctctagaggagccgcagggcctgcctgcctctggtgagtccaacaggcacaagcaagctggcgtgtggccagaggtagccggagtgtgtcacagcccctcagatgcctttccttccacctttttttattttttaagaatcccaaataactcactgaagtgtctcaaaggcgaacaagttttaccaaaatgaatcctttttcagttaacagatc

SEQ ID NO: 153738 - DNA, 177 bp, Homo sapiens
tgagcatttgatcagtggactgagtgaagcagcttggcccacacagtgtgtgtgggcctgttagaaataccaaaattgttagaaatagataatcggtgctgcgaagaagagtcagcacagagacaaaagatctctcagcaaggccatctttactttctgcagaaagggtgctcaact

SEQ ID NO: 153739 - DNA, 160 bp, Homo sapiens
tcctccaaaggctccagggagggtctttccagctgctggtggctgccagaagcatcactctgatctctgtctcctccttcacatgaacttcttccctgtatctctacgtccccactctctctgtctcttttttttttttttttttttttgtgagagagtc

SEQ ID NO: 153740 - DNA, 334 bp, Homo sapiens
ccattccatctttaaaatcttacgattccacagaggaagaaaaaggtgatctttatttggaagaaaggaagatcttggtttgatatgtaataggaaagtaacaatgctattaggcaaggttgtttaaatatgaattaatgcctatcccattatctagattgggttaacaccctctggtgatattatatatcagtgtttctactgaatactggataaacgccaaacttctctctggcatttaaggctttccacacctgcccaactttatctcaaacttctcatggttcagacctctaaccctctgctctagccccagtcctgtttccttatcacc

SEQ ID NO: 153741 - DNA, 174 bp, Homo sapiens
gctgaggaagatgctgcatgaggaaggtcggagcaggggagctgtcaatgtgggggcagcatgctgagtcatctgaattttgtcacctttcttgagatttcaccaattagagattacatgttttaatatgtccttttcagtatgaagaatactatattcagggggctctgagaa

SEQ ID NO: 153742 - DNA, 292 bp, Homo sapiens
tcagaaggatgcaaaaggaaaaacaattattaaagacgaggatggcatttattcgttcttataaaaataatttatttagtagctgcagtctctgttctctctggctttccctggaaaaagacaccactccagactgtccagggctcccctggtacctgtgaatgtgctgttagttcctggtctggttagaagatgatgtctctgtggagatacatacttggcctctttctttctccctggggtgagggacattttatgtataggagatggaagaatagacggtctctttctc

SEQ ID NO: 153743 - DNA, 552 bp, Homo sapiens
tcttcaagcaaagtgttttgaaaacaaaagtcaggatctgtattagtccattttcatgctgctgataaagacacacctggaactgggaagaaaaagaggtttaatggacttacagttccacatggctggagaggcctcacaatcatggcagaaggcaaggaggagcaagtcacgtcttacatggatggtggcaagcaaagagaagagagcttctgcagtgaaactcccattttaaaaccatcagatctcgtgagacttattcactatcagaacagcacaggaaagacctgcccccatgactcaatcacctcccactgggttcctcccataacatgtggaattcaagatgagacttgggtggggacacagccaaaccatatcagggtcttaattaacatctggaatatagcatttcaacctaattaggactacacttcgttatacacattatctttttggaatttttgtggttccaaaagtgctgaatattttcatgtaatcttaagtgctataaataagaaaattaatactttctgccgggcatggtggctc

SEQ ID NO: 153744 - DNA, 449 bp, Homo sapiens
acaggaggctctcaataattacttgttcaatgaatgaatcttagatttcatactaccttttcctgacttcctagactagatggcaaactcttttatttacttttagcaactgtaccttccctttgaaacatttactgcaactgtaattacaaaactgtataatgtaatcttgatcttattctctacaggttgggcatccctaatccaaaaatctgaaatccgaaatgcttctcaatctgaaactttttgagcatcagcatgatgccaccagtggaaaatttcacatgtgatctcatgtgatgggtcatagacaaaacacagtcaagaccgggtgcggtggctcacacctataatcccagcactttgggaggccaaggcagatggatcaccggaggttggaccagcctgaccaacatggagaaaccccgtctgtactaaaaatacaaaat

SEQ ID NO: 153745 - DNA, 190 bp, Homo sapiens
tgacttacaagggaggtttctgtccagcaatactatacatcaggaagttggggtaaatcattcacctcctggaacgctggtgccaagggactaatacttaggcttatgttgcaaggtgctgtgatgctgtgaattgcaatctcaaattaggcactagattaattgtttcctggagatcaaaactctagta

SEQ ID NO: 153746 - DNA, 515 bp, Homo sapiens
ttcctagagttccattcctacctccttacttccccaatgacacacccactttcatcatttctcctacaggtgattaagtctaaactgacatttacctaagtcctcattgtctagttctatcttgatgtccctttggcctcctacatatctcaccacaaacattttttgctatatctccaaccttgctcagttcaattgcttaagccagaaaccagtcatccttgacatcctttccttctcctgtactccattagttacaaatcctgtcgatcctacttcagaaatatcctgtactacaagcatccttaaaaaccttagcttaggccatatctctcttaagaactactacaacagcatttatttctctggtatcagtctcttctaacctctaatctattcttaaaattatcttggttaccttaaaaaaaaaaaaaaaaaaaagacaggtgccgtggctcacgtctgtaatcccagcactttgggaagccaaagtgggcagatcaccttaggtcagg

SEQ ID NO: 153747 - DNA, 381 bp, Homo sapiens
  misc_feature (364)..(364): n is a, c, g, or t
cattgtgccaggtgtttaacacacctcattttaaccctactatcacctattttatagaggaggaaactgaggctcagagaggaggaagtgaccctggacaagtcacttgacctccctaagcctgagctttctcattgtttaaagaaaggaataaaatggtgtgcttgtgagacagagaaccggggtagcacagtgaaggtgctctccaaggaggtgcaggagttacccatgtcccctgctcccgcctgttccgggcaggaccgtgctcactggtgggcacgggcaggtgtccaaggcctggactgcttcccttccacccttggcttcaggatggcagggtggttctgccccaagggttaaggcntcccggggtaccgagct

SEQ ID NO: 153748 - DNA, 561 bp, Homo sapiens
gaattgcttgaacctgggaggcggaggttgcagtgagctgtgagatcctgccactgcactccagcctcggccacagagtgagactcggtctcaaaaataaattcataaataaataaaacaaacataaaatcagacttttacatgatggcaattaatccgattttctttagcactgcaggccaaccagatttgggttttacgtggatctggcccgaaggcttcctgtctcagacttcccgatctagggtttctgttgctttttgtacatgctgcttcactgctgtttcctctcactgacagcctttgaaagcatatggtcttcaatggttgtataaatttccatcatgtggataagccatcatttacgtaatcattcttgtactgttggctttgtggactgtttccaattattccttactaagtgctgggattcggatttaaattcgctggcccatggtggctactgaaccctgctgtgaaccagcagcaccagggcagccagagaaaatgtggatttccaagctcggctctcaggctttctgaaccagaattgccaagggg

SEQ ID NO: 153749 - DNA, 318 bp, Homo sapiens
cccacagggtaggatgagtgagaatggatattaggaccccgtgtcagtcagataagctgctactcctgggagcacagtttctgagaagttacccaagctcaatgtctcgaaactaaaaaaagggaaaaaatacttctcaaaatctatgccaaggaaaattatttcataatctgtattttggtattgtcatagtgaatggggtaagcaaataacaatacagacagcatgtgctttgttctaacattgccaaaattagatcagagtctgggataagatcactagcaacagacattgatttttcacatggtacctctttgg

SEQ ID NO: 153750 - DNA, 629 bp, Homo sapiens
  misc_feature (474)..(474): n is a, c, g, or t
acgggaactgctttgttcctgacagcgcagggcaggggccgttgaccaccaggaagtagcctagtacagtgggaaggactgggtctttgaagttggcccaattcaggtttgaacgctggctcacaccacttgccagttttctgactttggataagccacttaagccatctgggcctcaggttcctcatttgcagacatggggatgatagtatgaatttaacgagatatgaaaatgatacaactctttggagcagcagtgtggtgtagaaacagcttgggctttcgtgttagaatgctgttcagatctcctgtctgagccagggacacaggtgggcacagcacttgagcccaggagttcaagaccaccctggacaacatggtgaaaccccgtctttacaaaaaatagaaaaattagccaggcatcgtggcacatgcctgtagtcccaagtactcaggagatcctcccagctcggnctactgagtagccaggagtacaggcaggtggcagcacacatctcacctcattgtttttagatttatcctctgatcttttctagtcctttcttctcccattcttataggggggaagagggagtagggtgggcccctctcaggaaaagaaggcaaca

SEQ ID NO: 153751 - DNA, 231 bp, Homo sapiens
tatccccctcctgcctccccttcctttctctttttgtgaagaggtgctcaggcccttgatggggtcttctcgcccctgcaccaccctttgttattcatccttgagaggtttcctttttttttttttgccatctttatctctgtcccctactgccatgttctcagtatggcaaagggcagaacatggacttttagtgacaatgactcagtggctcaaaaagcctttttggat

SEQ ID NO: 153752 - DNA, 346 bp, Homo sapiens
actcaagcttttatcttgtctttctcagtgctgtttgcctgggcaaccaactgtaggatgaggggaaatgtctctttacaagaaagtattccagctaataaataagcaagaaatgattccactagaatagcaccatttgtagcccctcatgggccaacggcctcgggtgctaataagcctcagggactgctgatgtcacaaaggaaagacaggcaggcaggaggtgcctgctgaggctgagtcacaaccactaaggagctggcaaaaggggcggaacttatgggcctccgaatcgggcagcaccttgcagaaggacgggcctgaggaacacactgaacagcagcac

SEQ ID NO: 153753 - DNA, 392 bp, Homo sapiens
tttttttctctcttaagatgacaagaggagtaaagtgagaagctttaaaactgaggttaaaaaagtaaccaaagaattctttaggtataaggctaagagagagaagcaagggaaatatctactacctcaggggaagaaaaattgatggcagatgattactgaggagcaaatgctcatgtctttaatgtaatctttctgcagatcttccactgtgatcagatcaatagagcaagttttgtctgtgatgaaccaatcggaggagggaaggacatgattgcaaagttgcatacatgtaaagcaactgattcggatgacatatagaccaaaggactccggaaatgagtgaaaatttttgttgagacacaagctaatttctagaataactttttcct

SEQ ID NO: 153754 - DNA, 388 bp, Homo sapiens
ccttaagcaagttactgaacctctctgtgcttcagttacctcgttgctaaaagaattggcaagtgacactggtgttcggaaaaaataaagtaaatgaagatggcgatgatcatgataataccctcctcatgttgtggatattaaatgggtcagtaaatgtgaaatgaaacactcaaaacaattcctggcacataattaagtgctcagtatgtgttgccttttattaattcattccacatttgaatgatatttgagcatctactttactaggttatggaaattcaacaaaataaaaacagaccttgggccgggcactgtggctcaagcctgtaatcccagcactttgggaagctgaggcgggaggattgcttgaggccaggagttcaag

SEQ ID NO: 153755 - DNA, 362 bp, Homo sapiens
ttacggtcatcctcagttgcagaagtataatgtttatggctggagtcattttatttttaactaacattttttaaaaagattgctttgtaacaatgtgttatgagtcctttgtggtaaatactgctttttttttgagacgcagtctcgctttattgcccaggctggagtgcagtggtgcgatcttggatcaccacaacctccacttccggggttcaagtgaggctcctgcctcagcctcctgagtagctgggactacaggcatgcgccaacgtgcccagctaattttttgtttttttagtagagatggggtttcaccatgctggccaggctggtctcgaactcctgacctcgtgatctgccca

SEQ ID NO: 153756 - DNA, 474 bp, Homo sapiens
aagcacagcctcaaaatctgcaccaagatttctgggcagggaaaaagttatcatcaggaaggcacagacttgttagcgaaatgctctgacctagcccaagaaaccaggtgcttctctgctcctgacatcaggcttggccaggctgtcaagtgctccaaaaagtgctccaactttgatcctgcccatctagggcagaagctgaacggctcaacaatgatactactgagctgagagccttcagcaagtcttttccaagctgcagcctttgcttcttccctagtagagagtagctgctggtgataaccagtaaagaccttctaaaaccaggatttgaattctgttactactggagacactgagaatccggaacatggtcttttccacctcaggaaccatcaccataccccacctgaagagtagggcctcaggcagtttgagagtgaagttcccagggacttccagtctgagctgctg

SEQ ID NO: 153757 - DNA, 156 bp, Homo sapiens
accctttctcatcaccatcccctcatctgcccaaagggaatccctcacactctcagctgtgtccactgcactctatgtacagctcccttttaccacttaccaagttggactaagtagctttttccttccctcaaactccctgtgaggacagatgat

SEQ ID NO: 153758 - DNA, 193 bp, Homo sapiens
agacaggcccaagcataaacaactacaaagaaatataacctagttttaaaaaaaaaattgcctattttgttaacacgctactataacatctcaaatggtaaaaagatgccttactagtcttttcatgtattctctcaccatttggataaaataatatttacattgagtaaattcttcctcctcccctcccttc

SEQ ID NO: 153759 - DNA, 489 bp, Homo sapiens
tacgataacagcatatgttaaattcaatttccttgaccaattggataaatatattttggtgttacagtatggttgtttttatggtgagtaagtgtgtatcctacactctgtgttctattttccacctgggtggtgtaacatatcaaatgtttaagaaaaataaggacaccattctaaagagatcaggaagctattgctaaatgttattctgggggggatttcaaatagatgttagcgagatacctactgaattattgaggatatgaactgtacaaccgtataataggacattataaatatgtaggctggtatacacctgttttgagtaaacagtatatttttcttatcaatcttagttctatcttggtggtttgcagcccatgagaccaaagcgttttatgattaaacttaagagcctgggcttcagtggccagagatgatgcctgttagcatcatttagtggggcattggaatccgtgcgcagcccgg

SEQ ID NO: 153760 - DNA, 340 bp, Homo sapiens
tagctcatcctgagtcggctcagtctcttcttcagacttgtcctacaaactccccttttcagtgttgagccttgaatacatttatgtctgctgccacggctgagtcactgcctaggtgctgtgtccatactgtctctagaaggctgcctggccctgaggctgagaggaagcagcgtccagccagacaccgtcgggggttaggcttttaaagccaaacccccaacatatcccagtgatgactgcataagtgttatagtctaagataatcagagcagaatgtgcctttaaaaatcaaattcttattgatgtcttaagagaggaggagaagatggttaggtct

SEQ ID NO: 153761 - DNA, 280 bp, Homo sapiens
  misc_feature (260)..(260): n is a, c, g, or t
  misc_feature (269)..(269): n is a, c, g, or t
acgcgtctaagtaacatttttgatagcaaatgaaaacaaaagctggccaagaaactgtgtattaataagtcatttgattaaaaaaaaggacttggccaggtattgtggctcatgcctgtaatcccaacacactgggaagctaaagtaaaagctgaggagttcaagaccagcctgggcaacacagtgagacccccatctctataaaacaaaaatttttaatattatctttttacaaaggacttatttatatggcagtactntgggatccnctagtaacgcc

SEQ ID NO: 153762 - DNA, 492 bp, Homo sapiens
acgcgtctaagtaacatttttgatagcaaatgaaaacaaaagctggccaagaaactgtgtattaataagtcatttgattaaaaaaaaggacttggccaggtattgtggctcatgcctgtaatcccaacacactgggaagctaaagtaaaagctgaggagttcaagaccagcctgggcaacacagtgagacccccatctctataaaacaaaaatttttaatattatctttttacaaaggacttatttatatggcatcttcaagtatttcaaacatttcgtgtttggattatggaatatgtctccagaagaattaacactatttctatttaaggtaattttacatcatttcctttattagaagaaataacagatctgcagatggcattttgtgaaggctgccttctattaatagtgtacaaaacactcatatgtctccaaaaaggtgggtgagtaatcacaaagcaagtataactattcatcccaaaaggtagg

SEQ ID NO: 153763 - DNA, 548 bp, Homo sapiens
gaggcttggtggggagtgacatcttaggcggagtgagagggatgaagaggcatggaggacaagccatggaggctgctgtgtgtcagtgaaagcctttggactttgccccgagggtagggaagtgacatggtcagaccagcctcttctggccatgttcggggaacggaccatgggagatgtgagaggatgtgggcatcaggtgggcaagaggcaggggtctggatgaggtgttgggggtgccatggggagaagccagggctgcccctgggtgcaggtgggaaggaagaggctgagaggtgggactggcttgagattccgtggatagggtgagtgagggtcctgatggagcaggtgaggtagtgccaggagctgaggggtctcctctgagaccaatgcaaggaagtggccccctggggattagaatccagctctgacttcacagcttgtgatctttccacagcatctcagtaagcctgatgtcccgcggaggcctgggagtcccctcttccctttggctctactgagccctgcaggtctcctgggagccc

SEQ ID NO: 153764 - DNA, 295 bp, Homo sapiens
ggaaggtgacagggtcagtgatggaattcctcagacagaggaaagggaagcctgaatgtcattctagagtgagaaaaacagggtgtagggctttaggaatagtctgagggaagtagacatacagctctcagagaaagaaaggaatgagatgctctggttagcctacatcctctgccaccagtctccaactccaccacattctaacgtgtctctctcatgactctggaaataatggagctacctgttttaatatgggtcagcatgctttgggcttcaaagaaacctggccaggctt

SEQ ID NO: 153765 - DNA, 245 bp, Homo sapiens
acaggtgcctgccaccatgcccaactaatgttttttgtatttttagtagagacagggtttcactatgttggtcaggctgctctcgaactcctgacctcaagtgatccgcctccctcagcttcccaaagtgctgggattacaggcatgagccactgcacccagcctgcttggccagcttctaatcagatctcagctgaagtacttggcaggccgtcagaaacctttcacaccatccacgctgaagc

SEQ ID NO: 153766 - DNA, 323 bp, Homo sapiens
  misc_feature (22)..(22): n is a, c, g, or t
agtccatcccccttcgtctcgnccaagacgatggggaaaagtcactgaaggcatttcatggcttcacttcacagcactaattttctgtatgatcataacaaaaaggagtttaattggctcatggttctgcaggctgtaaaaaaagcatagtggcttggggaaatggcaggtaaggcatcactgtattttgcaaagtgagaaggacatgagatttggggaggcagggagagaataataagatttggttgtgtatccctacagaaactcatgtggaattgtaatcaaaatgttaaaagtggggccaggtggaaggtgatttaatc

SEQ ID NO: 153767 - DNA, 382 bp, Homo sapiens
ccatccatgggtaaatcctgctcagcaataccttcaaaatatccccgaaatgcaatcactccttactacctcccaatgtcaccacctgggtttcaaaccaccatcatcctttgcctggattatcctgccagcctcctagttggtctcccggcttccttctaagtctccctccagttgcccagatagcatctggcataaactttaaaataatttaattttattacatcattccttcatggcttcccatcttactacaaataaaactcaaagtacttcttagcacatttatgaagtcctacaagtacccccaacctcatccgccattctctcccttggtttccagagacactggcctcctgccggcctcactccaaccccagtc

SEQ ID NO: 153768 - DNA, 440 bp, Homo sapiens
aggagaaggatcgtgggagcaaggtcaggaaagatgaccagcaatgccggtgctagatgcagaggctggtggagaaacgtgacagaaaggaagccaaagttcactcagtgaactggatgcatggggctccaggacagcagtgttcaggcttgatgcgagaaatgatgacgactcggctggggaaccagctggccgcgtgggaggagctgcccgtttgttgactatctcctgtggtaagtttgttttgagtagtctgatcccactgttgtggctgcaacaaacgtttctgtacctggttatcatgaatacctcgttagctggagcccatggagcacagggtgctggagacaatacggcaacaagcaggcaggtgaagggtcttattcctcttgctctgtagccctcgtcaacgttttttctttttttagatggagtctcac

SEQ ID NO: 153769 - DNA, 572 bp, Homo sapiens
agaaatacctgaaactgggtaatttataaaggaaagaggcttaattgactcacagtttcgcattatttgctggggaggcctcaggaaacttacaagcatgggggaaggcaaaaggagaaacagacacctccttcaagagatggcaggagagcgtgagagctagagcaggaaaaaattccacttttaaaaccatcaaatctcgcgacactcactcactatcacgagaacggcggggcggtggggaattgccccggtaatccttccctccctcaacacgtggggattacaggtccctccttggcaagcagggattacgattcgagatgagatttgtgtgaggacacagagccaaaccatatcagtacccaatgtttatggttttatgtacttgtgaatggcctccagctggatctgtatggctgcaaagtacatgatttaattcttttttatgattatgtagtattccacaatgtatatgtactatgatttctttatctaatccaccattgatgggcacctacgttgattccttgtctttgctattgtgaatagtgccgcaatgcacacacaag

SEQ ID NO: 153770 - DNA, 258 bp, Homo sapiens
ttcaaggaagaatggaggtggggcgcatagctggcaagaaaccccgtgggaacaaagaaggtattttcgtgcagatcttcacccagaaagcctgagttggcctttcagtggatggtctgtcagtggaagccctctccttggttcccattgctccctgtctctttggattaatgatttggcttgtggacattgcccaagtctgagcgtgtgtggaagacccctgctggccggcaggcttctgggctgtctttgggtttt

SEQ ID NO: 153771 - DNA, 584 bp, Homo sapiens
attttttaaggctcaaaagatacaatgtctctactaagagtaactaaagtctgaattcttgatccttgaaattaggggacaacagggatttccataacctgttacacttcagttcaggatatagtttctctctgagtagctaattatttctgtacagctaaaagtctaattatttgctttgttgaaggagtacttaattactggctctgctgacatctaacaaactgtatttcttcttattttgaagatagtatccttctgtgcactctaaaatgttacaatttactgaaagctacgtgccaggcactatgcttttctaacactataccactcactttatatgttttgtagctaatttaatcgtgactctgaagcaggaatcattgttcgcattttatagaaaaggaaatggagggttggagatatcgatacacgtatacttaaaaagcgattatttccatcatttgtggccccagtgctcagcaagagtcctggaaatacggtatcttccctcaaggagctcccatacacatcctgagggcaggatggtatatttccaatgctcaggagatacaaggaggtgc

SEQ ID NO: 153772 - DNA, 304 bp, Homo sapiens
ggtccttcccaccatttgctgcagaggaactgcttctgtctcctccgcagagatggatggtatgctcaggcttcccaattagcccacaagaaaactgtgcttagagagtccacgctcctcccagagctagcctggggaaacgggagagctgacaggaagaggggaaagtggtcgggtaaggttgtatggaggcaaggttcacgcttcattcgagaggatccatgggagagaaagcaggggctgtgagaaccagcctttcctcctccaaaggtctctctgacacgctgaagggaggatcagagtg

SEQ ID NO: 153773 - DNA, 351 bp, Homo sapiens
aatctgagcgcgtttccgacagggaaatgtctgcatgtcttaggtggggacatcggcggccccctgcctgtccattatgctcgttctggtggggacattggcggccctctgcttgtccattatgctcattcttgggagatgtgggactgtttgttactattcaatctgatgtacagagggggcggagagagacccctcaaatgtgcaggcgtgcgtgtagagattccagactgactattctaatcctgttttgactgatttaatctggttttagtacagcttggcccaaaaggcttgagccagtttacactggtctcagctagttttaactggtgggctccatttgaacat

SEQ ID NO: 153774 - DNA, 134 bp, Homo sapiens
atttaaaagaaacaagattctgtgttgggttctgcttttagcttatggattttagacattgtccaaaagtgcttccgatgttgaatgtatgttgcaagtgttatgtagaaagaacatgcttatgctgttgtaat

SEQ ID NO: 153775 - DNA, 408 bp, Homo sapiens
gttatttttgtgattcctattcctgtatggacaccaaggctattgacattttctttagtttcttctgttaattctattttcttagtgtttatatcatttcatagataggatattctttattttttatttttatttaaatatttggtgattcttggttttctcagccatctattgtcaagtgttcttattaagcattgttattaaataaagattatttcctctaatcacatgagaatctttatttcccccaagtaattgaaaattgcaatgccatgctgccatgtggtacagcatgggtttgggcttgctttcttcttttttttttaacttttattttaggtttgggagtacctgtgaaagtttgttatataggtaaactcgtgtcatcagggtttgttgtacagatca

SEQ ID NO: 153776 - DNA, 287 bp, Homo sapiens
tacattgagtgtaaggtgggaacttgactagtgattgattgacaaagcagtgtaaattccataaccaccccatttgcatagatattgattgcagtaggttcaaaagactgattatgctgcttttcagatttgaaatgaatgtcttttagcttaggccttcagaaaaaccaagactgcaaatgttaaagaccttaaatatgcacatgtaaaaacatatttatgattaatgataattcattaagtgtaatactatgctaaattaatatacagagtaagactgacttgtg

SEQ ID NO: 153777 - DNA, 420 bp, Homo sapiens
gttggccaggctggtctcgaactcctgaccttgtgatctgccggcctcagcctcccagagtactgggattataggcgtgagctactgcgcccagctgtggtctctctttacaactaccatctagtttggttcttaatttttttttacttggactactgtaaaagcctcattccatcattgtcagagataccttaccaaatagccctctgataattttattcctctccctcttctcccacaactcaaaccttcagtggctttccattgcctgcagaattagataattaatggttttctataatacaacctactgcaacctactgcagtagtctaatctcccaggactctactaagcatatcaaatatgtcagccatgttggatccctggctgtttgctgaacaagcctgtataaccctcat

SEQ ID NO: 153778 - DNA, 165 bp, Homo sapiens
gactgggtgatggttggacactctgtggatgcactaaacaccacgggactacacacgaggatggatttagtgctatgtgaattaaatctcaatcaaaacacccctgacatccaagatctccaacttctccctcagtatgttccattcaacattctctgcagtaat

SEQ ID NO: 153779 - DNA, 175 bp, Homo sapiens
agaatgaggcaggtgctattatttccatgttgcagataaaagcactgaagctctgagaagctaagcagctaggcagagtcacaaagttaataaaagagcagccaggattcaagcccaggtctcctaactttacagcatgaacttagaaccactatgctgtacactggttcctctg

SEQ ID NO: 153780 - DNA, 126 bp, Homo sapiens
cccagaggaggttgtaatgtgagggtggagatgaggctgctgttacaaaggggcccagtgacacagtctgataaagaagatagacttttaggctgggcacggtggctcacgcctgtaattccagca

SEQ ID NO: 153781 - DNA, 354 bp, Homo sapiens
caaatgagtggaaaggacagttttgaagtactatctcagcacagctttgacttaactttcgtcaggtgggaatgagcaagttaatatttgcaacagatattccctgctacattcctagtcaaaatttaagggaaaacaaccatttctctctgttagaaaagctgctgatacctttttgtctctttgtaagatcagcaaggactaaaacctgtgttatcttcctgagtggacttatgatatgtttgtggtcaaaattaaagttgaatataagttatggtttgttttttatatctagcacatcaacattttatcagagaacgatgaatactgtcttattagtttaaaaatatttgc

SEQ ID NO: 153782 - DNA, 878 bp, Homo sapiens
ttttgttattagtgagtggctaattttggggggccttaaggcagctttgttttctatagatatgctctaggttttctgattgtctcgtatctaaccttgttcttagccatgataacacaacttatatttgataagtggatgtgtttacttggttagaataagcaaggacatttttaaaaagcagtaaatttgctgacacttttatctttttttaaaagaatgaatgacagcttccttatcagtataattacatttaaacttttttttttaaaccgtgtggcagcttctttatcaatcagtataattccatttatttacttagccctcaaaatgacattttgaagggagcataaactctttcaggctacttggacagtatttagtattctatattagtactacactaataatttactgagtgctacctaagtgacctgattgataatgtccttaaggacctgatacatccaggataacctctcaggtactgtaaacaaggaggttgaaaaagacacattccggaatccctttgtctggtaaaattggatactgatgtggatggacatgacattcattattcttgaagatataactagttgactgggattctgatgaaggtttgaaattatggattagatctttgtagaagtagtttaaagattgcaataagtgaaatcttttttttttttttttttttgagacagtttcgctcttgttgcccaggctggagtgcaatggcacgatcttggctgattgcaaccgccacctcccgggttcaagcaattctgtctcagcctcccgagtagctgggattacaggcatgtgtcaccatgacctgctaattttgtatttttagtagagacggggtctctccatgt

SEQ ID NO: 153783 - DNA, 151 bp, Homo sapiens
cctacagcacatttattctttaaacagcaactggagaattccttctaaaaagatgctactcaaagcacagtccatgagctgatgatggttcagggactgttactggtctaagaggagatgacataaattaagaataactgtttagggctgg

SEQ ID NO: 153784 - DNA, 378 bp, Homo sapiens
gggtggggaaggaaaatggatgtattctggcttgagctctgctgtcattgtgccttccagtcccactgtctccacaccctatctcttcatttttctttccctgtgtttcacctacctcccctactagcttggctctggttggtcatggtccacaattccagtattccttccccaggtattagaaccctttgcttccctgactttgtgccctgccggctatgctagttgctgtctctgaattccgcgcctggctgcttttcactgcccctagggtgcccattcccagtgtttctggacagtcaggaaaatgagttgtcttggttgctggtagttcccactgcctcacttgagctgatcgctctctgcccctcagggtgc

SEQ ID NO: 153785 - DNA, 340 bp, Homo sapiens
ttttaatgttctttatttctttctagaagaattttatagtctcacaaaataattgcggtatatgcttaatttgagaaatagaatgctacttgataaccatacacatgtatataagctgcaatgattttacaaggcttttatccagtctcccacttagtcagatgataagaccctcttgtgactcattctttttctctatttttcaattctctaacttcctggaagctcctctgttctggtggtcgggtaggagggaagcattcacccagaaaatgagctcaaaagattctcccttgagttcttggttcactgttttgttttgtttttcccatgtattttg

SEQ ID NO: 153786 - DNA, 510 bp, Homo sapiens
gaggatttttttaggttggggttcttccttgtatcaaatatccccctccccacatgtcatttgtgatgatgtttcgtgtgtgaaggatagaccctaaggtgaccctcaatcatccctacttcctgggaagtggatccttccccagcccagcctccagatgagatcccagccctggctgctgccttgactgcagcagatgaagatcctggacagaggacccagagaagctgtgcctggactcctgacccacaggagctgtgagaaaatgaacatgtgttgttgtaagctgctaagtatgtgatcatctgtcatgctgcactggataactgacatgaggggcatggtgtgtgaacgcatgtgtggatgtaaaggaggggttggctggagagggtgtgggaggaggacagttgcctgcagagctgtgtggggtctacacagccatgtacctcctttggagggtatcgagtacaagtaatttggttgccagtaagagaaacaaacccaaagagg

SEQ ID NO: 153787 - DNA, 256 bp, Homo sapiens
ataattcatactatacatatagggacacacatctgcatagatttataaaaggttggcttctggccgggcacagtgactcacaattgtaatccttgcactctgggaggccaaggcaggataaatgttttaggccaggactttgagaccagcctgctcaacgtaatgagactccatctctacaaaaaaattaagaaatgagctgggtatgggggtgtgcatttgtagtcctagctacttgggaagccaaggtgggagg

SEQ ID NO: 153788 - DNA, 371 bp, Homo sapiens
ctttatacaatactgaactgtgtacgcaaaacctgagaagtatctataagctttctctctactaacaaaaagagataaactttccccaaaatacagaaaagaatcagtttcttgtgccataaaaggatgcagaaaagagggagctttttatttcccttttctcaagcagacaaacccttttgcctaaacttagtaaaactgaccagtcagatatgacctccaaaatttcccttgaaaaccttccacgcaccatattcttctgcctattcctggagatagttactgattagtaatcagtatcctatttaatgagaaaagatttctcacagctttctataacatatctcactctacgagtattgtataacaga

SEQ ID NO: 153789 - DNA, 698 bp, Homo sapiens
cttcaggggacttggacagtaaataaccaaaataatacattatagtcattacaatcaacagttacaaacccttttacatccattattttgtctggtccatatagtaactctaaaatgagaggaaggcagattattcctcaacgaaaacatataagcacctataatgcgccaagcactgttctaagctctccagatcccacagtgaacaaaagaagcaaaaatcgctgctttcatggagcttccttttagtgggagagagagtaaaataaaatgattgaatattagctatgaagaaaaacaaagtaaggaaggagaatagtgaatgtcagagaagtgctatttttgaggacagattgacagatgttatccctattttaactagagcaaagttctcagagaaacatgattttccctgggtgttagaacttgtaaatagcagaaccaggaaagatatctgcatctcctgttccaaaatccgctatccctatggcccttttatgacagtcctaaaaatctggtaatccagtatccatttttctgtcttgtctattcccagccaaggctctgaggtacaaacttttctacttcccagttttgaaaaaaaggcaatttctttttaggcattttttttaaaataaagcactgattgggtgggggggggaatggccgggccaggagcctttttaaattaaaatccc

SEQ ID NO: 153790 - DNA, 577 bp, Homo sapiens
gacccctgccaacctcaccccttggtatccctagaactctctcttgcttcttagccttaaacatggagaggaaagagccaactttcatgatttgaagtcagaaaaaccaagtgcaacagccctcacctatggtcatctgaggagaccagatgaacgcatagaaagctattaggattgaataaaagcagtatgccaggtgtgaccacaaaataagaagcctttgaaaatcagtcacacttggacctctgtggtcaatgagtgttcttcaaatcagaacctttgggggttatcaatacgtgcttcacaagtgtttgaaggagttgagagccaccttcagagtgtgtgtgagccacatgagcaactcccttgtgtttcttgcagcaaacctcctggattgaaaatggggttgcggatctctatctactgcatctttcatcagatcgtctttgaagttttgtgtttccaaaataatccaacatcattatcaagggatggaaatgtatcattattcaggaaactcaagagaacaatattctgcaggctctattgaaaactagccagttgggtcgggcacagt

SEQ ID NO: 153791 - DNA, 352 bp, Homo sapiens
gtttgagaccagcctggccaacatggtgaaaccccatctctgctaaaaatacaaaaaattagctgggcgtggtggcaggcacctgtaatcccgcctactcaggaggctgagggaggagaatcgcttgaacctgagaggcagaggttgcagtagctgagaccatgccacagcactccagcctgggcaacagagcgaggctctgtctcaaaataagaataagaataagaataataagaataataactacatctcaaatttttataaagtaacctttaaaggagtactgaaattatgagtaaacataaattgatttcaagaaaaagaatactgacaatctctttttaaaaatcct

SEQ ID NO: 153792 - DNA, 139 bp, Homo sapiens
ctcctgggcttaagctatcctccaaccccagccttctaggtagctgggactagaggcacatgctaccaccatcagctaaaaaaaacttttttgtagagatgggggcctcactatatttctcaggctggtctcgaactct

SEQ ID NO: 153793 - DNA, 601 bp, Homo sapiens
acctgggttcaaatcccagctctgacacttaatctgtaacagtgttacattattctgaggattagtgaaaagggaacacttagcatataggaagggctaagtgtatgttcttgcctctttctagttaggcttgaaatctttctttattttatgtacttattattactaagttttctagcacctcccaactcatgaccaaaaagtttcattttcatcttatttttctctttggatgatttttataagggtatttcttatagtttctctatatttaaatactttatactgtctagggtatttaggcaaaggattcaactacagggcttttagaaatcctttccagctctaaaattataggatttaattgtttttgaaaaagatgccttctaccttcctcctcctccagctgcacacgtagtttactggttactgtggtaactgcactctaataatcctgtcaggaaatctgatgcaactatctgtctaatcttattttccagacacaaaacaagcacacggcttccttctaagaatccttctaaagcgctccagcctaagcattgtttcttcttgttctgatgttttttaagattgcacttag

SEQ ID NO: 153794 - DNA, 396 bp, Homo sapiens
ttaaagaccgggtaagcgaagatgccattagcatcctatttcttgactcaattattccatcaggcaggcaaaacttttcatgtatgatgtcatcatgtgttgggaggtacagagaatccttaaaatctggtggtggcagggaaggtggtacaatcatttaagaggatcatttggcagcatcaagttacaacaggcaggaagaacaaaaaacaaaagcaggccctctgctcaagcagtccaagtctttgcaggtactctacatgtccagagtgagacacagatgggcagcattatcttagagaaaaccgggaacattcttaactgaataatgtaaccatgccatggaatatatatgtctgtcaaaatgtaggtagactgggcactagtgtaatgtgc

SEQ ID NO: 153795 - DNA, 649 bp, Homo sapiens
tccatgttatgtactatttagcattctaaacctacccataagagggagaatgcgtatgttggcaaggccaaaacactttgtagcttttaaggaatcagctgatactctggctttaaggctcttgtgagcttttgagagtttgaatcagcttactcagaggctgtgacaagatcacctttctgagactgcttggttgaggacagattctggaatatagttaattctccagggaaaacactactctgtaaggacctgtctgggtaaccaactgtctttccctaggcgatacccctagtaactcctaacctccaactacacaccattttaaatttaaaatttctacaaggtagcagctccagcatgtacacagcacacagctaactgttgatgaacactgcctaggcattgtttcaagcactatgtagattatcttatttaatccttataccaagggaggtgctatcggtattcctattttaccattatgaaaactgaggttagttgagattacggatagagctctatccttaatctgaagagattcactgaagcgcgggtacaaggcgggagtaactatgactctcttgaggtagccaaatgctcgtcatctaatcaggacgcgcatgatggatgacgagatccactgtcc

SEQ ID NO: 153796 - DNA, 499 bp, Homo sapiens
agaaatgccagaaaacagacgccggcccagcaggctcagcagggttaaacttggcgagagcaggctgcccaaggtaaagggggtcacacagcagatactgaatggctcaggaattgcagaccccgaggggcagcatggcggggctatgtaaggaagatttgctggtattcttcatcaagaataatgagacccaagtgtcttcttccaacccagataaaaagggactgcatcctctcagctcaaaaggactgtagacttcactctgagcaggttgaactggaggttctggactcagagcaccaggccacctaaaagtgagggtgagggttctcaccaaaaacagagagaggatgtaagactctacagaatgactcaccagacagacctctggcctccttccctgagtaggctccaaggacactggcagctggtttattctgtccatcaagccattggagaacacctctctatggatgctataagtctacaaatacatgcc

SEQ ID NO: 153797 - DNA, 580 bp, Homo sapiens
tcaacgctttatacttcaaagtaataagagccatccatgacaaacccacagccaatatcatactgaagtggcaaatgctgaaagaatccccttgaaaaccagcacaagacaaggatgccctctctcaccactcctattcaacatagtactggaagtcctggccagggcaatcagtaaagagaaagagataaaaggcatccaaatagagaggaagtcaaactacccctgtttgcagatgacatgattttatatctagaaaaccccatagtctcttcctttaatctgataaaaaattaagcaaagtttcagaatacaaaatcgaagaacaaaaatcagtagcattcccatacaccaacaacatcaaagatcaaaggtagataagcccacaaaaatgagattcagtgcacaaatgctaaaaactcaaaaagccagaataccttctagcctccaaatgaccacattcactcttcagcaaggattcagaactgagctgaggctgagatggctgaaatgacaagtacaattcagaatattgataggagcaaagttcactgagctataggagtacactgtaactcaa

SEQ ID NO: 153798 - DNA, 118 bp, Homo sapiens
ttagcctcccaaagtgctgggaggctaagttaaataggaaattctaaatgaagataatagaagtacattttagtaaagtgcatgagctttaatatgctgattttatagtctgtttcaa

SEQ ID NO: 153799 - DNA, 203 bp, Homo sapiens
aaagagattttcctgaaagaatattgcatttaaatctttaattacagttgtattttcaacgatgtatgcagtccagacattactggtagatactggatatcaaagagtacaataaagcagaatagcaaagccaaagccaaatgttttgctatgaaagtagcaagaatggccaggcacagtggctcatgcctgtaatcccagca

SEQ ID NO: 153800 - DNA, 477 bp, Homo sapiens
gctctagtacctcttctgcagtaccaggaagagggagaatggacactcaggcagagatttacaaggtctccacgcatactctattggacaaggccaattagctaaaaacatctaacctgacaggaaaggagaagtgtgatggtatcctgtgcctggataggggagaactagacaagtcagagtaacagcacaagtgaccacatgcttccatcccagattccagcaggtacctgtgaccctggccaggactgacccttgcccctcactcaagggagtttccataaactgctgtcagatggacagacacttgctggtggtggtcttccagggccatttcccatggattccctctggttgctcactacctggttgtctgtttctgcctaaaattcaccttactattgaaaatctctctcctgctgagcaaaccttctcaccttccataactgcatcagctattcaatctcatcatgatcc

SEQ ID NO: 153801 - DNA, 337 bp, Homo sapiens
aggcaataaaagggctgagagagactaagagagtgttgtactcgatgcccctgaattgctcactttaaaatggagttgattttatgctatgtgaaatttgcctcaatgagggggtggggagagaaagagagagagagagagagaactttttttcatctttggagacagctacactgagtcatagcccatcaaaaggggaggaatgaagggtcctctctcctaatctcaacctaacacccgagctaactcagcccctaatgggatcacttgaagtgcctgattgtgctccctgcagctgggagacccaatgagaaagatgaagaagactgtggttgta

SEQ ID NO: 153802 - DNA, 402 bp, Homo sapiens
tccatttaacagcttaaattctgcccaaactgatttttagtgtgtgcttcccccaccccgccccccacccctacggttacaatccttgctatttttgttttttaaaaaggggcatttgtatgtacctttctttggccagctgttagcagcaatctataaacatgttaatacttgctattgatagttaaaagcacctttttggtgactgctgttgaggtgttggcctgcccccgactccgccccccatcagtgtacaacccggtgtggagaccacttccaatgtcagggtgtttccttcccactgaaggaaggcatcagattccttgttgtcagctttcttttctccagagcagtggagttaactgtgcctttgttctttctggcccatgagtgcccgtggtt

SEQ ID NO: 153803 - DNA, 514 bp, Homo sapiens
ctaaagaaataattcctcatgaatctctggttctttgaagtgaaaaatgtgtaagcaaagtacaatcagtagatgtaatgtagttagggtttttaaaacattagtgaggttccactttaaagaataattaaaatatgagagggaaaaagggaaagtacagaagagcatatataacatggtaacatttatgaaagaaaaaaatatgtgaatatccatagaatattcctggaagaatatacaggaaaccacagtagttgccactgggaaggggaaattattttttaattgtacatcttataaagcaatttgaaaattttttagtgatcaagagattgactaggtgaagggaggagggacattttttgagataaagacttaaaacagatataaaaacctaagtagcagtatatgattgtgatgatggttatgggctgtaaaatcagcattcagagaagaaagctctttcttggttgggaggggggaagcaagtaaataactttcatatgtagttgca

SEQ ID NO: 153804 - DNA, 180 bp, Homo sapiens
aacagaccctgccagaagattccactaggcagtatagcccagtatcatatccccacaaagcagctaaaggcagaggtgattttagaacctcatgaagtctcagttactgaaaattattttcagacccaatggcttatttggtctttttctgcaagtttcaggtaattcccctggccatgc

SEQ ID NO: 153805 - DNA, 417 bp, Homo sapiens
atagctgttctagaggatcccggtcgaccgcacgtcttatgttgtgtatggttatcatttgtttgaggttagtttgattagtcattgttgggtggtgctaatgagaagtgttccattgagaaatactatagtgggtggtgacatagaaggaagagcaggtctatagaggtaagatagagttcagtttgagccctcctgagttgaagttgttcgtggataccaagttggaagatgtcttcaggcagttagatatctgagtctagaatatagagataggtttcagatttaggagctgttaggggcggttgaatgtataacatgaaaaatgatataggtttgaaaatctgagggaggttggaaaagtggttattgttgacacacgttgttacaaaacaccaacatgtaatggacgaatgg

SEQ ID NO: 153806 - DNA, 146 bp, Homo sapiens
tctacagaaaacttttttaaaaaaggatgttcttggtgaaacattaaaattattagttttattaaatcttgacctttcagtacacatcatcttaataatttgtatgacaaaataggaaatccacataaagcacttcagtttcatgt

SEQ ID NO: 153807 - DNA, 333 bp, Homo sapiens
agcctcccgagtagttgggaccacaggtgcacacctccacgcccatctaattttcatattttcttttattgtagagatggggttttgccatgttgcccaggctagggggatatatcttgatatagagtatgacaccatgtatgttaaggactgctttcccacctcctgccctcgacatctgtacccattaccctcccccaccacagcagtgagggctttctgtgtgcactgacctcagaggaagagccaacacagcttggaacaaagaagccaattgaatctctgaatggatttttttttttgagatggagtctcactcactctgtcatccag

SEQ ID NO: 153808 - DNA, 290 bp, Homo sapiens
tcatggtggcatttgcattatgcaagaaaatggccatatttttggaaatgcatacttgacagtatgtaggattaaaatgacagatgtttggaatttaccttaaaacacaatagcaagaaaaaacaaaatgggatagatgaagaaaatgtaccaaagccctaaaattattaaatctgagggatgaatatattgaaacggggtcactatattattccacctatgtttaaaattgttcataatgaaaaagaatagcaggactctccacacaggcatgttctctggtagcagtg

SEQ ID NO: 153809 - DNA, 612 bp, Homo sapiens
ccccgaacaagcaactttgagaaagaattcctacaaaaacatattgcagatggcagcataggagccctgctgtgttcttgtagttgctagagtttctgcaaacatacttggcttataaagtactaaaattgctgcccaagtcggatgaccttagatgagacagctgcttagaataaggctcacattttaaaccagatttttctcccctgatgaattgggatagagaggaggtccatttgcagtttagcacttggtcccagaataagccagagatgcccacttcttagtctgtgctggtgtcagggacacttgcagtgtttgcagagtgggaagctctgatgcttgggcagcaatttccccacaggtaaattgaggataccttctgttacctgtctcacaagtttgataggagattagagcgatgaggtaatgtctgcgaatggtttcctgtgtcagggagaaagcctgcacagctgagtggtgtcaccttaggtaatagtaggccttgggatgtttccgtagtggggcttctgacagcatctccctgcaggataagtgagagaactatttggttcatccccaatgtttttctgttttttgtttgttttgttt

SEQ ID NO: 153810 - DNA, 545 bp, Homo sapiens
caaaaaataatggcaaacacttaacaaggatagctgcaagcaaaactaaaattgcagagaacccagaaaggagtcagagaaattctctaagcaggtttcaggagccattcctaaatcagactcaaggtactctaaaacatggccaggtgcagtggctaccatccataatcccagcattttgggaggatcacttgaggctaggagtttgagaccagcctgagcctgcgcaacagtgtgagactccatctttacagaaaaaaatatttttagttagccagatgtggtggtatatgcctgtagtcctagctactggggaggctgaggcaggaggatcccttgagccacaggaggtcaaggctacagtgagctgtgatcatgccactgcacttcagcctgggtgacagtgagacctagtctcttaagaaaaaaagaagaagaaagaaactggggtatggggaaatattctctccactaatgcatttgttaatatttttctgtaataaaaagttaatgaagtctgtttcaaaggggaagagtttaaaatt

SEQ ID NO: 153811 - DNA, 345 bp, Homo sapiens
ctacagaaaagaaatgatttaaagctgggccttgaagaagggttgggaatttgaaaagtagagagaaaggcccggctaatttttttgtatttttagtagagacggagtttcatcgtgttagctaggatggtctcaatctcctgccctcatgatccgcctgccttggcctcccaaggtgctgggattacaggcgtgagccaccgtgtctggcccagataatttctttaagctggttttttatttggctaaaattctcttagtggttaatctctaattcagagcctataccttttccaccataccaagtactcaactttggcggaacctttgcatcatgatggggag

SEQ ID NO: 153812 - DNA, 486 bp, Homo sapiens
acaaacaatgatggtaacagttcaaatttgactattttagaataaataagtaaacacttgtctccttagcagctggccactctacctcttagagagagggctttcttctctttcttctcggtctcctgtctcccaccattttgcttctctattaccaatgagaacatgagtggcatggtcccaaagcctttctgttccccctatctccacttttcggtttttagaataacgatccccagcctttaagttttctataggattcgttagccagtggctattaagtgctgtcacggagcctaacagagagctgggaagggagcaaaccagcgggccggtggtgcactactcgagggccagcacctgcagctgcttcacctccagctccgcgttcaccaccggcccggagcccgctccagagctgacccctgccgaggcgcatttcacctgctccgccatcatcgtgggccccgagggcgccgcggccgc

SEQ ID NO: 153813 - DNA, 396 bp, Homo sapiens
ctggaagtagagatgaaggtgttggtagggttggttccttttgagggttgtgaggaagaatctgtcccatgcctctcctctagcttctggaggtttgctggcaatccatggcgtggaggagcagagtcccagtctctgccttcatcttcatatagcattctccctgtgtgtgtgtctctgtgtccaaattttccttgtttgtaaggacattattcatactggattaggacccactctaatgacctcatcttaactaattacatctgcaacaaccctgtttccaaataagttcatcttttgagatattaggggtttggactccaatatgtcattttttggggaaacagaactcaacctatagcaattgcttacactcacatagcattttattgtttg

SEQ ID NO: 153814 - DNA, 615 bp, Homo sapiens
ggagggaacagcagtcctctcacctcagcctctcaaagtgctgggattacaggcgtgagccacagcgcccggccaaccccagcctttcttaacctagctccactctctagcctaacttcaggacccacataaagctacacctacttctgcctgtttctttatgaagaatgtcttcagcttcaacctttctctgtcatgaactcctggtcatctttgaagtcctgattcagtgccattgcccccccccgttccccaggatgtttaagcactgtgtgtgctcctctatgagagccctaatcacactggatggaattgtctgagctgtgaacttctggatagtgtagtcttgttcatgtgtgtatcctcagcatctgtcccaatgcattgaatcgagtgaaataaaagcaagtacaggatatgctttgtgtatcccagtaagaccccaacctgaaaatagtgccaagacaaccaggaaactgaccagtggtccagctgagctgcatgaagcagaattaggcacagaaagtctgcagtagttcaaatggagtcctgagaaattgtgtccagccctcatgtcaccctggcctgccctgatcttctttgcttgttccgctg

SEQ ID NO: 153815 - DNA, 711 bp, Homo sapiens
aggtcggcgcggtaccccaagggtccttaagccacaatatgaaaatttgagttttagaaagtttttatagcatagctcattaagcaggcagccacttactatacatacttttgtgcttttgaatagcaccaacaaatctagtggaatttatagaagcagcaaaaatctaggatcagcacaagagttacaaagaatacctactaaaagtgcaacaacacatcttgcctctcatgttatctttcttttatatatttttttggagacagagtctcactctgttgcccagaatagagtgcatggcgcgatctcggctcactgcaacctccgcctcccgggttcaagcagttctcatgcctcaccctcccgagtagctgggactacagacacctgccaccacacatggctaatttttgtatttttagtaaagatggggtttcaccatgttgaccaggttggtctcgaactcctgacctctggtgattcagcagcctcggcctcccaaagtgctgggattacaggcatgagtcactgcacctggcctcatgttatctttcaaagagaattgaaaaagttgtaatgggtgccatggaagcaaggctaatccttctaatgggaaatttaatcaagaatgtttcataaaggttctatctcactgttccttttttaaaaatggtttccttcactttttatttttttttaagagacaagctc

SEQ ID NO: 153816 - DNA, 889 bp, Homo sapiens
atggaatctgactctgtcacccaagctggagtccagtggcatgatctgggctgactgcaatctccatctcccggcttcaacagattctactacctcagcatatagagtagctgggagtagaggtgtgtgacaccacacctggttaatttttgtattcttcatacagacagagtttgactatgttggccaggctggtctcaaactcctgacctcgtaatcctcccacatccgcctagcaaactgctgagatgagaggagtggcccactgcacccagcctactggtttatttttaaaaatagcaatttgggtcgggcgcagtgtgtctcgcctttctatatcaaccaacattctttctcgagtctgatgacctgggatctcccagcactttgggaggacgaggccacaggattcctggaagttggagttcaagaccagcctgggcaacatgggaaaaccctgtctttactaaaaaggtaaaagttagctgggtatggtggcacgtgcctgttatcccagctactcgagaggctaaggcaagagaatcgctggaacctgggaggcggaggttgcagtggcccgatactgcgccatggcctgaccaacagaacaagactccatctcaaataaattaataaatacgttagttaatcgaaaagtttaaaaagaaaacttcaaggacgttgcaggaatgcacgggaatgcttctctcattcctaaagatcagagcagaaacacagtaccatcaggttgagatacaggccattgtgaatctcttctcactgtgctcaactgacaccaaagaagggcaggtttccatgccgcccgttcatcatcaccgctctcgtcaagtataattgcagagtcatgactacacagagatctctcaac

SEQ ID NO: 153817 - DNA, 386 bp, Homo sapiens
acgatctcggctcactgcagcatccgtctcctgggttcaaacaattatcctgcctcagtctcccgagtagctggcactacaggtgtgcaccaccacgcccagctaattttttgtatttttagtagagatgggatttcaccatgttggctaggctggtcttgaactcctaacctcaatgatcctcccaccatggcctcccaaagtgctaggattacaggtgtgagccaccatgcccagcctcattgtaccattttacagtcagtacacaatggttccaatttcttcatgttcttaccaacagttattattttctgtgtctgtgtgtgtttttcctctgagaaaaggtctccttctgttacccctgctggagtacagtggtataatca

SEQ ID NO: 153818 - DNA, 119 bp, Homo sapiens
aataagcattttttattaacttttttgacaaaccgatagtaaaacatatgctacctaacggtaactgtgtccctttatgtatgagtctaagataaatattattcagatttttatctgga

SEQ ID NO: 153819 - DNA, 310 bp, Homo sapiens
tcaggtgtgctctgctctcgccattgttccatctgcgaggagcaccctttcttcagaaagtaaaattgtcttgctaagaaaactttttgtccaaatgctaatttttccttacagtacagaggtacaagcgttctgtctctaaacaaacattttacttataacagtgggtcacacaccctcctgtcagatgttactgacttttttttttctgggaacagaaaaaaaaaaattatgtatctatagtgtcaggaatttctggaccacaagttaagagcctgtgttagggagtgagtcaaaacactggctctca

SEQ ID NO: 153820 - DNA, 705 bp, Homo sapiens
tacgttcatgaaccttaccatcattaggcctaaacagatgcaatgccaggatgtttaaaccaagcaatcctgacatttacacaatcaggcctttctacagtcagtgctcggaaatctgtggatctaatcatagcttcatacccattgttcttgaacttgtttagtacccctaaaacacttcgaaactggtcagcatctatattataatatcactgtagagctaatcagtactaaccttttaagttaaagactgagttatgatctttccacaacgaagtgccccaactagacacatccacacgatttattactatcatatccataatcctatcaccatttcaattaaaaatttcaaaattcatctacccaacaaactcaacactaaaagcttttgaaatatagaaacatgaaaccccttaagaaataaaatgaacatctctttcattaccccaacaatagtagaactgcctgtagttattctttttttctttttttttgaggctgagtcttgctcttgttgcccaggctggagtgcaatgtcgtgatctcaacttactgcaacctctgcccttcgggtgcctcagcctcccgagtaactgggattacaggcatgagccaccgcgcctggccagtatcatctatagtttctatggttagggaggggttattaatttcatgttgtataccgaatattaccgactcgag

SEQ ID NO: 153821 - DNA, 481 bp, Homo sapiens
caacaaatttgaaatttgtgtttatggaaaatttcctacgaatatatactcccaagttattctgaatatgtagtctagaaatctgattgctatttaaaagccctcatatattaccttaatacataatgactttataatctgttttaattagggcagcagagtgtagtgaaaagagattatattctatcagtttctaattgggtgatctctctgaaactcttttcttacattttacatttatttttcaaaaatgttcctttcaaattttttctatagtacactctactttctagtgtggtatataatttacatatttattatgtttcttgtttttttttatctattcctcaattaaaatgtaaactctacagaacagttatttttttgaaggactctcaaataactttatttcacacattctaatactcagtttgtgaagtgaaacatctctttgactagaagaaaaaacagaaaaggctga

SEQ ID NO: 153822 - DNA, 404 bp, Homo sapiens
atgatccaacaattacacccctagagaatacccaagagaaattttaaaaaatgtgtccacacaaaagcctttgggttatttagcagtgtactgtttattttcaaatttcttgttatctagacacacacacacacacacatacacacacgtgcacgaaaatgaatatgtgagatacagctaaagaaatgctgagagggaaatttctatctctaaattcttacattaggaaaaaagatctcaaatcaataatcgaagctcacacctttaaaagctagaaaaaggctgggcacggtggctcagacctgtaatcttagcacttttggaggtgggcagatcatttgcagtcaggagtttgagaccagcctggccaacatagtgaaaccccatctctactaaaaatacaa

SEQ ID NO: 153823 - DNA, 259 bp, Homo sapiens
ctgccattaggacaagaaaaccaaaacagaaatttcaactgcttcttagcaatacatattttccgatagcatcccacaagaatgagaaatttagaatgcaataagcagatctccaaagggcaagcacaaagcacctgccacacagtgcttagaaatgtgccttgtgtggtgcctcacgcctataaacccagcactttgggattacagccataagccgccacacccggctggaaaagacagatttctcaaaaaaaaaaaa

SEQ ID NO: 153824 - DNA, 307 bp, Homo sapiens
gggagatgatcatttactttttacaataaataattttatctcacatctttagtcaagtttctcctaagtttggggagaatggggaaaaaatgtagtaagctttatgggactagcaacagaacgttttatcctattttgtgattttcagtattaagagattattgatcacttgcagagttacaaggcaagcactagtttaaatctgaattagactagggccattgaccttatatacctgtaaaagacactacggtgtatacaactgtagaaacaatatacacatagtagtttaatattacagtctgta

SEQ ID NO: 153825 - DNA, 248 bp, Homo sapiens
gcccgccaccacgcccggctaacttttttttttgtatttttagtagagacggggtttctccgtgttagccagaatggtcttgatctcctgacctcatgatccgcccgcctcggcctcccaaagttctgggattacaggcgtgagccaccgcgtggttgtgcttcttgttgttttaatatttatttggtctccacaatatactgaacatcaaacaacacacagaatacatcattacttatgtcaaggag

SEQ ID NO: 153826 - DNA, 278 bp, Homo sapiens
gagtggtaatcatcaacaagctcccaaagctgccttctgcccaggaaataggcatagaacccttggtgctgttgcactcatttgtaaaacagaggtcccaggtaatcccttctctccctcaggggaagcttagagccggtcaaaagatgggaaattaggagacccaagttctcatcctgtttttgcctttcccaggctgtgtgaactttcccctctggctgtttgctcctaaggtcagctgtgttcactctgggctttagaattcggggactggtatc

SEQ ID NO: 153827 - DNA, 292 bp, Homo sapiens
tgttaaattgatgtgcatcttataaacaatgatctcttataatcaaggaaatacagtattataactacaaaaagcattatctggtttaatggttctcaatcctttttcaccacccactcaatggatgacttccccttggttacctagaggaatgagcactcactctaaaagcaaattaaaatgcaagatatgggagaattatgctaccctggaacaatgaatttgctttaaattgtattgcaaagtaaatcttttattatactttagtactttattattagtaaccaattac

SEQ ID NO: 153828 - DNA, 421 bp, Homo sapiens
caggactttcctaatttttctacaatgagcatggcttttgaaatttaaaaaaagatgagaagactttggccaagatagattaagtaactggcccaagattacatggccagcaagtggcagagctggaaacctcagagttggacctcagaatttgtgctcttaatcatattttatagcctcacaataaattagaataaattaaccgttccaagcagaggattttagacttcatgcaacatgacagtacttctcaaagttgttcagggaataaaacactcagagaactcttattaatatgtttaatttcatcaaccagattcagcaaaatcaccaacagaaaacaagactatgatacatgtggacaaaaagaatcacagatataaatatcctgtgctttctcaataaatgatgctgccttact

SEQ ID NO: 153829 - DNA, 292 bp, Homo sapiens
tgctatgtagcccagttcctaacaggcttcagaatgggggatgggaaccctggttctatgagagcagaatccatgtatctttttgtaccactgaatcccaagcatttcgtgttggtacatttttctgtaagggaatccgtgtcttttgttggcttttaaaatggccacctaaaaaaatttaggaactactataagagtaatgttgtcaaaatcaaataccactgttgagattttgaatctgtgaaggataattgcattcttaatattttgtcttcccttccaaaatcatgct

SEQ ID NO: 153830 - DNA, 549 bp, Homo sapiens
cccccaccatggttatttctatggactttgtggcaactttgcgcaacagaactgctaccttaaaaagctatggataaaatatggctccaggtcacatgaagtgtaaaggcttatgcccatgactggaacgtaaggtcaacaagatgattccaaactggagcactttccaggggttgtttgggggtaaaaacaccatgtttacacaaagagaaagctattcacagcttttccttttgggaaaaaaagcattatcagctttttgtggcttatttattctatggcttatcagttgactagcttttaatgttcccttccttatggctttttttaaaatcctttatccaaaaggataaggagatgtttactttgaacttgccagaggtagcccagattcaagaaggctttatgaaccttaattatcaatagtggagagaagggtctttgtttaaccaggaataataggatttctatgattttcctcatcaactttctaagctaataagttttgttgctgctagcatttgtttagtagttcagcatagaaaaatg

SEQ ID NO: 153831 - DNA, 160 bp, Homo sapiens
atccaggaagtctgcctccagagcttaggctcttaactctatgtaataatatctatcaatagatgaatgaacgaaataaccagaaatcaaactcccattcctaaggcaaaggtcctccaggttccaatttctaaaatcccaagaatagctgccacactgg

SEQ ID NO: 153832 - DNA, 555 bp, Homo sapiens
tataaagcggagatcatactttcattcgactccgcgagcatttcctaacccctgcgcgccgtgatagcccaaccttgactcgtacaacccctctcgcgacacctgtctcctgagcaaatgcatccagtagggatgtgagaggaaaaacaggatccatcacccaacctgtctgcacttgtggcctcctggtaatgcagggactcaagcgactctatggtgggaaccctagacaattcctgatcaaaactttggaaaccagttcctactggaagattagtgttagaagaaacacacatttcagaaaatacatggaaggagccacatgttagggatagaggtgagatgagtaagggagggaagctctttggatgggcaggtggaggagagaatgaggccatgtggaaaatggaaatttaaaaccagagaagactctagacattaaccaagcaatattagataacgtcatggatttcctaagaaatctatgcctaaaaaattcaaccaactagtgtggctatgagtttgggttttattttgggcgctttcttgttttct

SEQ ID NO: 153833 - DNA, 129 bp, Homo sapiens
gtaaagtgtaaatataactcattattaaagagtaacttaacccctagagactcttattgggatgaattttagtatatggttacatttatataatttcaaaaaataattttgacttttttttagattcag

SEQ ID NO: 153834 - DNA, 580 bp, Homo sapiens
agggaagagagatacaaacattttcaaggactgaaggattcagtttccaaactgaataggctctcagaaaagcccagccaaatagatgagctagatctcaaccaaggccatcatgatatttcaaactactaaggactcagagaaacctctgcgggcttctaagaggcaaaaaacaaaatgggttacagtcaaaggaatagataccaataaagctttagacttctcatcaatactggataaacaatggatcaatactttttaaagtatgagggaaaaggccaggcgcaggagctcacaactaaaattccagcactttgggaggccaagacaggaggatcccttgaggccaggagttcgagaccagtgtgggcaatatagtgagaccctgtctctaccaaaaaaaaaagaacttttattattattattattaaaaattagccaggctaggcgccgtggctcacgcctgtaatcccagcactttgggaggcctaggcgggcagatcacctgaggtcagaaattcgagaccagcctggtcaatatggtgaaaccccgtctctccttaaaaaaaaaaaaaaaatt

SEQ ID NO: 153835 - DNA, 371 bp, Homo sapiens
tgtacccgttccgcactgcccactccctccaggtttctccagggcttggcctgctccacactttccccatctctcagtccggggtaccctggacatattcctgcaggcaacatgggccctctcaagcccaggctgctgctccatgcaccctctcaaaggtggggctccacggcgctgctgtctagagagctgtcaccagtcttcatccactgcagcgagggcctggctccagcagcgtccagcaactgctcctggcatctagcaagttcttatgcttggcacctccctggcaatagcctccccggtccccaagggaaggcttctagcaagttccaccagtacagcccctaagtacctttcctgccatcccc

SEQ ID NO: 153836 - DNA, 157 bp, Homo sapiens
cattattcttgctacttttctgtaagtctgaaattgaaataatatcaaaacaaatagttataagagtaaggaagcgttatactgatatgatctttaaaaatatgcaaaataaaaaaatgcaaaatgagatgtatggaatatcaccattcatttcaga

SEQ ID NO: 153837 - DNA, 370 bp, Homo sapiens
ctttgcaatccagcctacctctgaaaagctgcccagcgttatgccgcatgcccatttttatcagccgagaactgggcagaaaagtcatgtcctcttcttcctcctctagtttgtaaaggaattttctctttagctttaatagcagatggatagaggtgcttagtatagaaccttccgaacagctgacgtttagacctaaatgtaaatcaggaccatagcttcctgtcaccactcggatcagcaccctttacagccttgctatacctctgctgctgcctcccccagtgctggaacagactctgggaccaagatcctcttgtcactgggtctttgcagttctttttcaaaagcttgccttccctgctgttta

SEQ ID NO: 153838 - DNA, 573 bp, Homo sapiens
aatcccagcactttgggaggctgagcgggcagatcacgaggtcaggagatcgagaccatcctggctaacacagtgaaaccccgtctctactaaaaatacaaaaaaaattagctgggcgtggtggccggtgcctgtagtcccagctactcgggaggctgaggcaggagaatggcgtgaacccgggaggcggagcttgcagtgagccaagatcgcaccactgcactccagcctgggcgacagagcgagactccatctcaaaaaaagaaaaagaaaaagaaaaaaagaaataaagggaatccaaatcagtaaagaggaagtcaaactgtccctgtttgctgacgattatcgtttaccttgaaaaccctaaggactcctccacaaagctcctagaactgataaaagaattcagcaaggtttccggatacaagattaatgtacacaaatcagtagctcttctatacaccaacagcaaccaagtggagaatcaaatcaagaactcaaccccttttacaatagctgcataaataaatacataaataaataaataaacaagaaagataggaatatacctaa

SEQ ID NO: 153839 - DNA, 987 bp, Homo sapiens
atggagttatgaccacatgtggggtgtggacacgtataaacacttcagcattgccagttcacactgtcctgggagaagcaggaggagagactagagaggaagggggaacaggacagtaggcctccagtgctgagccaagaaagaagcttgatttttattctgtcggcaatgaagaaccatcaaagtgtttttttaaggaaaggtagagagggagggaggaaaaaaagttgtattcaggaagttcaacagaaaatatgttctgaaatgttatgtgatgtctgccagtcatctaggttctgagcttgagagtgctgtcatccttatccctgccctttgaaatgctaataggttgttaagctactctttagttactctttattctcataaacctttatacttttagatgccctacttgaaattgggtgtaaaatgaacacttgtaacatgggaagggggactggaaaatattaaccagaacaacaatgaaagtatcccaaggctgctaacaagttttcccaccccaacctagaccatatattctaactataaagattagactagacaaggccccatgcaaaacaaaacaaaaacaaagacaattcaggagaagtaactgcccaaatcttatctctgttataatacatgagctaaattttaaaataatcagtgggttgtagttacgaatggtaagttcaagtatctgttgttacaagcagagttaaacagtccacacctgacacctcaggaatttaagttataaaagtatttgatatttttaaagaataaatacagaaataatgcctatttaggtagaaaaaaaacttttggtgccatctaatatcaatctgttctattagtaactgacataaacatctcatgcaaagaaatagcttagaaaaagtagatttgttccaatggtgtccctgatgccaagtctgatgttaaagctattttgtaaaataaaagaatataattagacgaagtgat

SEQ ID NO: 153840 - DNA, 231 bp, Homo sapiens
atttgagtacgggaggcccctgcggcccacatttgtaacccatactattctgagtgattaagacctgaaacttgtgcaggggtaggggatcagaggaagattcattctaactagaggaaaagtaaaccagtgtcagagctattgggatttgaaggggcttcgaaacatcaaaggtcttgagagcaggaagattcccacctttttcagaggttacctaggataatagtcttt

SEQ ID NO: 153841 - DNA, 207 bp, Homo sapiens
gtctccggaccctcctcaaatagacgtgcacatgtgtccacagactctggtttgaaacttcaggggatgctgccctgtggctgggaactggggagggacaggtacactgtgatgtgttagatcctcggcccactgagtgggggctgaggcagatcaggggccatgattccagataggaagaaaccagcccttcctggcctcccaggt

SEQ ID NO: 153842 - DNA, 335 bp, Homo sapiens
caggcagacaccagatcccttccctgcctgagctccccggcatcatccccctcaacattctcacaggcagcccacgctccttcaccaggcccagtgggagccttagttctcccgggccagccggtgcagaataagaaagggaacggagaagggtgagaactacctgtgtcgtaacatcctgcctccctgacctgccgagtgcccccatcagggatcctgcgctcctcggggccggccaaatcacccctttcctcaggggccggccaaatcacggccaaatcgtgtgctcctgggtaagaggagatagagacccagtctgtaagaagctgcaccct

SEQ ID NO: 153843 - DNA, 387 bp, Homo sapiens
gagaataaactaccttaagaacattttaatttaactttaaaaacaaaagtctgaataaagtgacaacttttaactagcaaatcttaaaaggagtataactccagagcaatataacagggtattacctgaatagccataattatacaactggaattatttatgctacagggagacaaagtcagattattgaagacacaggcccacacttttgttttaaatcaggtttcacagttctctctcacccacaacacagtaaattgtatccattcttcttttgctctgagaaacttaaagactaaaacccttgcagcttccccaatatcatcacactgcaaaagcatagaagtcttgtatgcatatgcaggagcagggaggagggggagtaac

SEQ ID NO: 153844 - DNA, 519 bp, Homo sapiens
cgcctgtaatcccagctactcaggaagctgaggtaggagaatagcttgaacccaggaggcagaagttgcagtgagccaagtttgcgccactgcactccagccagggcgacagagcgagactccatctcaaaaaacaaaacaaaacaaagttttatttttatttatctaattatacacacatgcacagacacctacgtatacagacacacacacgtacacacacacgcacacaaatatatatatgtgctgatgcactggggcttccactgctcttacttgatgtgggtgatattatcatcattatatatatatgaggggggagagagagagagagagagagtgagagagagagagcgagagcgagagagagagagagagagagagggggaggtgctacacattttaaaccaccagatctcacaataactcactcaccatcacgagaacagcgccaaaggggaaaccccccccagaatgatcctgtcatctctcaccaggtctcacctccaactttaggga

SEQ ID NO: 153845 - DNA, 675 bp, Homo sapiens
ctagggacactgtgctagccatcctctaggagagggaccccattccctctattgcactctctctttaagcaaagtgattatgaaagtggcaaatggactgcttggacagtctgaacttaattgccagctattttggggagtgctgagaaagctggctgcccaaaatctggagactttgtgggaagatgagtttagatgcagggcctcctgctgcagagagaggggatccctagttctagccattctcatttctgggtctccaaagttttatcaagcatatttgtctgcacaaatatccgaggtttaatactctgtatatttgtttgtaattcaggcatcacaaaattctgaacttgctatgtagcatatgaaattgctaatggaagattgtttatttttttaaaaagactagaagtctttaaatttctggcacagacaggcactcaaatatttgttgaatgagtgaatgtaaggataatagaatataataaattccatttgggatcagattactaggctatctaacatttatgatgaatccagttcatgaaaaagtgttacttagtgaaataattatatatacttaacctcaattttatttttgatttaattttaatttctttttttttttttgagacagtctcgctttgctgcccaggctggagtgcagtggca

SEQ ID NO: 153846 - DNA, 341 bp, Homo sapiens
gtcatattctgcaaggcagaaataatgaatgaaagggatcatgcctatgggcctggaaatttgaattgagatccagctttcaagagcattgaggaaaaactcaggggtttgcagtctacctttgggtaacagggagccattgaaggcttctacctgagtgatgatttagcattcataaagataattctgatagaaacataggaaagtttaaaaggagacaaaccaatcagactaagacaaactcaagggcaaacgaaagcatacacttctgttttggaaaataaataatggtggctttaaggcaggagcagtagggtagaccaaacagatcactctgaaga

SEQ ID NO: 153847 - DNA, 354 bp, Homo sapiens
gggcaacagagcaggagtctcaaaaaacaaaacaaaacattaacctgagactcaaatagattgctagagaaaagggaagtgtagaaggaactgaaaggcttattctaccttgatgggagcatttactctgattataattgacagctagcttttctcctttatcatggaaaatacttctcccttctaaaatatttcttacaaatatttcttacagtgccttcattttttgatttctcttgattcttgagcatctttttctgagtattagttttgtttcctaggaagaattttgtctggagagtctgccctgtggcagtgactgtacaaaatacagctcccagtatgaataaataa

SEQ ID NO: 153848 - DNA, 462 bp, Homo sapiens
atgaagtcatcagtgaaagccattattaccaagtggtttatccagtcccattcttgaagaattgctgattttgtcattgtacaggagtgtcgtggttgccaacattacttggaactgcacacagataagttataacatactttgtggagcaatgccttcttaaacttttgtgtcttgggttattttgtgctgctataacagaatatctgagactggataatttatgaagaacagaaatttattctctctcatgattcttggaggctggaaagtccaagatcaaggcttcatctggtgagggcctttttactgtatcctcacgtggcagaagacagaagggcaagagagggacaaactctttgtccttacatggcaaaagggcaaaagacagaacccattcctccaagccctttcatagaggcactaatccattcgtgaggttggagctttcatgacctaaac

SEQ ID NO: 153849 - DNA, 735 bp, Homo sapiens
taaaataataatgaccatttatttagctcacaagtttgcagtttgcccagggttcagcaggggaagtctgttttataggcaggaactggagccgttcaaaggtgggagtgaggcccattcatgtcagaaggaggttgatggaagctcgtagctgggacctcaactcctcaatggggctgtcagtgggcatacctacccatggcctctccatgtgccataggcttcctcacagggtggaggctgggtttaaagtgcaagcacctcaaagaggatgaggtggaagctgttgcctttttataacttaacttcggaagtcacatagtgtcactttgtttttagtcactggcctacccagattcaggagaatgggaagactgtcagcatcatacagtacacacagcatatgggattgggatacactggtgcagccatctttggaaaatacaatttaaagatgtcttctattgtaaatctattgaatactatggggtaaacagagatacaaacgatctgccctttttccagagttgtgtgcaatctattggcgacagggaatgagataggcatgtgtctatgcccgggaggtaaggaggcgggggaaagaaagccacacactgagtaatagtaagaatccctatgtggtaagtgcttgttcaggttgcactgatcatgctgatgaagggaagaatccactctcatttactcactgacatgcacaaacaagcctgcatgttt

SEQ ID NO: 153850 - DNA, 637 bp, Homo sapiens
gtatttttattctttggctgttgtcacaaaatcaccatgtccttgtctactaattcccttaaaattattttatattagtcttattattttcttaaagaatccaggttatcataccttatggtattctcccaatatctttattttccaaattactatgaactctaatttcagttaaatgtcaataataaatatctaagatcatagttactttcacttatctttaatagctcttaattgcttacaccactaattaatattactaaaattaattgtcaagatgtatttccagattaattttaagccctaactcttgtataaaccttctactgcagtatagatttttgtataagtattcaaacatttcctgtgtcttctcattagttcatatcaaagtgttctctagaaaaacaaaaacaaaaacaaaaacaaaaaacttgccttcagaaaagtttccaatgcaagtcagaacattgtaaagccctgaaattagctcttatgacaaactcctatttgttaatacgctacaaaacatagtttgacatgcttgaaattaaaaatattttgtctaatttaagaactaaagcactaaagtgcatattttgatttgaattttcctagtatttctcagtaaataatt

SEQ ID NO: 153851 - DNA, 467 bp, Homo sapiens
tcctagtgattggtcagacaaatgagacatcaaccttacttttaactttgccacatttgtattttcttttttttgagatggaatctctctctctcacccaggctggagtgcagtggcgtgatctcagctcactgtaacctccgcctccagggttcaagcgatttttctgcctcagcctcccaagtagctgggactacaggtgcctgccaccacactcagctaattttttgtatttttagtagagatggggtttcaccatgttagcctggatggtctcgatctcctgacctcgtgatccgcctgcctcggcctcccaaagtgctgggattacaggcgtgaggctctccctcagagtggggtgtgtttaggggagggacaactgtgaggcatagttttgttgagccatggtttgttcataaggctgtcctttgtggtacagaaaactctgccagcagcctttaaagcca

SEQ ID NO: 153852 - DNA, 426 bp, Homo sapiens
tcggggcccgtctgtttctggaaatgacttctttctctctttccccttctccccaaagcaaaggccaggtcaggaaaattatatacttcgttttcccaacaaataaagtcgcctagtttgcagggaaagttttacaagccaatgatgcagagagaagaccacactgtttagctttcttaattggctggctttgaacttgaggtgggaggagaaaagaacccgctccagccccaggaaaacttagttttgctgggtttaccaactccaacagtttttagccagctgctgaaggtggcagggagtcactgaaggtttgtcccattttctcccgaacagagaagaattcagacagttgttgtctctctgagcccaggacagccagtctctgccctcaaaccccaagggaggagcctggaatccctggtt

SEQ ID NO: 153853 - DNA, 384 bp, Homo sapiens
gtaaaagggactcctggctaaggaatgaaattacatatggtttatatagttatatatagttataagagtgtggtactgtgaagataaggtaacaagtttttatgtcaatgccaattttcagcgttcacccattgccccagatacagttattcattctctatcaactgtgcctcaccaatatatttcacattcttataattacaaccattctactttagacctttttttttgttgttattttgactattgcagtggcctcaaatttcgttcctccactttcattcatcttgctcaaaagctacccaccataatgatggaaaattatcttcctaaaatgcaaattattaaacttttgatagatctggccccttcttgcctctcctg

SEQ ID NO: 153854 - DNA, 213 bp, Homo sapiens
taatgttattggaaagttaaggtccatagtataaaccttagagcacctacctaacaggacaaaataagcaaaaacatatgactaataatctattagttgaaataaaataaaattcaaaattaaacacttaatccaaggtaaagcatcaaaagtggaaaatagtaataaagaacagattaaattttatggaaaataaattttatgatagtagat

SEQ ID NO: 153855 - DNA, 360 bp, Homo sapiens
tcagaattgttgggaaggctgaagaaaagactctgggctgagctttcaggaacaaactccccaacctgctccccagacagatcaccaaggctgctacaatcaggaagttacagaagcaggcggtggggatgttatcatgcagccagccacagaaccatagctctggcacaatccaccccaggaaggggtgcctcgtaccctggccctctccctactgcttcacatcaaagtctaatcagcagagccggagtcacacgcagaggctactgtgaggaagtctggggagggttttcgactttctggcctttggatgctgatcaaataatccacagacaccccatggtacaggtcattgtatcc

SEQ ID NO: 153856 - DNA, 470 bp, Homo sapiens
gctttccctctgtgcttaacattcatgttaaatgaataaccttttattacacgtcaggatgtggagggaaatgtattttacaaaagtaacaaagtaagaaatttggaagtgtacaaaaaatttatgtctacaaacaccttccagtggatttgaccagaattacatatttaaagccttgattgactattttggagggaacctgaaccccacccagatcctgaaagagtagggccagtgttctaaggactaaaaatgaaaacctctgttaccaggaaacccgaagacgagaagtagcacgattttaagtactgtgcaccagtcattcgtcaatgcacagcaaactctggcaactttgccacgttaaaaaacttgccatcaaaatccaacctgagcacaaacttaataatctaccacaaccttaagcccctagcgaaaaggcttcctgtgagtccctggctctccccaacccc

SEQ ID NO: 153857 - DNA, 369 bp, Homo sapiens
aacctcaatctcctaggctcgagtgaccctcctacctcagcctcctgagtagctgggactacaggcacacaccaccacacaattttgtttttttagtagagacggggtcttgctatgttgcccaggctggtctcaaactcctgaactcaagcgatcctcccactgtggccttccaaagtgctggagatataggtgtgagccacggcacccagtcagaaccacagctcttgacagctctgaccttgtgtgtgttcagccttgtcacctatgagaataggactgtgtttgagttgctccctcagtcccttaccctggtgccaaactgcagtttgaaaaatcctggagagggattccaggcctggggagaag

SEQ ID NO: 153858 - DNA, 306 bp, Homo sapiens
gctgggttctggagttgtctggaccagttgcccctttcttcttgcctatctctcccttttggaatggaatatctgtcctatgcctgtcccatcactgtactttggaagcagacaacttgcttgatttcacagcccatgactggaggggaatttgattcaggatgaaccataccttgagttttacccacagctgacttagatgagactgtggactttggacttttaatgtggtgctgaaacaaataagaatttgggattataggtaagaagcaaatgtattctacatgtgacaaggacatccatttt

SEQ ID NO: 153859 - DNA, 171 bp, Homo sapiens
acgggtgtgacccacagtagatgggtaatgaatgttgaaaacagtaagcatgtgaatgaataagtgggtatgaaggtagaaggctgccagttgtaccccagagcctactgaaagaatggtattgcggcacagaatgccctctgccacttgagactgcctgttcagaagagg

SEQ ID NO: 153860 - DNA, 364 bp, Homo sapiens
gcccacctctccactctctcagggcaacacgagtggatcctctgggtcctgccctgccctggggatacggaggtagtgagacttcgggcagccacagaggagcccacatctcctgcagatgtgtgtgttgtcaggaagggctcttcaaagactcagaagtgcttcagaggctcacccctcacgggaacagtgctcctacaaaccctgcttggcagcccctcctcaggacgctcattcaaggcagggagaccccagccaagggtggggctgagggttccgtggagggccatccctggggcctagcctgctgttgtccacctctgggccgtcctgcgcccccggccttgctctccggccactgcag

SEQ ID NO: 153861 - DNA, 458 bp, Homo sapiens
tgaaacagtacagggttgagctgtcataaagcatgactttgtatctgacctcgcaataattattggaacacactgattagcaaagaaaagcaaactgttggcaatgaagaagtttctaattcctggaacatgctcctttgatatggtgatgcattttctgaaacatgccttacacacctccttactagcttttgaaatctgcattgcacaggcgaatatcatgggcatggggtttggcaacccgggggttaagcaatgtcaggctgacgctattcgtgtaaccagcacaggtgcagggttttagtgctgtagcagccaatcaggggcagacagtgtgggttgagtcatattttccgtttacagaaccaatgggtattttacataacgacagggaggtcacgctgaggacatactgaagttagcacatgtatactacactccagggaacaggaaggcag

SEQ ID NO: 153862 - DNA, 188 bp, Homo sapiens
ccatactgttcagtcacagaatatcttctctccagatttaaaaaaatagtatgctgatttctataacaaagctttttttcgtacaaaaaccaaataatggccatcgatggctcaaagccaaacccccgtcaagtaagatgaagacttcttagaattgaccatgagatttggttgcatgtagatcattg

SEQ ID NO: 153863 - DNA, 518 bp, Homo sapiens
tgtggtctccactttcttacttgccatcagtgtctctcaaacaccaatgaggtttttctccccattactcctctgaaaaccaccaacaacctccatgtggacacacattgtggttatttttctctcattattttcttgatcactttgcaaaattctcacacaaactgttcacttcttttaaaacacttcgtcttggcttccagctcatctctttttcctaatttactatttcttctcactttcctttgctgacctcaggttctgggcctactcatttccttaaaaaattgcttcccatgtctgggaaggttcttttacatagccttgacttaactctagacccctatgtccaactgcttatttgatgcttatatttagattcctaatatgacatgctgaatcaaattaaaatgaataattcaaagcacttttcaccctccatattttcaacttcttccttctccaaaattcctcaagttcatcaaccaccaccctctacccaattgttcaaaccaaaa

SEQ ID NO: 153864 - DNA, 278 bp, Homo sapiens
agaaagtgaaggtgggtgccatggatctgatgatttcagtgattttctactcaagaaaaatgaagtctcggatgggcagagcttaactgccttaaaaacttggtacagggcaaggtgtgagtttcccggtgagactgtgtgaactgtgaacgggtagagtctgaaactacaaaccagatgtttccgggctccctcccgcctggtctggcctgtcttccttctgctgctatgcagttcatcctgggtccctgagggcctcgcagatgcttcactcgaaa

SEQ ID NO: 153865 - DNA, 494 bp, Homo sapiens
agggaaaggctagggtcccagccagctggcacctgactgaacctcacttgagctgtatgtgttcccctcattctgccaggacactggtcaaagctgaaatattattactattacaagattttagcagtgccacctccatcaagatttccatttgtcttctcgcttctcttctcattgtttacaaatatttcttgacttctctctcttctttcaaacagtgccctgcccatttataatcagaagacaaataaactttgtgcaaatctccctgttccctcatgaactagccaggcatagaaggggcaacaccaagggtgtgcctattgactcaatgccatgttttgaccactctcagggccgcccagtggggcttccatagcatcacctatcatcttgtgcccacttactccagagccttcgctggctccctatttcccacctcaccaagtctgagcacctctgcctgctcgttaggtctcgtgccctagccagtc

SEQ ID NO: 153866 - DNA, 533 bp, Homo sapiens
acattcacagtgttgtacaactatcaccactatttactttgaaatagaaattttgtatccattaagctataactttgtgtttctccctcctcccagcccctaggaacctctgatctactttgtctttttgaattttctattctagatattttgtataggtagaaataggttatgtttgcccttttgcatctggctcatttcacttagcatgttttcagggttcatccgtattgtagcacaatcaggaactttattcctttttatggctgaataatccattgtatgtgtatatcacattttgtttatccattcatctattgataggtatttggattgtttccaccttttggttactgtaaataatgctgcattgaatattggcatatagggatctgcttgagtccctgttagaaattcatgcgggtatatgcctagaagtggattgctgggtcatatggtaatctatgcttaactttttgaggaactgccaaactgctgttcccagtagctgtgccactttacattctcacctg

SEQ ID NO: 153867 - DNA, 470 bp, Homo sapiens
ctggcctcagaaggacttcaggcaaatgctgttttatgggtgctcaggttcctggtttgtaaagaggagggaggctgccagaacaggccattatccaatcctgtgagatctcctaagctgactagaaccaaaaaattaattcaggaaagccagttctatctgaaattatattccatgaactctcctatttgtttccttctaatctgcccaccaaacctaatttttctagcacatcacgcaagccttttcagcaactcaaaattttaaatcctactctctaaaaagacagcaacattgccattcaatcactagtccccaaaattagcaacatttcattctttccttgactcccacctgctgctggcctcccactttcagagacggtcttttctctgttcccattttctcctttgattcacttttactctcttcattttttttgaagaacacctgcttttctcttcatccct

SEQ ID NO: 153868 - DNA, 261 bp, Homo sapiens
ggtggggtgggcagttgggtagaaaagccagccagccaagaatagaagaaattgtggctatggagttggaagggatgtggagggagactggagaccgggaaagggatgctaaggaaaggaggggagggtcaatgaggaacttgagagtgttttatttggaacaagtacaaagagctgggcagggtcaggcaaaacagaaatgtaattgaagggaaagaaagatgagactcttggctcttgaggctgcctgactgttctccc

SEQ ID NO: 153869 - DNA, 184 bp, Homo sapiens
tgccacagggagaaactatttgctttcaagttttcttacctaaggggagcaaagagaagggcaaaccaatgttcttttccatggatgaagcatcagaaaggtcacaaactttgccacttctctggccagtcttaaagctttgacaataggctgggcacggtggctcacgtctgtaatcctggca

SEQ ID NO: 153870 - DNA, 210 bp, Homo sapiens
agtgaaacaacctagtgagatccagtacagcttccaacttatattagaccaactttcctccctatgacattaatagctggggtatggagctgtcagagtgacacgtaaactccaatcagatcaccaagtggcctcagaaatgcacacatacaagagtccctctgtcagttctgagacacctgaagctaggagtggagtgaaaccagcacc

SEQ ID NO: 153871 - DNA, 578 bp, Homo sapiens
atctccttcatgacaacatccaaacaggccctgccagctttaatctgacccttcgggtttgagctccctttatttcctcacaattgtttagctcacctctatttcatccagacctgaagagcagagccacccttttagggcagccaggcggccctgtggtgaggcaccaggcttacctggttctaccaagagaggatgctcagccactggcagggtggagttcttgtccagcccagagccaaatcctgaggtcggtaatgctggaagcccacgtctgtgtcttaggtccagacagcacagaaacacctggagtttggagtatctataaccgtgtagaagtgctagtgactgaggtctattctttggccaatgctgggctttccatcagcccctccatcgcaccccagcctcagtctcccctgaagggcaaatatctcccagagccatggctctccctactccacttccatgcactggcctggccttctgcataatgtacaggacacactggagccaggggcagtggggtgctgtataccccatcccctcagtaacctctgcaggtatccagggcattg

SEQ ID NO: 153872 - DNA, 314 bp, Homo sapiens
cggtcggtcctattttatttcttttgtcaagatatttcggtgttataaatcaagcttaaaagctactaaattttatgcacaacatgcaagtccaccttgaattttcacacttctcagaattccatgcccaaagatggcagccaggggagaaccagcctgcagcacattgccttccttctcttccacccgctccttcagtattctgaagggcttcacaggaacacttgtgtattcttcagcctacatgcctaagtaagtaagtttttccacagccttgcaaatagctgccccttggacaccttttcaaccagggt

SEQ ID NO: 153873 - DNA, 413 bp, Homo sapiens
gtaaaacctcaaaaagaaaattagctggtcatatttcccagaatcagaattatcagcagcatgaaggccagagtatatcttgaaacaagccaatgatttggagatgaatttctctgtttttcttttggctgttaaaaaaattacatataccaaatattaagtgtcttgtctctctttgcgttatccttcatgttattacatgcttttgtctaagatgtactatcactgggaggcggtgatttattaaggccaagaacaggatcaatttaaaaatatctcagaagattttctggctattgtctgtcctgttcttccaagttgtatgtgggtgcagcattaataaccttggagaataaataacattgccagttgcaaaattggaacatgtagaagttgactgataactatattat

SEQ ID NO: 153874 - DNA, 357 bp, Homo sapiens
ttctgtcaaagcactggtagattgtacctaacaagttttgcagctctgtggtgacagctgttcttggagaatggatttaacatagttttgaattagatgttcctttgaggtcaaaaggattacggcatgtctctggataatttcccacttcctttcactgtttcatcacttacaggaagattgatcctgtcatccaggttcctgccatgttctgcagaatcaagcatggccttctccatttcttcagtcagtccccagctctccctgtctccattcagcatgaacagtgatattcaaggatatggttacttgaaatacacacacctcagcacatgcatgcacacacacacacataca

SEQ ID NO: 153875 - DNA, 300 bp, Homo sapiens
ggctatcccgtggtgtttggaaacagggcccatgcctgccatccacatcaatggagaacaggctggatgctttgggctggaaagatgccgacattatccctggtggagctttccatcgaagtggacatgcataaagcaacttaaaaactctggtgaaatgccacaagaattgggtgagtgtgaaggggagggaggagagttagaaggggctggtcacgaaggcttgtgggaggagaccttggcgatggccccactgtgttggcagcaggtggctgtatcttggccactcgtggattgcag

SEQ ID NO: 153876 - DNA, 259 bp, Homo sapiens
cggcgccagcacggatgtggtgtctaaatcactggtctcacctaactgcggcggtgctttctcttccctctctgtgacacagtcccggtagtaagctatttgatgagttattgcccgtgacatttgctgtcacctcacaatttaaagctgatcatttctcaaacttttatttcagcctcttaacactgggacctgtagtttggcaatgctgccagcaggtggaggtggtgtctaaatcactggtctcacctaaatgcgg

SEQ ID NO: 153877 - DNA, 381 bp, Homo sapiens
cgctacaactccatctagtaagtgctatcataagtccaaatttatagaggggaaaccaaggcacaaagcagctaaataacttggcaaaagtcacatccctactaaggggctgagaaagggtcagaagccagttcgtttagctccaaaatccacctgttaaccactatgttctcgacctcttatctaaagtgaagataagctccctggaaaatcccaagagtaaactgattgacaggaacagtgtttctcaaagcagaagccggcaggcgcggtggctcacgcctgcaatcccagcactttgggaggccgaggcaggagaatggcgtgaacctgggaggcagagcttgcggtgagctgagatcgcgccactgcactccagcc

SEQ ID NO: 153878 - DNA, 346 bp, Homo sapiens
cgctacaactccatctagtaagtgctatcataagtccaaatttatagaggggaaaccaaggcacaaagcagctaaataacttggcaaaagtcacatccctactaaggggctgagaaagggtcagaagccagttcgtttagctccaaaatccacctgttaaccactatgttctcgacctcttatctaaagtgaagataagctccctggaaaatcccttcaggagcagagtatccccatccatagagtggaatattagggagctattgaaagtggtgctgggattacaggtgtgagccaatgcgcctggcccttatttatttatttttaaatggacacataataattg

SEQ ID NO: 153879 - DNA, 120 bp, Homo sapiens
ctcttcttttttagtttattagagtggaatgataagtcatttaagatccttttttgtaatatactcatttatttctttaattttttctctatgtatagctttagctgcatcccataagct

SEQ ID NO: 153880 - DNA, 309 bp, Homo sapiens
ctcttgaggggttcatgttttgcccgcctctccttgtctctcagtgggggctgagtgagaccttggaatccgtcaggggcaccgtacacactcactttgggccccgggaaatcacaatccttttgtttccctggcagagtggcaggaaaggggcgatgaagaaagaagaacaagcgtgttgggcatgtgggggacacagagtggtttaagcaatggtttacgaagtggaagcctgctgagcctgtagcgccgtggccaggggtgcgggagggagtgtggcacacctggtctcccctaagacacagccac

SEQ ID NO: 153881 - DNA, 606 bp, Homo sapiens
gtccgcagctgggctttaaagttgcaagctgaaattcacaggagccagttatggcagtatggatacttaatatggaacgtaactcatgctttgggaagtgttggcagttgagagaccgtaaatgaagagattacttaatatgcggtattactgaggattctgaagagagtatgttatcagagactacaaattcggtcagcccttgggagtgttgaggaatgttgtgcaaatttagttaagtagtggatgattagtttctttcagctttagattctatgaagtttttggctaccatcttaagttatctaggattttataaaggtagggataatggtttctactaatgacaaatgtaaagaaacacagacataagctaagcattacatatttcatatatatctatcaacatatatatgggttccctctccccctttctcttaactaactatttgggagtaatttctcccaaataataatggcagtttttggagcctatgtcttaaaaaggtaattgtgaagcaaactaatactcacacagaaaatgacctatgctaagtggaaggaggatcaagagagaaaaaatgggtctgagttcttgaatcaatt

SEQ ID NO: 153882 - DNA, 125 bp, Homo sapiens
tcctgggattacaggtgtgagccactgcgctcggcctactgctctatgactttgtggtgattaacctttctgagccttcagggcataggtttttatgctcaaactagggataacacgttcgcgag

SEQ ID NO: 153883 - DNA, 133 bp, Homo sapiens
ttccttatctcctccttctaacaacctgccctccttccaggctccccaatttcagtagatgggaattttaccattttgttacttaggccaaaaatgtgggagccaggcagatcacgagttcaggagtttgaga

SEQ ID NO: 153884 - DNA, 1020 bp, Homo sapiens
caagataaccaggataaccaacaatattgagggagaaaaataaatgagaggactgacactacctaacttcaagacttactataaagctataaatatccagatagtgtggtattggacaaagggacaaatagacaaatagattactggaatagaatatatatatacagcccagacatagatccacataaatatggtcaaccgatccttgacaaaggagcaaaggcaatgcaatggagaaaacataatcttttcaacaaatgattttggaacaactggacatctacatgcaataaaatgaatctagacacaggctttatgcccttcacaaaaattaacctaaaaatgaatcaaatgcctaaatgttaaagacaaaactctaaaactcctagaatataacacaggagaaagtctaaatgatttggggtatggagataactttttagatgcaacatcaaaggcatgatccatggacataatcattgatcagctagacttcattaaaattcagaatttctcctttcagaaagatgttgtcaagggaatgagaagacaaaccacagactgggagaaaatatttgcaaaagacatattccataagggactattatccaaaatatacaaagaacaataagaaaatgaacaatgcaatttaaaaatgggcaaaaggacagacacctcactaaaaaataaatacagatggaaaataatcatctaaaaagatgctccatataaatgtcattaggtaattgcaaattaaaacaacaatgagataccactacacacctgttagagtggccaaagtccaaaatactgacaacgccaagttcttgtgaggatgtgaagcaacggaaattctcattcactgctggtggggatgcggaatggtatggtcactttggaggatagtttgtcagtttcttaaaaaactaaacatactcttaccatttaatcatttgggtatttactcaaattagtcaaaagtgtatatccacacaaaaccttgcacatggacgtttatag

SEQ ID NO: 153885 - DNA, 654 bp, Homo sapiens
gtttagctcctgtaagtaaaactcacaaaagcatgggggcctccctataactaggtccccctggagtttttatcactggggcttgtccacacctagcaatttttgtcagctacagtttgtttttctgcccctctcccagtttctgtggaggtttctgctccagcctgttgtgattctctgtatccacctgactgtctctccagttctgggagcagtggtgtcttagcctgttttcacactactatcaagaactacctgaaactgggtaatttataaagaaaagaggtttaattgactcacagttccacattgctggggaggcctcaggaaacttacaattatggtggaaggggaagcaaggcacttcttacatggcggcaggagaaagagagcaaagggggaagtgccacttttaaatcatcagatctcatgagaactcgctatcgcaagaacagcatgggaaactgcccctcccccccgatccagtcaccgcccaccaggtccctcccctgacatgggattacaattttagatgagatttagtggggacacagagccaaagcatatcaagtggtttctcctgtgacctcactgaagtttttgagaaatacatgcacgtgtattttttaagtcatcaagagcaagtaagtataa

SEQ ID NO: 153886 - DNA, 355 bp, Homo sapiens
gtcaaagatcaaaagcgaggctgctttccctgctccttttacacaccagtggttttctttgcacgcaacccttcatcagtcaaacattcactaaatgttgcatattttatctctcttagaatatgccctagatcctaatcttcacaagtgtcattggttatctagtgcgtcagcacagcacataagcctaggttcaaacctctgtcactcagtagtagtctgggcctcacttcattcattcattgatgcatttattctagattccaggaaagcagtagagaataaacagacaacaataacctgcctcactgaagtttacattctaatgaggacagtccaattaacaaaacaaata

SEQ ID NO: 153887 - DNA, 380 bp, Homo sapiens
acataagctatttgcctgcaatagagattttgagaggctttgaaatatatttgattccttctttaaagtaaagcaacgtgcatattgtggaggagagtttttgaagtgaagaagtgacccaaagcaaaaggaatcaataggtagcaagtacatatacaaagaaaggttaattcaccaagggctgatgtgctgaaaatcctgctccccaaactccgctccagaaccatcaaatacagctggagcaattacgtcagacacgactggtattaaagtccatcgtgggtgcacaacaggtggacaacgacgataaaaagaacaatttcattcacaaaatgagtttttgtcaggttcaatgacaaagaagttttcattttttttca

SEQ ID NO: 153888 - DNA, 528 bp, Homo sapiens
atactgaagcttcaatctctactccttttaggagctaaagataggaaagcataaaacattttctattactaaaaattagaattctaaaaaaaactttcccactgaacttgctaagccactgaagatcttaaaatggagtcgagggtgagaattcgggagaaaagaatgagggcaattgtgctgaggcgaggcccagcggttactccagtgaaaggcagctgcagtggagcgccacctgcatccacacacttcacacggtgcccatacacagctggggctcgatgaacatctgctgaactatattaataagtgcacaacttcagatgtgaaataactttataaattagttaaggctttaagagtcttcacaggaatccaatcccttgggtatgacccttctcatgttaagtgtcaccctcaggtaaggccctttattttcccttgaggatatctcttcagcctataaaaaagaaaagaaccaactcccactgaggcaaccacatctttcaatttacccttaaagcagag

SEQ ID NO: 153889 - DNA, 388 bp, Homo sapiens
agaagcacagcgagcccgccaggggcacagcaggcgctcgatacacagccactgccgcgatcaaggggggactcaatacatagccactgccgcgatcaaggggggactcgatacatagccactgccgcaatcaagggggcacagccactgccatgatgaaggtggggaggccctcactggtccaactccaggacggagcagaaaggcagctgcgggttcgtggccccacccagctcccccgacccgggtcgtccagccacgagaagcaggaaaggctgtcacgccgcagatggcccacaaggaccaggagatgtcacgctcagggtccagacacgcaccgcgccagcccatgtgtacaaaatgcccacaggtacatctacagaggcag

SEQ ID NO: 153890 - DNA, 343 bp, Homo sapiens
aattaacaaactggccttagagagacatatggaatggtattcaagaatacaacagaggagcaaacagtgtggtgtcaaagaagttgatatttgaacagagtacagagtcctcaattccttaaaactcggcaaaataagccagacaacaggaatgtgcagctactatgaaatgctccaagcaggatggatgccttcatgcatgccaaatccagagaccaaaagctatcaggtcactaaaactgaaaactgaccagtgtctaatcctttcctcctctttcagcaactacagactgagttacctaggaaaacaaaacaaaatacgatgtctctttgaagtcctcag

SEQ ID NO: 153891 - DNA, 540 bp, Homo sapiens
tgaggtgatctagaggatcccggtgttccttcgtctggctttaagatcaggtataatatatcctcataatacagctgggaagtgttccctccacttcaattttgggaaagacttagagaagaactgacattcattcttctttaagtatttggtagaattcaccagtgaagccatctggtcctgagcttttcctcgtggggatgtatccgattactgattcaatctccttttcatgatgggttggttcaaattttctgcttctttattattcagtcttggtaggttgtatgtgtctaggaatttatttcttctaggctatacagtttgttgatgtatgattattcatagtcatcacattactgactgcctgatactgcttgtagtgctttttaaagctatacaatcatagttaagaaaatacatcattctttactttcaaggacttaacaagtcaaatgaggtcaacacaagtagatagaaaaaacccctaatacctttataatgtgcaggagaaagacaaagactagacttgtttgcaat

SEQ ID NO: 153892 - DNA, 242 bp, Homo sapiens
tcatagtgctaaaatcccttgggtgtttaatgatcatggagtagccaggagcaataaaatcagtcacaggaaatgaaaagaaagcacttggatcttttctctgcaattgtctcatcagttgattcaaagcttcttgaaggggtgtctgttctacttcttcttgtttggctaaagagcttgtgagaggcttctcaggaggcaagtctaatctcacaggggcgtgacaaacaagatggttacag

SEQ ID NO: 153893 - DNA, 475 bp, Homo sapiens
attctcctgcctcagcctcccgagtagttgggactacaggcgcccacgcccagctaatttttgtatttttagtagagacggggtttcaccatgttggccaggattgtctcgatctcttggcctcgtgatccgaccgcctcggcctcccaaagtgctgggattacaggcgtgagccaccgcgcccggcctctgggcacttttaacaacactgcaaactgccccgtgcccttcctgcgggacggtcactgctccaagcacctttcaaatgctttccacccggagagcacactcggctgactccccaccccgagagacctcagccccaccacgacccttcctccatccgcacggtggaacctgcccctaccagcttcagagcgcctggtacccacggcctggagccacgcccagaacaaaaggggccctcagtatgcactcttcagtggtatcaagagagcggctccgtcgtccccac

SEQ ID NO: 153894 - DNA, 489 bp, Homo sapiens
aaggggtttgaagagggggatgtgacttgatctggaggtcccaggggaattgtgctggggcctaaggatggggaggagtttgccagggtggcagtgttgggatgagggggtgatccaagcacaggggcaacataattcagaatgtttttggtggcggggagcaaggatgcagggcaggactggaaggagagtgggctgtggtgcagagggcgtagaggggactcaggatggccacggggtaagatgagaaaagcctcttaagagccacagaaagtcactgaaaagttttagctgaggaccgttgcaacgatggtcctcagctggtactttttatttttttcttcgtctcttcttcttttttttttttgttgtcggatagggagtctctcgtgagggccaggtttgattgaatgtggcgttgaccatagtgcagtgcagcctcaagctcctaggctcaggtgaccctttcgcatcagcctcccaattagc

SEQ ID NO: 153895 - DNA, 215 bp, Homo sapiens
acaggcacagcaacaggggctggcaaggatgaggtccccaggaggcaggaatccagacaaatgtgaaggcattagcagcgagtggtagagccctcttctggagtcaggagggatgaaagagcaaagaggaacagtggagagggagcacaagagaactcgtaagttggattttttttttttcccaaagagacagacagagtcttgctctgtcaccc

SEQ ID NO: 153896 - DNA, 485 bp, Homo sapiens
ccggccagcactggtttcttataataatacctacctcataggttctggcaagaaacaaaaatgattcatgtaaagcgcgtagcggaagccgtggtaaatgttaacttgttttctttgttcctcattcctcagttctcttggatgaacgtgccctgataagcactctgtgcaaaagcatgggtaggattttaatttgattgtgtcctgaagtatacatttgagaccccaagtctaactcgggggctccacgcaaaggtggggaatttaactttcccattccttatccaggccggtccctctcagccgtcacggacccccgctgccccagacacaccaccgttttatggctccacacaacgacagcaccatgttgctgtaagggtcccaccttcttaggggaggcgatggtggattcagctatagttgccaggagaccagttttgtactgggcagcttggtattggacctttcagtcaggaaactga

SEQ ID NO: 153897 - DNA, 263 bp, Homo sapiens
tcaggaagagttgttgaggactcggtttatgtttcatagcatcctcctctaaaggccttggggaaagtggtcctgtcaggtctcagtctgagggcttcatgtcctttttccccaagcattgggtttgtgtttctattttacattgcataactggtcataggtcctgtccactttgccaaagaaaggttgcaagtttgattctgagcttcttcagtagcaatgcaaaaaggaaatatgaccagttatgcaatgtaaaatagaaa

SEQ ID NO: 153898 - DNA, 268 bp, Homo sapiens
cacctcttctagaagaagggtttaggcagttagcttttatttcacaaagcatttacaatctagctagtctttgtattctcatgtccctctattttcccctggtgtatcctgtgttgtaacctctctcctgcctcccattctgcaactactttgttctttcgtttcctcccttatcttttttttttttttttttttttttgggagacagtctcactctgtcaccaggctggagtgcggtggcaccatctctcctcactgcagcctccgc

SEQ ID NO: 153899 - DNA, 456 bp, Homo sapiens
agatatgaatttgcagggggatggacaacgtgttgttcaacccaacacaaacaatatcctccctgtttgttccaaagcacacttacttccttttactggtaactttttacatctgacattagcttgctgaactaatttatagattgcagttgcctggtcagataatttgtctttaatcagacttttattactttgttgttattggagattattctagtgaaaaagggaataagcttaaaaagttgcttgtcaactacacacacacacacacacacacacacacacacacacagaaattcgttgtaaagaaaatatactgtagtctgggtgtgatggctcatgcctgtaatcccagcactttgggagactgagtcaggattgcttgagcccaagagtttgagactagcttgggtaatatagagaccccatctccacaaaaagttaaaaaattagcca

SEQ ID NO: 153900 - DNA, 333 bp, Homo sapiens
aagagttggtgggttaaaatggagtcatctcattttctgggttgacaggtgaagctgcgctgggatgcttgattcttggctggtctctcctggggtcactgatgaagccgcagtcagctggagtagatcggcacactacagcctcaccgacatgtttggacagctgctggctgtaccacctcagaatgggtccatcgccactttcgcttccttgtagtgctccaagccagttatggggtcagtccaaatccagatcccaggacctcctcttcttgacgggagctgtggcaatgtcacagtgccaagggctgggctgtgtgaaacaggatgaga

SEQ ID NO: 153901 - DNA, 217 bp, Homo sapiens
ggtcacacctcttgaaaaggttttgtttcccccgtcaattggtattcaaaccaggtcagcagattctgtttgcccggctccgctgccgttttcattttaatttgcacctgttgtgcagttgttcggaaggcaagtgcagacccgcggattatacaaagatcatattatgagcagatatgcacggtgtaatctttttgtccccagcttcacatgacaa

SEQ ID NO: 153902 - DNA, 361 bp, Homo sapiens
aggtgattcaaagcaatatttgcagtttatttaaggtcgttctattccttttgccgtctttatgagagttccatttccttcctgatattttaccctttggatcaaaaacacagaatgtgttaacatcacataccctgcccagccacccactatcacctattcagctctatagattcaagccccttctcaaagcaagttcacagcatgtagaaaccggaaaaagaaggaatttgagagagactacagctcacagcccatggaatgaaaaccaggagcacccatggctgggtgtggagggactgcctaaggaaaaacaccagagaaaaatcaatcctcaacagcccatcaccagttatgaatc

SEQ ID NO: 153903 - DNA, 231 bp, Homo sapiens
cccttttgtcaatacccctatcaatttttgctagattactgcaatgaacttcaagatgatcatacctgtagttatcccaatttcaatgggattcctatatgccattttgattcatctgcccagtatacaacttttatcaataaagaaagcagctccaaaaatccacaggtgcccccaagattctacaaaaatgggaagaaatctcacctggcaggactcaatgccaccccc

SEQ ID NO: 153904 - DNA, 194 bp, Homo sapiens
ctactgacggagtcctgtgtttgtgagtcgtttcccctatggggaaggttatcagtgcttcccgagtgagcatggaacacttcgagttcccagggttatagacagtcgttcccagtgtggctgaggcaggagaactgcttgaacctgggaggcggaggttgcagtgagccgagatcgcgccactgcactccagc

SEQ ID NO: 153905 - DNA, 275 bp, Homo sapiens
cctccccagtgtgtcccctttgcttttagatcaaccgtcccaaggctcttggcacattcgtccccctcttgcctctgtacttggcttatgccctttctcctccttggtgtccttccctcctcttgctatgcaagaaaatcctcccttctatagttgatctctctccctatgaactcctaatatatttatagttggttccatatagcatgatatttcattgaatacagctttaccctatttgataatttttgtctgttactcttaccttcctaact

SEQ ID NO: 153906 - DNA, 467 bp, Homo sapiens
aatgatgctatttaatttatattttaaatttgggtgctttgtggagaatgggtgggaagatggagatagggataagagaggaaaatggaaagccagatggttggctgcaatacaagcaagagctgatcttgacttagaccagggcggtggcagtagagaaaagggacaggcagattacatatacatatagagagagacagtttttgtgtttgtttgttttttcactttttgttgttttttttttgagatagtctcgctctgtcacccaggctggagtacagtggtgccatcttggctcactgcagcctctacctcccaggttcaagtgattctcgtgcctcagcctctccagtagctgggactataagcacgcaccactacacccagctaattttttagcagaaacagttttgtcatgttggccaggctggtcttgaactcctgggctgaagtgatccacccgcctc

SEQ ID NO: 153907 - DNA, 286 bp, Homo sapiens
cctgtctgttcccctcaatggctggaggccccctccttccccagcagaatgagcccagcactccctgcagcagtggggccgtacggcgccatccaactctgatccgtgttcagattccaacagcctcagccgcaaagcacacagaagcctgtcctgggcccagggcagactcccagtggacaggagagttctgggccccgtgtccccttaaccctgtcccaggcccagggccaactcccagtggacaggagagttctgggccctgtgtcccccttaaccctgtccc

SEQ ID NO: 153908 - DNA, 357 bp, Homo sapiens
ataaatctataagagctttggataacaaccaccactttgaccttggattacaatgactaaactttcattttctgaagacttacaaaagctaatcatttggggtagctcaagtttgaggggagattcttttgttactgtttttaaaaagctcaactggatagttaatttaaaaaatattcaagtgtctttcagatccttcagaatgaaacttcaaaatgttcaacgtaacagtttcctccctattctgggtgtgtgccgaagttttccttcccaccaattaagagagaaggctgggcccaactgaattatttggacaggagtttgatgtcagttaaataccacagtaactggcatttt

SEQ ID NO: 153909 - DNA, 207 bp, Homo sapiens
acaaagcacactgcactttcataagggatccccatgactgacagatcagccattcaaaagaagggaagtgtcagagatggctctgctagactcatgtatttttcagtagaacctgggtcaggatggtatggttgggagatgcttctggagctctgggaaccacaagcctgcatgtcccatggtggagtattagcacaacttgaaaac

SEQ ID NO: 153910 - DNA, 305 bp, Homo sapiens
cagcgtacaatctaagatgacagttgagattttcttaacgaaagtttttcatagttggacaacagagtgctcctacatgcccacattcagtgtccattccaaaacaaattctacttcttccatgtgtagcattttgcagataaactgagtagtgattattcatccagcacatagttcttacccctgtttctcacttgctttggcctcggcaggccgggatatatgagaaaaaccaagaatttggagtcactggatttattagttccatctcttactaattcagtgaccatgaataagctccaaca

SEQ ID NO: 153911 - DNA, 290 bp, Homo sapiens
tgctcacatgcactgtacacaagaggacacacatacacccatcctcacacttgcatacacacagacacatacacagggtgcatgcacacgtccacaccacgtgcttgcatgtacatacacatacaggcacgtacacacccccacaccacatgctgtctctctcacacatacacacatgggcacattcacagggatgcatacacgcccccacaccacatgcttccatacacatatgcatacatgagggcacatacacacgcccatgccacatgctcacacacatacatggg

SEQ ID NO: 153912 - DNA, 398 bp, Homo sapiens
actgaggttgtcagtttctgttatttcttttttcttttagtgatgattcctgcgtattccaagaaccgggcctatgccatcttcttcatagtcttcactgtgataggtgagtgcaggtaacgtggccagcattttgtgacaggatcccgagagctcagggaccgatacaccctgctgcctccacgacctgaaacttcacatccgtgtttttcactccagagatcaccccagggatcccctgccaacagcttttaaccccagagatcccccaccaacagcttcacccgagggatcccccaccccacggcttcaccccagggatctcccgccaacaggttcaccccagggatcccccaccaacagcttcaccccagagatcccccaccaacagcttcacc

SEQ ID NO: 153913 - DNA, 493 bp, Homo sapiens
tggtgccctggagctgccgcttctgctcttagcaggatgatgggcaggacagggagaggctgacctacttccagaacctgcctgagtctctgacttccctcctggtgctgctgaccacggccaacaaccccgatgtgatgattcctgcgtattccaagaaccgggcctatgccatcttcttcatagtcttcactgtgataggtgagtgcaggtaacgtggccagcattttgtgacaggatcccgagagctcagggaccgatacaccctgctgcctccacgacctgaaacttcacatccgtgtttttcactccagagatcaccccagggatcccctgccaacagcttttaaccccagagatcccccaccaacagcttcacccgagggatcccccaccccacggcttcaccccagggatctcccgccaacaggttcaccccagggatcccccaccaacagcttcaccccagagatcccccaccaacagcttcacc

SEQ ID NO: 153914 - DNA, 945 bp, Homo sapiens
  misc_feature (106)..(106): n is a, c, g, or t
  misc_feature (185)..(185): n is a, c, g, or t
  misc_feature (223)..(224): n is a, c, g, or t
  misc_feature (230)..(230): n is a, c, g, or t
  misc_feature (242)..(242): n is a, c, g, or t
  misc_feature (282)..(282): n is a, c, g, or t
  misc_feature (292)..(292): n is a, c, g, or t
  misc_feature (299)..(299): n is a, c, g, or t
  misc_feature (354)..(355): n is a, c, g, or t
  misc_feature (357)..(357): n is a, c, g, or t
  misc_feature (372)..(373): n is a, c, g, or t
  misc_feature (382)..(382): n is a, c, g, or t
  misc_feature (385)..(386): n is a, c, g, or t
  misc_feature (388)..(388): n is a, c, g, or t
  misc_feature (393)..(393): n is a, c, g, or t
  misc_feature (395)..(395): n is a, c, g, or t
  misc_feature (398)..(399): n is a, c, g, or t
  misc_feature (408)..(409): n is a, c, g, or t
  misc_feature (412)..(412): n is a, c, g, or t
  misc_feature (415)..(415): n is a, c, g, or t
  misc_feature (422)..(422): n is a, c, g, or t
  misc_feature (425)..(425): n is a, c, g, or t
  misc_feature (429)..(429): n is a, c, g, or t
cgtgggctgctggatggcggaaccccaggcggagtcggagcccctgctgggcggggcccgcggcggtggcggcgactggccggcggggctgaccacttaccgcagnatccaagtcggccctggtgccgcggccaggtgggacctctgcattgatcaggctgtggtcttcatcgaagatgctattnagggttacctgttcgggtgggcccatttccagaaaaanntttggntgctgggctacntcgtggtgctggtggtgtctctggtggactggaccgtgtncctgagtctngtgtgtnatgagcccctgcggatccgccggcttctccgtcccttcttcctgctgcagaactnntntatgatgaagaagannttgaaatgnatnngntggtngntgnnggaaatggnnagnatngggctgntgntggncatccacctgtgcctcttcaccatgttcggaatgctgctgttcgctggtgggaagcaggatgatgggcaggacagggagaggctgacctacttccagaacctgcctgagtctctgacttccctcctggtgctgctgaccacggccaacaaccccgatgtgatgattcctgcgtattccaagaaccgggcctatgccatcttcttcatagtcttcactgtgataggtgagtgcaggtaacgtggccagcattttgtgacaggatcccgagagctcagggaccgatacaccctgctgcctccacgacctgaaacttcacatccgtgtttttcactccagagatcaccccagggatcccctgccaacagcttttaaccccagagatcccccaccaacagcttcacccgagggatcccccaccccacggcttcaccccagggatctcccgccaacaggttcaccccagggatcccccaccaacagcttcaccccagagatcccccaccaacagcttcacc

SEQ ID NO: 153915 - DNA, 274 bp, Homo sapiens
tctggattctgtaatggtagataaagggctataaacacacatacgcacatatatatatgtctctatatgtctctatatatatgtctatatatgtgtatatatatctgtatatatctatatagacatatatacttttttttttttcccctccttgagacagcctcactgtgtcgcccaagctggagtgcagtggtgtgatctcggctcactgcaacctccgcctcccaggttcaagtgattctcctgcctcagcctcccaagtagctggaactac

SEQ ID NO: 153916 - DNA, 448 bp, Homo sapiens
tttcccagatcctgtaggacgagtcttggttttggggtgtgtgagtgtggtgtgtgcgcgcgcgcctggagggaaggatcaggcaacttggcgagagaaggaaggaccgggcgctgcttataacccaccgaaaggcacgctttgcccgcgtgaaactgacaagaaacattgccgcagtggcttgacttcatcatctaagtatctatttacttggcccccacccacccactccttttcctctgccagtctctcccctacctccttgacgcctcccactctccctccctggctctggcagagggaggaagatgaaagagaaagccgctgccgctgtgatggacaccacattgatagatgctctgacagtggggagaggcgggaatctgggactgagaaaaaaaggaaaaggggaaaatataacagacattgctcaactattaagagagaa

SEQ ID NO: 153917 - DNA, 350 bp, Homo sapiens
aacgggtgatgcggttgtaagtaagagctaagtcccctccagcccctgggttgtcttttctatgacaacatacttcgcccacaccactccccgcacccatggcagccccataaggtcacgtttttcctaagtcagcagccagctggagtgtaagcactgaagagcgtttaagcgacttctctaacctccattcataaatatgagccaagcacgagagcagctcgacttccagtccagagggatggcagagttcaagagcatccaggaaacaagcccttcacgttccccaattttcatggctaaaactgcacttgtctacttttccaaccgcatcacccgttcgggtacct

SEQ ID NO: 153918 - DNA, 250 bp, Homo sapiens
gatggaacatccctccttggtacatccctcccaagcccctggtctccagcatgcattccctgaaaggcctgacccaggcggggaacaaagccaatctttctttctttctttgaatgaagctaaacttggcctggcagggtgtctcatgcccataatcccagcactttgggaggccgaagcggcaggatcacttgaggtcaggagttcgagaccagcctagccaacatggtgaaaccctgtctgtgctaaa

SEQ ID NO: 153919 - DNA, 363 bp, Homo sapiens
gaaggtgctgaattcccgcgtgtgtttaaaatacacgagcgcagactccagtctacaccctgtagtccgcattaagcaggcataggtagctgtaggagtggaacaaaagcagcctgtgtttaatctgttcacaaatcttttgttcctaaatacttggaaaggtggttagaccaagtaagggagagattcaggactgggtggaagctttgatttagactgatggctgacaatgcagataggaggctggtctctctaaacacataaattcgttatctaaacagagtgggtaatgtcacaaatgcctgggaacctaactgaaacagttcatgatttgactgtagtcagtccctgtttgggcactcc

SEQ ID NO: 153920 - DNA, 500 bp, Homo sapiens
aatatctctattcttggagatagatttaatgagctttttctccctctctattcacttattccttgtgcatgttatcaatattttgaaacataatgtcatgtcctttgatcagttgaaggctgacattgaaaaggcttatggggattgggtgttgtggctcacgcctgtaaatcccaatgctttgggaggcagagtcgggaggatcacttgaacccaggagtttgagaccagcctgggcaacaaagtgagatcccatccctacaaaaatttaaaaaactagacatgtgccattacacttcagcctgggtgacagagtgagactccatctcaaaaaactaaactaaactaaacaggcatggtggcacacacctatagttctagctactcaggaagctgaggtaggaggatcactcatgtccaggagttggaggaggcagtgagctatgatcatgccattgcactgcactaggccacagagtgggaccctgtctcaaaaaaaa

SEQ ID NO: 153921 - DNA, 426 bp, Homo sapiens
gctctcctgaagagtcagcaactctctcccatgtgatgtatgctgcaacctcatgatcgacttgcaaatcctcagacacatcatgctttcactcaggatccttctttgcttcctccatttggcaaacaaatcaatattatttatgctttagtctaaatgtcacctctcccaggaagtcttccctgactctctactttaagtgtaatcacttattttctctctagattctcactgcacatgggacattcttctatcatggcactatccaatgatattatatcaatagaaattagggattttttttactctactcctcccaagaccataagcacattgaaggcaaattttattccttgccatttctatttttttcttttttttttgagacggagtcccgctctgtcgcccaggctggagtgcagtggc

SEQ ID NO: 153922 - DNA, 517 bp, Homo sapiens
aataggaatttaactttatgtttactcttttttctttgagacttagtcttactctgttgcccaggctggagtgtagtggcgcgatctcggctcattgcagccttcggctcccaggttcaagcgttctcctgccttggtgtcccaagtagctgagactacaggtgcctgccatcatgcctagctgatttttttgtatttttagtagagacagggtttcaccatgttggccaggctggtctcgaactcctgacctcaggtgattgcctgcctcggcctcccaaagtgttgggattacaggcatgagccactgtgtccggcctatgtttacattttttaaagaaaaatttcagacatatacaaaatggacagatagtctattagtcactcatggaaccatcagtcacctctcaccttcaacagatatttcctgccagtttttaggaatttaatatcattaagttatttgctaagatttgccaagataagtatctgtaaggtcaaggtactgacatcagaa

SEQ ID NO: 153923 - DNA, 181 bp, Homo sapiens
gggaggcagaggtttcagctagccaaaattgtgccactgtactccatcctgggggacagagtgagaccctgtctcaaaagaaagaaagaaaaaaaagagactagaagccttataaaaggaagagagatccctggccccttccgcaatgaggacatagttaaaagacctcaccagacactac

SEQ ID NO: 153924 - DNA, 484 bp, Homo sapiens
ctggcgctgaaggtcgggactgccccttggaagactggctggatatgcagtcgcttccagaaggggaattcttcactatttccttgagattcatgcactgattcactgctcacctgtttatccagtggcaggaattgtcctaggcaatgggattccaaggtgaaaaagagaagccacaagtgtcaattgtgtattgagtgtttaaaaagtcattcccacggacacttcttccagaaccaaatattgtttcaagtgctcatgttgggtagtatggatgctgcatatgtgagtgtgtgattttgttttctttcttcatttatatttcaagttgaaccagtgagaggagcttctcttgagtgtctgctgtggctggcttctggcacgtggtgttccttttccagctcgccagccttggttctgatgctctgggatatacaccctatctgcacagcccttccacaccctcggagtgtgccctgaccta

SEQ ID NO: 153925 - DNA, 515 bp, Homo sapiens
atgtgtcagttcactgctccaaatgcaaacacggatagaaggaacctgaccagaaacagtacattccgagggtgaaaagcttcaaccaacacagcttcataaagtcaaactcgagcaaaatgcctagggtcagcggtgatctctggatagaaaaagctctagaatttgctaacccccttctgatagctagttttcaactatagagcaaaagaggtcatccctctggccatgaatggccattccacggtgcatgctcaagttgaatgcaggtagttggactgaacattcggactccaaggcgtttgtctaaaacccagctcggccgtttttctccactaaaggagaggcaaaaatctggtttatcaagattgttactattttcgctgagtttttgggtagatagaaaacatttttaacatacctagttgtatgcctgagcatgtttaaaaccagttgttgggatgagctattcctggggtgttagcccacacaaaatatagcaagtgctgtaaatg

SEQ ID NO: 153926 - DNA, 539 bp, Homo sapiens
caggaggatcccttaaacccaggagttcaagaccaaactgggcaacgtagtgagactcatctctacaaaaaatttaaaaataagctgagcgtggtggctcatgcctgtagtcccagctacttgggactaaaatgtaggagggaagtcgaggctatagcaaactgtgatcacatcactgcactccaacatgagcaacagagggagactttgtctcaaaaaaaaaaaaaaaggaaagaaaagaaaagacaacattctgaccacacaacaaaaatcacagttgttagataagcccgttgccaacagggtattcaatccctggcctaaattaagaaactgcagcagtccttggtacaggtttcacttagctcactggggcttcccaatgagtcttgaaatgttgggtgacacagaggctttagatacaataggctttcagtgacctttagcaacacagggcactaaggataaacttcaggggtggggtttggtgttggctaaagcaaaacaaataagaatctgtggacatagagattatccta

SEQ ID NO: 153927 - DNA, 581 bp, Homo sapiens
aaaagaatttattctttcatgtcataaatgcattgcatgaagattcaaaatttgatgtcattgttataagaagtacaacatttctggctatgtagtgaacattaaagaattactagatgaggtgaaatctgaagtgctcattacttgttagaaagctctaggaagaagtcagagaatgacttcaagataattctttccactgataataaagtgaagtgcattatgaatgatgcttgggaagtgggtgatgatgggtttgagcatatggttgaggtaatagggagagctcgttgaaggtcagtgggacctagaaaagttcatgaaagagtggtggtgaaaacagtgttgatgcattaaaacaggtagctgagattgtggtcctttacatgaaaaactaatcagcacctttgctattttggagcagacctttaagattacctgtataataaatgtgtgcagacaccatccaaaaaggtgtaaaaaattgcaaaggaaaaataaatactggccaacacagtgttcttaaaagtacccatgcctagtgagtcccctcccttgctgttctttcacattctgttcca

SEQ ID NO: 153928 - DNA, 586 bp, Homo sapiens
ccctttgcttcccaaattagaatatatgctcttgatgggcagagatcctgcctgctttgacacctatgatatcttagctcctaagacagtgtccagtaccttgcaatctgtcaacaatcacttgtggcatcgatgtgcagttaacaaagtggccagattatatcttcagaagttaaaatcttttgctcaatgtagttaactatattcccccacaaagttgcaaagtaaaacctaagaatctgccttaaaactcataagaattcaataatttgttgcctgatgcccctcccaagttaggggtctgccttcatgtcttcccccatgagagggaagtctccctgtggggcagtgactcgcacctgtgacagggatgttctagcctttccttgccaacctccccatccccacccacaacccatgtctccaccataataaaatgaataggctcgaagggataggccgatggcaggaaagcataaagatcagtttgaatgatgaggcttagcgataaaggctcaaggagaaggaagccagtgtgtgttgatcagaaccctgccaggtacgtcacagcaggttgatgccctgt

SEQ ID NO: 153929 - DNA, 593 bp, Homo sapiens
gctccaaggcggacggctaagcatcaaaaactgcggctctgatttacattccccagctcccaaaccaagcatcttctttatatattttacatgataacttcctattaaggtttgacgaaagaaggttttgctactgaaaccaagtctgaaaactaatgttaatacccacggcctctagtacccagttacaagactataatcagtgggaaagcagtgcctccaacaacaacaccctagggtcacttactggtctatgcttctaattctgttccccctcaggaacgctcatgttcagaaatagtccagtttctacttctaatcctcctcaaaatggtgcaaactctgggtaacactggtagagccaccagaatgctaacaaggaaaaaggaagggagaaatggagggaaaggtaagagaaggaaaaaaatatatacaataccaaattgaaaagaacctggagcatacacagttggtggaagtatagagtggtacattcactttggaaaactgacaatacccactaaaactcagcaactgcactcctaggaatatattaaacaaatgcatgcaagcttcattaaccaaaagacatg

SEQ ID NO: 153930 - DNA, 431 bp, Homo sapiens
gagaggctgagccagacagctgcacctgcccaggcacggcagttccccagaggctgccaggcacctcggtcagagtgaccacaaagtcactttgtggagagttcacgcgtatcaactgtctgagtattaattttccccttaaaccagaaaagccccagagctttgcttccagccctggcccaggctcatctaggtacaactggatgttaattgtatttgtgccgaaacagacatcaatgagaagcattaacaatgatcagaagcctgcaggtgtgctcagggtccccttggccacctctgtacgtctgcatttctctcacagagaaaactctcacagggcatttcaagatatttctggaactgaaacgggcttttacactttgctcataaataacaatcacaaaccttcatcttcaacagaatatccgggt

SEQ ID NO: 153931 - DNA, 322 bp, Homo sapiens
caatggaagggacatagccggttcttcaaaacatatagtaagttaacataaaattacagaaatgtggtctttgcagaatgggaaaccctaaacaacttacattttactcaggatttagattccatgacaatgtggcctttttgcttcctaatctgttacttgcatacacgatgcttaatggcacgactcaaagtgttggtaagtgtggtgtacccccgtcccgaatcctgaattttctgtggacaggaacacattttaataaacgcttgcctagtaaaggaagttactgggaaaattctctgtgggagccaagcaatgaaga

SEQ ID NO: 153932 - DNA, 695 bp, Homo sapiens
gggcaggcattagagttggtcttggtccagtcctaactcccttttcttgtttgagtctgcacagttgctagtgttacttgtgggttgaaaagcacatgtaggctacagtgtatgtcttttggagctgactgggataagagtgaacaggaaggtgatgattgacctgtgcagagcatgcactgtcgtctttggggctgcattcagtttagtagttagaacataaatgcatgtcaccattcctgatggctttgctcctgacagccttatgacagggaaattaccagcgagatccactgatccagcagtagtttgagaattaaacatctcaacctgagtctttagctgtcactttgcattatttcttccacttataaaatggggccaggcacagtggctcatgcctgtaacttcaacactttgggaggccgagaggggcagatcgcttgagctcagggaccagcctgaggaacatggcaaaacactcgtctctaccagagatacaaaactagctgggcatggtgatgtgctcctgtagtcccagctacttgggggtgctgaggcaggaggagtcccagctacttgggggcacttaggtgggaggatcacttgagcccgggagatagaggctgcagtgagccatgtttgtgccactgcactccagcctgggcaatagagcaagaccctgtctcaaaaaa

SEQ ID NO: 153933 - DNA, 664 bp, Homo sapiens
tctcttggccttgtggagagaagtaggggccagggaagctttctgggacagggatgcagccacatttcccctcggcaaaagccggctcaaggaatgcagcaccactggatctccaaggagctgcaatgagaccaagaatggggctggggtgaatccagggaatgggacgcccaggacaggcctaagagagtccttatcccggtgtcattttctgggtgaaaggaatcaagggtagtcctaactcttaggctttccgggaagataagagcgtctggtttggccagcaagagggtggggctgcccaaagatatgggtggtcaggaccaagggttgaagatcaggctactctctgtgtttctgagaatcccacctgtgcagcgcagggactggacacttaagaagcccagaaaacagcagcagagtctcctggccaactctctctctgtttatacatggggaagtggaagcctagagctgcctcttggaggaaacaaatacaggcaactgcaagaaattgctcagtgagccttctctgttccattcaagctccactttgtgtcccacgctcctgcattccagtgctttgttatcagctgggccacatccaattgctcaggggtggctggaggagtcccttgcagcctgtgccacaacacacaatgcc

SEQ ID NO: 153934 - DNA, 175 bp, Homo sapiens
tgcaaagggtgaggttgaaagactgaccatcttagaggctggagcacagaaactgagtgcctggccaagatgaggtctgatatactgagatgtgccagcgatatcctatgagcctgctacactgagaggtgctaggtgctaatcaggatcgaatagacaatgatgaggaaatgaa

SEQ ID NO: 153935 - DNA, 435 bp, Homo sapiens
ctcataatcttggcttcagatacacacacataaaaataatcacattcttaagtcctatgatcaggtactgtgtctccatgatctccaatgaatagtcccaaatgttagcttatgaaaaatgcacagactctgtggttaaatacggacattgtagagagtttataaacaggtggaagacccatcgctgggttaccctggggagaaacggtctttatcctgagatcatgtccttcctgctgtgtgatggaatgacagtgacagtagagggtgatgtatttgttggggttagtctttaaaatgtgggaataaaaaatgattttgttaaaaaaactcaaaattttactgctatttggacatctggttctgactaatatggggtaacaggaacggggatttaccctcctgctgctgtaaactactagaaaactggatgaa

SEQ ID NO: 153936 - DNA, 291 bp, Homo sapiens
cacttaacaaatacttaactcttaaatatgaaggcttttaaaaaaggtaaatatgacaccttaatttagtatgcagtttctttatctgatatctagtcattgcttaaatttctttgattatttactatattggttattctgtttgaatcaacattaaaatgtggtctactcattggatttagttgataaatctcttaagtctctttttatctataggttattttccctgtgtgttatgtttcttttcttttttgttcttgccatttatttatggaaaaaaacttgagatgt

SEQ ID NO: 153937 - DNA, 725 bp, Homo sapiens
cagactgttttaggaagtatttgtgtatctcctccccctagtagtttggtttggtcagctctgtgcccagcatctctgctcagaaggcaaggacaagggagggaaggagggactgaaatttctttggctgactgaccagatgcagtggctcatgcctgtaatcccagcactttggagggccaaggcgggttgatcacttgaggtcaggagtttgagactagcctggccaacatggtgaagccccgtctctactaaaaatacaaaaattagctgggcgtgctggcacatgcctgtaattccagctacttgggaggctgaggcaggagaattgcttgaaccagagaggtggaggttgcagtgagctgagatcacgccattgcactccagcctgggcgaagaagcgagactccatcaaaggaaagaaagaaaagaaaagaaaggaaagaaaaagaaaaagaagataaaaagaaagagaaagaaaagaagaaaagattcctttgtctattctcattagcagctcattcagttccattcagtgaacactctgagcatctgcctcacttcagaccttgctccagatgcggaattcgccaagatgagtgagagggtctactttgggcaaagctctctgagccttgaggtctgtcttcatcccaaagaatttgcactctagcaggggagaggggaaatgaatggacgaatatttatgtattacttgggttgag

SEQ ID NO: 153938 - DNA, 728 bp, Homo sapiens
acatgataccagcctctgttgagtcatagcaactgctatgaacaaacatgtaaatccatctaggggaagaaaagagtgttgcaaatgcctttcatcaaaatggaagactacttcaacttctatttgctcttcttgttataaccaagctttttcttttttcattttcctctgcctttctttccctccttttttccgtccccactatcctccatctttcagaaatatcaaaagctgaatcttcccaccgaacactgcaatcatttgaaatttgtgtataggccagcttcacatcatcagaaattgtgtaaccccatgattcccaggcctcagctggtagtgtagttatttcaaataatatttaatacaataaattctatggcaataaaagaatttggacagtcccttcgaacttattgcaatgagatttgacttgaatttaatacaatgaagtttcagaatagccaagtaattttgttgtggcatgatttaaagggtatttaagtacaggtataggtgattgagtttgtaaaacctaatcagaggtaaattgcagttttactcttatcacgtgaatgagcattcaaaaatacagaaattctttacttagcataaggtgatttttaacagtgtggcaaagagtgtaagtgaacatccttaactttttgttctgtcaaggggagaataaagataccacctggctgtatgtataaatttgcttactaagatgg

SEQ ID NO: 153939 - DNA, 497 bp, Homo sapiens
tgccaggctgaggggacaccttacgtccctccctcctgagagccggttcctcatggctcctcacacttcctgaaggtttaattgtggattctccacgttgtgtctcagcctacaaagacctgcagtggttgtaccttggtttgaatggatcctcatgtcaccctaagagtctctttccccatttggcacagtttgccgtgggtgtcatttgacatcacaccaggtggctccggcttttctgcgcgtcggtttctgccgcgctgagttgccgccgcttgctctctgcccctcaggtttcctctgtggtttgggctctggctgcctctgcagcagctcaggatatcggcgtgattgacacccacagcgcaggggccgaaccccaccgacagcacaggtgcctccagagccggctccaggccccagaccaggaacctcacccacattaacgcgtgacacccctgcggttcctctgagttgtgatatgatatggataaaca

SEQ ID NO: 153940 - DNA, 729 bp, Homo sapiens
ctgactgcagtgcatgtctgttgctgtcctgatgttaccctctttcccccggacacagagatgctgaagtgagctggttcatagccctttgagaggagcatcgatgatacgtttgcattaacatctgtccatttgtctccagatacagtctgggtggcctcatttaagtagatgctgcacacttgtggcctcctaattatgttctgcacctgtgtgtagtctttgcagctgctctggagactccggggtccccaccaggccctcacaggttcccagcccatctgtcagcctctccatccatttgctgacatgtgactcagctgcagacagagcacaggggtcaggcctccagctgcctttacctgctccatcattatagccagaaacggggaatgagtcttggggaatgtgcttctgcctggctttgctgaggctcatggaggccacccacctgggaatcttgagaccttttccttgggaagaagagaggggacagcaaagagagctggtgagctccttataactgagtaataaatgaaagccctggggtatggctcctcgggccagagacaatgagagctcagaccagacttggtagttttggcaaaggagacattaacatttgtttcaaggctgtttcttgtctttactttgtatcacctcctttaagctgaagtggggaatggttttcatcttgagacagtcccttggagcacatcctgcactggc

SEQ ID NO: 153941 - DNA, 387 bp, Homo sapiens
cccaaggtcacacagctaataagtagtgccaaagtcagggttgaacccagctccaggcccatgtggttggccacatctccacaaggtcgggccctccagagtatctcagagacctggagcttcagatacatcccctgagaaatttccagaaaagagctgcagtcagaaggttcaaggacaggctgggcgcggtggctcacgcctgtaatcccagcaccttgggaggctgaggcgggtggatcacctgaggtcaggaggtcgagaccagcctgaacaacatggtgaaaccccgtctctactaaaaaatacaaacaattagccaggcatggtagtgaatgcctgtaatcctagctcctcaggaggctgaagtaggagaatcgattgaac

SEQ ID NO: 153942 - DNA, 362 bp, Homo sapiens
  misc_feature (347)..(347): n is a, c, g, or t
gcgccgcgcctccgggtgttggggagtccgggatgatggggaatccggggctcgccctagtcgcggggacaccgccttccaggagctgtccccaggcaaactcacagacatcttcaaagaggcttcttggacattctgctttttgctcctcataacaggcttcgatggagtttctctcttattttccaggttgcagtgagccgagattgtgccactgcactccagcctggccacacagcgagactctgtctcaagaataaaataagaacacttgagctgaggaccatcgttgagctgaggaccatcgttgagctgaggaccatcgttgagctgagcatcgttgagcntgaggaccatcgttg

SEQ ID NO: 153943 - DNA, 205 bp, Homo sapiens
gcttcttcaggtacttgaagggttgcatatgttatatatgatgggaaagactaaggaagtccagtgggtcaagagtcccaggacaaatattgtggcttcctatgaggaagactgttcttgtgctaaccaagaggtgtcccctacgtaagatgatgagttggcatctcaccagtgggcatactggaaaaccctgtggtcacttcct

SEQ ID NO: 153944 - DNA, 579 bp, Homo sapiens
tgcaaacacacacgcgtgtgtgtacacacacacaagcatctgcatatttgtacatatcagtgctttgtaaatccttaagtgctatgtaatacagatgtagagtattactatttctccctcagcagccaacttctaaaacccacatctgcttagagttatcttaggggtggcataagttgttactctggttctcctgttgaatgtctcacaaattgttgtctagaactctacgatgctccacctaacaatggcctgcttcctcaatcctgcaagcttgtacagtgcctaggtgttcatgcccatggctttatttaaccttcataacatccctaagagagaaatctgaaaatctcctcttaaccagattactagattcagtccttggaactagccttgataagagctgcactagcaaaaagaaagaacattatgcagtataaaatgtgtcataagtatgcttatttggatgattagcttcagtttatgttgacattatttgatctgattagtttcagtttatgaagacattgtttgatttagaccacacgtaggctgtgtatccacacttaagctaactag

SEQ ID NO: 153945 - DNA, 284 bp, Homo sapiens
tgaacagattttgaagccacatggcccattcaaatcattatggctaggatctgtcaaccatttaatgtgttgtaagcattatgttcagttctttaccttgggcatctcatacagtcctcttaattgctctagtaagcattatctgcagcacagagaagtcgagctctctgccacaggtctcatggctaataaatgatgaagctggggtttgatccaggtctggggctcccacacttgaccactatcctctgctgtctggcccaaaatttacaaactctaggaaa

SEQ ID NO: 153946 - DNA, 236 bp, Homo sapiens
tcttccaagtatgatggttgtcttgatgaaaagcacttgtgacattgagatgcaagctgacttagccacttttccatgcaacattatgtctacttaaatgacaaactacagttagtctaactttgatttttgggagatcttttcttgcaaatgaacaaaatgagtctgtcacttcaagaaaagcaattaacgccaggcgcggtggctcacgcctgtaatcccagcactttgggagg

SEQ ID NO: 153947 - DNA, 617 bp, Homo sapiens
ggatttgcattttactgagaccgatacatgtcaagggaatggtatttaaaattagtgatatgtgttgatttttcaaggactatagcccatcaactacaataggctccaaaaaattctggtgaaattagcttcttggagccttccagtttacctactatgttattcccactataaaatattctcaacttttggggttttagccacttaagttttttattttctctaatgtctctagtatctgctttagtttcctgtcaatgctagactctgtggttcagcagttcatccattctcttcccagtactcaacctcgttgcttatagtttcattacattcatctagcaaaaccttaattctgtatgtttgccataccattagtgcttagagcattttttcagaaaagaatcctggaaaaatggatcttatctcacctgggccctcaggactgctgggctgcctggtgtcagcacttcccgccattttctatagcaccagtattattcttaatactttaaaaaaccaccaggcacggtggctcacgcctggaatcccagcactttgggaggccaaggtgggcggatcacaaggtcaggagatcaagaccatcctggctaaca

SEQ ID NO: 153948 - DNA, 333 bp, Homo sapiens
atccaagccttttacctgctactggcttcatttcatcccctgtccagcctaaacctacttcataatcctttacttcagccagctacctgcactagcaacttgataatcatccttgattctgtcttcttccttacccactacagtgtcaatcactatgatgttctcatttttaatatctctcacatctcaccatatgcctccatatccattgccgtttagttcacgccctcatcgtttgtaatctgaattactatagtagctactgattggttttcctgttctctttcaagccatccactaaagcctgagtggatctcttcatacttcattctt

SEQ ID NO: 153949 - DNA, 484 bp, Homo sapiens
gtgcgtgaggggaagctgatgttcgtgcgctcggaacagcggaatgagttctgggccccactcctggagaaggcctacgccaagctccacggctcctatgaggtgatgcggggcggccacatgaatgaggcttttgtggatttcacaggcggcgtgggcgaggtgctctatctgagacaaaacagcatggggctgttctctgccctgcgccatgccctggccaaggagtccctcgtgggcgccactgccctgagtgatcggggtgagtaccgcacagaagagggcctggtaaagggacacgcgtattccatcacgggcacacacaaggtaagtgtcccccatgggtggggtggcaggccatgtccaggcatcacccccactgacgatgctgccccaggtgttcctgggcttcaccaaggtgcggctgctgcggctgcggaacccatggggctgcgtggagtggacgggggcctggagcggcagg

SEQ ID NO: 153950 - DNA, 665 bp, Homo sapiens
tgtagttttgaggaatatgctattttataatatatagtaaaactgtttgaattattactttaagctagaaaaggagatttcctacatcccaagctgctaattcttaaaacaattcaattattacggtagtaaagtaagaaatttgttatccttctgtccttaaaaccacattttaaattaaattattggtagcagtttactgtgtatcttttcaaatgtagtaacctttttaggatgtcattggtgactataaagtagttctaaatcaagcataaatagccattgaaactgtttattatagaaaacatgaaacatacaggtagtgtgctataatgagtcccctgaacttaacactcagcttccaaaactagtgactcatggtcatattatttcatctttactgtttttactaccttgattttccaaagtattttgaagcaaattatagacatatttttaactagaaatatttcaaagtatagacttctttaaaaacgtagccacaaagtcattatcacacctaataattatttactatcaaatatatagcttcagacttcctcaatttctcataattttttgcagttcaaagcagaaccaaataaggtctatacattgacacaaatgattgttttcaagttatcttgctctgctaactgagatta

SEQ ID NO: 153951 - DNA, 295 bp, Homo sapiens
aacagtgaggggtggaagtgtgttggggggtggatctttcaccaatggttaagcaccatcttcttgatgctgaccttgtgatactgagttctcatgagatctggttgtataacaggctgtgacacctctttcctctctctgtcttgctcctactctggccatatgcaacattttattgctgcttgtccttctggtataattgagaggcttcctgagtcctcccagaagcagaagttactatgctttctttacagcctactgcagaactataagccaattaaacccctttttgtta

SEQ ID NO: 153952 - DNA, 172 bp, Homo sapiens
ttctaaatggtagcctccaatagtgaactcccagttggcaggagcatcaaaatatagctcactaagtcaaaattcttctgatagggagaggagagagaattaataatcaaaacccaaggcgggcagggccagggccaggcacggtggttcacacctataataccagcactat

SEQ ID NO: 153953 - DNA, 421 bp, Homo sapiens
agatgtgacataaagctataaaactcatttaagtatactttatactttaaatggcatctccttagcattattatacaaattcgtgtcatattgtcctatgtttccattttaagactgatctaggcttggaatttagtattttactatgtgtgtatatatatatgtttatgtatgtagatatatgtgtatgtgtgtgtatatatatatatttatgtatgtagatatatatgggtgtgtacacccccccactctgcttctttaggtatcacttaagctagaaatcagagttttccccacttctttacaattcctagtcttgtgaacatagtacatactcattaaattaactgtattatccagttgataaactgttcaagttatacaatcactcagtgtcaaagccaaggagattcatgcattt

SEQ ID NO: 153954 - DNA, 914 bp, Homo sapiens
cagaatacgagctcgagcctgagttaaaggtcaagcagtttgtctcagtttaaattcacagagtagggaaaaagcctaccctttgataagaagagctgcaaagtcccattgcaaaggttatgaatacagggaagggtaaaaaaatggactcattttgtctcaagtctatcaaagactaccatccctggtctcagttatacatgtctctcctaaaggaaaaaatatgcccaatccaaacccagaaattgaatccagttctaacatcatgttaattccagggtctcctatactacatgaagttctgatgtggcttctcagatgtaactccaaaaaggggaaaaacaggagctacctagcaatcaccgatcagtagtaattctgaaatcatgctagaaaaatgttaccaagtccctcatctacagaataggaaatgtttcttaaatcctgcctttgctccttgggagtaacttccctgtttattttttcacatggtacccttttgctctaccctctatgatgaccttcgtagtctatcactttcctgggccacttctgaagaaatgttctatttggcacctgattagttttcttagacttattctttcctatagaaagttgcagacaatttagttgatggctattttacctatgaaacttactgtaaaactttgtgtgttttctttaagtctggttatactctactctctgctgcaaaatccatactacaattattttcaagaatgcttctttgtacacacttaactactgctatttagggatttgacatttgtgggaccactctttaagatttctagaagcacccttcccctttcctttcccctgttgggcaccacttaattctttcagaggtgttaacaaagggttttacggccacagccttaatttgatcatag

SEQ ID NO: 153955 - DNA, 427 bp, Homo sapiens
gactccatgagaaatctgaaggccagcttggagaacagcctgagggaggtggaggcccgttacaccctacagatgaaacagctcaacgggatcttgctgcacctggagtcagagctggcacagacctgggcagagggacagcgccaggcccaggagtaagaggccctgctgaacatcaagggcaagctagaggctgagatcaccacctaccgccgcctgctggaagatggcgaggactttaatcttggtgatgccttggacagcagcaactccatgcaaaccatccaaaagaccaccacccgccggatagtggatggcaaagtggtgtctgagaccaatgacaccaaagttctgaggcattaagccagcagaagcagggtaccctttggggagcaggaggccaataaaaagttcagagttcattgga

SEQ ID NO: 153956 - DNA, 436 bp, Homo sapiens
accgtgcttcactccaagcctcagaggtggacacctttgataccagggtgaccaatccctggtcctggtcctacctacatgagagtgatagagctctgggctggggtacaattgagtgacacactcttccaagtcctcttcctccaccacagagcacaatttcataaaggttttggcttgcattataggtaagacagcactgtgaggtggggtggggtggtgggggtgatgagagatgatgtttgagcagggaggaagagtagaggtgggccagcagacagatgggggttggaaagcccagggcacatctacttgggcaaagcagaatcttatagttaacccatcctcctaggcagtttgtcttactcaaaccagtgtcgcaaagtagttgtccagccccagaagtgagatgtattgtggtaaataaaacagtctc

SEQ ID NO: 153957 - DNA, 629 bp, Homo sapiens
gttgctgtgtagagacaatgaggaccgcactgaaagcagtggcaacaaagcttccccaatgtcatacatgatgcgttgatatactacacatgtatacatacaacatgcattctacatacagcatagcggcatgccgcaagcatacgcagtgcttttcataaacaaaaccactgaagtctcacaatggcccctgaagggggtcagtcatatgatcctcaccccatttcacagatgacaaactgaggcacagaagggctgagggtggcaatgggacggaagccccagtggcctggctctggccccctcccaatccatctgcactggccacacaagggtgctggacacagggcagtggtgtgtgggcagcgtgtgagtcacaaggcaggttccgcggtttcagggcccatcgggattcaccagcagcagcaccaggctctacagtcaggaccagatgggccttggtcaggcagcctggggcagggccaggggcctgcagcagccctccgaggatgggaggctctgagaatcctcagtgaagggcagggcttgagcctgggatggcgctttttaacagggccacgtgtctttctacataaaaaaagccccctgtcatgccaaatcttaaagta

SEQ ID NO: 153958 - DNA, 543 bp, Homo sapiens
aaaaagcacaaaaaattacagcatatatcaggaattttccagctaacgatgtgcggatgtggtagcgcgagggaaaaagagccaaactgagcttgctttgttcgctaagagaggcccccctgtaacattccttttagctgtgcatattttggcttcatttgtacagttttaactttatactgtgtgtggaggagttcagttgtaactggtggtgcctaataattctattgcaataattaaagttcatggagagctgttaggttattagttcatagaagctgcttcagaaaacggagtctaagctgaaaactttttaagtgacatgtcattactgtaaaagatggcaacaattattttctttgatttcacagcagttttttttttaagacaagattcatttatggagacaaataagaaacaacatcttaaaagctttgggtaggagtgaggggcccagactgggaatgatgagaatatggatcctgtagcctgtgaataaaacattttccaactggcttgtaaaacatgaaaatttgtgatagc

SEQ ID NO: 153959 - DNA, 343 bp, Homo sapiens
gcacttgtcattatcctgttagtcaggaagctcttcccctagaataccctacactgcttcttcccatctccaggcataagctaaattcctctattcccatgtcctagactcctggagaaaacaagaaaacaaatttcttcctgtctgagctctgggttctgacttcaacttcaagctgccttattagcggtcacctgcctctttagctgggcaggaaacctaccccactctgtccgcggcactcctctgactgcctttctgggggcttctggcacttgttccttgaacacccatctcacactttgaattccagtctcccacacctgtctaacctggccttttc

SEQ ID NO: 153960 - DNA, 403 bp, Homo sapiens
tactctgacctctaacaagtatactactaagctagttattgaacttaaaacagtcaaaactacagactacacaaattcaatgtagaaactgcatttcacaataaagaacagatacaagctactttgagattaggaaaataaacttttccaatcaaaaacaactgtgttggcagggtgcggtggctcatgcctgtaatcctcacaggccgaggcaggtggatcacatgaggtccggccgccatcccatctaggaagtgaggagcgccttttcccggccgccatccccatctaggaagtgaggagcgtctctgcccggccgctcatcgtctgagatgtggggagcgcctctgccccgccgccccgtctgggatgtgaggagcgcctctgcccggcttgcgacccg

SEQ ID NO: 153961 - DNA, 558 bp, Homo sapiens
aacccatactctcaccccacctgagccaccactacccctcatctataccccataacccctcaaccctcccacatacaaacacagcatatgctaatctctgtaccttgggtcccacagtctcctcggcctcgaatggtcctaccagcctcctccttcccaaatcccattcatcaagtcccagctcagaatccctgccatccccctggtgctaccctagagtctcccagctggaattcacttcttcctccttccttctcctaccatactttgactgaataccaatggtaggcgtgccttattttacggagagttatgcactgtctttctctacagccctcaccagacagggagttcctggagggtaagaactatgacccacaccatcccttcaaattgagtctctcacagtaaacactcaaaatatttgccaaactgggtggaacttaacaaccttttttccttttcccaccatcacctgataaaaccaaacagctccaccctaggatgccaagcaggggtccaagctcctaaacctggaaggagctggctctttttcag

SEQ ID NO: 153962 - DNA, 580 bp, Homo sapiens
attccctagtccactggaccctccttccttctgcaaggctcgtgcctcacttgatattcttgtctatagtcccctcagcctccaaaaagaagacctccgcctgccaaagaccctcttttaccttcttcagctctagatccacgggggcggccatcttggtgcactgtaagcgcctgcgcagtgggagttggactgaaatagggtggggaagggcgcgtcttactttgtgcgccggtctttcttctgcgcctgcgcatgagttggactaaccgggcttcttatctttctctgagaattgactcctgaaatatttgggtttcggattccgtgtcttcactacctgaccggtcaggtctggcttgctcctccgtatcttccagacatagcccaacgcgcagatttcccatgtggctttaagcagtttgccagctagcttaatatgtgctgctaaattgagatgtatgtagatgaggtcaaaccctcatcagtcgatcagtccttcagctagtcgctgtgctctcaggaatgagtaagagtaagtccagaacctcaggcatgacagtttgggaaagactattgg

SEQ ID NO: 153963 - DNA, 352 bp, Homo sapiens
cacttgggcagataatacttttgccacagggtatgcaataagcgtaccatggtatacttttgtcaggtggtatacttttgctacattgtatgcaataagtatattacatacaatatgattgttaatcaaattaaagagcatgatttggagtactgccagagctttctaactgaatccttgctcctctcaaatcttctagacacagttaccagagtgtctatctaaagtgaacatctggccctttctctcttttgcttggaactccacagaagctccctgtgggcctgactgaagtgctggtcctgcagagtccctggcttcctctggggcaccactgtgaaggtgttgctgc

SEQ ID NO: 153964 - DNA, 482 bp, Homo sapiens
ctcaaccctccagattcccttctttcctccttggccccaactctcccttcctgtttttctcaatactcctcacctctagaaactcttcttaaactaactgctatctagacgtctatgccatagattcccttatcctcatcatccacatttcaggaagctatcttgtaattctaagattagataccagtcctcttccaccttcccttcatacctctcaccagctccgacatcagattttgttttcaacataggggaagtgctccaggacactggtctaggaaaaattttacagctaagacctcaaaagcacaggcaataaaaccaaaagttggcggggtacggtggctcacgcctgtaatcccatcactttgggagtccaaggcaggcagatcacctgagatcaggagttccagaccagcctgaccaacatggtgaaacccagtctctactaaaaatacaaaaattagccaggcatggtggcg

SEQ ID NO: 153965 - DNA, 770 bp, Homo sapiens
gcctttaacctgtatttttacttttgtattttagagccctacctcattcttttgacctttgtgtcagagacacctccagcaatagtagagttgaccattttgagtcagcatctgatttgttttgaatttattggtttctatgcatcaaattcatttatactatttttacttacagtatttggtgtgacttgatagctcaaaagggttattttatgctttctgttccacttctgtctataaattttgctttcacagcgcagtcagcaaaactaatgggaaccatgaagccacttttctttttaagacgatcatttctgacgtttgtagttgggccaaacttgatcccacctcccagcacctcagagccactgcaaggtttatctggagaggggccaccctggctttctcctgcaaaagaagatttgggctttcaggtcaccaagtgtttgctgcagattggttctcattaaaataaactctggacagtggtccataattttattatcgacctttgattttcttgaggttggagaggcatccctttagaatgacagattttttcttggaatttcataattatataaaaaagcagtgattaaaaaaaagcaagttactggttaagaaagctggattatgtccttgatactccagtgacatatgacatttacttttcttaaactaaaatttaagcttctctcatttcctcacatcttcatctagaatttcatcctcaactagagttgcttcatgtataggtcatgtgataaata

SEQ ID NO: 153966 - DNA, 902 bp, Homo sapiens
  misc_feature (1)..(1): n is a, c, g, or t
ntttgacaggaccttccttgaattttgagtttttccactctggctgatggaactgttctcaatcctgtgttagtgccagtgaactcagtggatcaatgtgaacatcaatagctgctattatcagaaaaaggactaaccagatatgatgtcttctgataaaagaacacaccactatctacaaagaagacttgacaaaataaatcaaatctaaatttgatcatcaattcaacaccaatctatagggaacatagacaaaggaagcgcaaaagaaaggcaccacaaaagtgtaaccagcaaaattgagagtgtgaactctacaaaacaaatgatctggtttcttcaacaagctgttgaaagggaagagagaagatatagagatgaagtccattgattagaagacacaccaaccaatcacaaagtgtgggcattatttaaatcttgattcaaataaacaaactgaaatatataaatgacacttatgaaacaaaaatgtggccactgattgggtatttgactaaatcactgctcaattttattttgtgcgtgataatagcaatgtgcttatgtgttttatcttctagtgatacatactgaaatatttacagatgaaataatataatgccaattattttcttgaaattaatgtggatgtggaaagtagacagagatagagatttaacaagatggattatgagctgataattgttgaagttgagtgacaggcacataggggtttattataatatcccgtcttcttttgcatatgtttaattttccataataattttttaatggtctaaaaatttaaactttattttccaatcaaatggaagtctttagagattttattttgcaagtggcaatatgattaaaagggaaataggaaagataaattaagcaat

SEQ ID NO: 153967 - DNA, 555 bp, Homo sapiens
gcccctcaccacatttatttcctgccattttcttttttttattccgactgcagagtgatcaaggagagaaactggaagctgggcccagggataagttgtctgcccgtgcagggggaaaccataacattttacatgatatcttgtagtgatattaatcacaaagcccaaataaactgaagcccaaatgagtgagcaataggaatctaatcctgatagtattatactacctggtattaacttatactcacctgctttatctgccatgattcttatgatatctgcctctgcccaaggtggactgggttaaatgtgattagctccatttaacagatttaacagatgagaagacaatatttcaaatgagggctcttactgaatgtcaaaatggaagcttgcattactgtcattcttaacaaagtcagcaacaccaaccatagtgagtcttttatagatggacatagagatgtatgtttcccaagccctgttctgtttcctgcactgcagacatggggtggctgcccatgatggcctgcagtgagttggagctattggctc

SEQ ID NO: 153968 - DNA, 479 bp, Homo sapiens
gtgtccatcccccttcgtgtgtccatcccccttcgtgtgtccatcccccttcgggtgtccatcccccttcgtgtgtccatcccccttcgtagttgagggctggggcacatcacttattttctctgagcctccgttttctcccctgtaatataacaatactcacaaaggtaagtgtgcctatggaaggagttcatttattcacgcaacagctatttattgagcatctactttgtgccagaccctgctctagacaccagagatgccgcagcaaacaaaatggagaaaagtcctttccctcgtggagcttacattctagtaaagggaagcaggcagtaaattaatcaaaaactacaatatgcaggatgtccacgcgtgaatgctatgggaaaagaacacagaggagaagacaaatcgtgctagacaaagcacacatgaagttggctgtttagacttttctacaggacccattgctcatgtcc

SEQ ID NO: 153969 - DNA, 181 bp, Homo sapiens
tctaggtagctattggatggatgttagttacccagaaacaggcaggattagagggttgggatttacagtcctgcctgttaatctctggggaggagagagggcgtgaaggttaagttgataccaacagccagtgatttaatcaatcattgcctacttaacaaagcttccataaaaatccaaa

SEQ ID NO: 153970 - DNA, 152 bp, Homo sapiens
tgcaacctctgcctcccggactcaagcagtcctcccacctttgcctcttgagtagttgggaccacaggcatgcgccactgctcttggctaatttttgtatttttttgtagagatggggttttgccatgttacccaggctggtctcaaacttc

SEQ ID NO: 153971 - DNA, 182 bp, Homo sapiens
atagctcccaggtaggaagggagccccagagagtggtctgaacagtgactcataaactcagtgtcctttcctccagcctttaccagctgctgacttggccccttaggaatctgtcttcattccgcaagctattctccagtgtctggttcaggctctagagcagagcattccaggctttctgt

SEQ ID NO: 153972 - DNA, 281 bp, Homo sapiens
aggcatgagccaccatgcctggccaaggcaattcttatagggaattttgctgcaaaggggagcaaagaaaaaagatggtaatcgtttgaggaagtgagattaaaagagggatgttttgattttttttaataggaaaaatatatcttgtttgtatcctgatatgaatgatccagtacagaataaaaaattgatataggagtaggaggggtgaacagcttcctttcagtagacaagaaaataattatctaacatatacatgaagggatttgttttacaaagga

SEQ ID NO: 153973 - DNA, 117 bp, Homo sapiens
caaaagtgactactcatagaggcactcaataaatataattgagatggtcctctgtgctatgaaggaaaacatggtgacacagagatttgaaacctatatcactttaatttttcttgg

SEQ ID NO: 153974 - DNA, 231 bp, Homo sapiens
ctagcacccctgggtcatcttctgcaggatcccgaggcacaaagttgtatcccgggtcagagtttgtagggggtcatcgagaggtgtcatgtttccattcagagcggttccaaagcgtctaggaaggggctgagtgggacctgctgccttgcctttgttggaaggaggacccctgagctctgatcccagacaggctgtcaggacgcccccttagcatttatgtttgcaaac

SEQ ID NO: 153975 - DNA, 362 bp, Homo sapiens
gcaatctcaacgcactgcacccctctgcctcctgggttcaagcaattctcctgcctcggcccccagtagctgggattacaggcgggcaccaccacgcccagctagtttttgtactttcagtagagatggggtttctccatgttgggcaggctggtctcaaactcctgaccttaggcgatctgcccgccttggcgtcccaaagtgctgggattacaggcgtgagccaccgtgcccggcctgcttgaactgttttctcccctgagtttcccatcagcgcgctccctcccgtgccactgtgttcttccatttgcattcagtctgtctgcagctacgcgttgaagatgttactgccgtacacgctg

SEQ ID NO: 153976 - DNA, 220 bp, Homo sapiens
gaaaagagatggtagcaatgtaaaacatgatggtgaggcgaaagattacatagaaaagttttattgcatagaatgtaaattataacaatatctcatctataagctaatttccaaattactaattaatccctgaagaaaaaaatgtactttcaactaaacatctgagaatctactttgtatcaggaactgttctaagtatttggaacacaacacacacctt

SEQ ID NO: 153977 - DNA, 475 bp, Homo sapiens
ctggtgcctggcatatcacaggtgctcaacaaatagttgctgaatgaattttaggagggagaaaatagtcatgtattgaccttctatgccataagagcaggtagcaggttttaagtactttctgtgtaaagattcctttacatactttatttaaataaatgttgcaccaaagatggcttgaaactcccagaattacctaccccaactatctaacaaaatagtaaatagtttttttttttttaagcaaaaacttgcccaataaacctgagaggaaaaggaacataacctaatgcaataaactttaaaaagtgacagctaacaaaagaagcagacagtggtagagcagagaggcctgccagggcttggcttctaaccttgactatctatcccatttccaggctgtgtaagtcagcaaaatcccaggagaattcatttatatctcacatgtggagagaaggaaaatgagtatgtaatc

SEQ ID NO: 153978 - DNA, 255 bp, Homo sapiens
agcggagaagaggcaggacccaaaagaaggaggtgtgttcaccctgtaggacttgctttgtaggtgcaggtgcccagaggccaggcccgtcagtgctacctggggtggggctggagaagggaaggcctgccaggccccataggtgatgggagggccaggacctcaggttggagggaaccactgaatcctcggccctgtggtgcaggcccacacagggcatagcccctgggcactggcactgcccactgcccactg

SEQ ID NO: 153979 - DNA, 174 bp, Homo sapiens
acgtgcatggtgtgtgtgtgtgtgtgtgtgtggtgcatgcctgtgagtgtgcggtgtgtgtgtgaggtgtaattgtgcttagtgtgtgatgtgaggtgtttgtgatgtgaggctgtgtttgtatgtagcttggtatgtgtgtgcatctgtgtgtgtgtctatatgtgtgatgtg

SEQ ID NO: 153980 - DNA, 253 bp, Homo sapiens
acatgcatccacacatgcatacacagacatgcatccacacatgcatacacatgcattcacacattccacacgtgcacacacatgcattcatgcatacattcacacacatgcacacaccccatgcattcatatgcacacccacacacatgcacacatgcatttacacatgcacacacatgcctttacacatatatgcacatgcacacacacatgcattgatagtcacatacatgcacacacatgcattcacaca

SEQ ID NO: 153981 - DNA, 541 bp, Homo sapiens
ccgagattataccactgcactccagcctgggcaacagagcaagactgtctccaaaaaaaataaaaaataaaacagcttcatgggtaaatctgatacccagcaagtgtggaggctacacaggcagtcaaaggagcacccatcttagtcaggaaactgggttaacttctcagcctcaccacgcagtggctccgagattcagcttcctcgtctgtgaaatgagattgacacttaccctgcctagctcatggaggtttgtgaggattaaatcacatgaaagcaaaggggaaggcgtcatgtgctatagaaatgcaaggtgttactcattcctgtgtttgccactcccgtgccttcacccttgcttataacctgtcacctccaggactagctcactggccagctggtttgtctgtggctcttgggccttgccaccacattaatcattccgtactccccaccgtggggagtacggaatagtgtatattaagatttgacgccatcttctaagggggtacgatatttgggtaacatgtcactccttatc

SEQ ID NO: 153982 - DNA, 584 bp, Homo sapiens
tgggagggtgactgcaccaggaagctctgaggagccatcaggtattctggtccccagggcagacagggccagcaattccttacctattccacataggaggagaagccctactgaccagtcagttgcaggcaggcaacagtgctatggttagccagccttatggcgtcctgctgcagctgggtaggcactggaggcagagatgtggggatgatggtggagggggtgggagggagatgtgggtgtagtccccagctctgacacagcacagtgcccactggctgactgctgctgtcactcctggagcatccctcactctgtcatgccctgctgagcctgcacaacctcgaggccaggcagactgtgagaacttggagacaggagacccaggttctaatcctggcatcacctactcatacagtcactaagtgggccgggtacagtggctcatgcctataatcccaacactttggtaggccgaggtgggcagatcacttgaggtcaagaattcgagaccagcctggccaccatggagaaaacctgtctctaccaaaaatacaaaaattacctggacgtggtagtgggcg

SEQ ID NO: 153983 - DNA, 502 bp, Homo sapiens
agaacaatgattcctaacgaagaggcaggtccaagttagaggaccgtgtcgaagtgtcaccttcatcccccaagctctttcccagttggagtgctgttacatcctttaatcccatttgacctgtgcataatcagtggtggaaaggagcaaatcagaagcaaggcctggctttctggaaggcaaaattaaacagtggacctgtgacatgggaaacacggaggacggggaatgcctgggctgttactgacttcaagcttcctcagaaggaagatgacatagatgggctcgtccctattagtgagcgccactccctggtttcctcctctttacacttatccttggcaaggaactccaggcagcacagcaaagccagtgggccacagcttttggagccacgaggatgaccacatagtagtgctgtcaccctggacatgctcttcatcctctggggctcagtttcctcatttgtacaatggggataatacctacctaatacgcagag

SEQ ID NO: 153984 - DNA, 335 bp, Homo sapiens
caattaaaatacagcttttcaggaacaaacacttaaataaacctcatggcagataaaggcagtctactgaattcagacccagtaaaataaataagtgctacatgtcctgctcagggaagaaactgccacgccctccccaatccacttccagagccatctcccctctgcaccccactccccaactcaacacacgtacctcagcaaggcgcacagccctgaggtgctgacctggggcactcccgcctgccttctgcctgctgtgtgcgggaggtgctgccagcccgtggaccacttcctcctcctcctctgcttctccccaacgagaagcggcgaag

SEQ ID NO: 153985 - DNA, 272 bp, Homo sapiens
tagagtatccaacatcagctaagtgctcagtaaggcttaggtgccatgagataattctttgccaacaaaatccctatgttgttgaggatggcgatactcccggttcatttcctagccttctttgcagttgcggcagctcctgagatgtaagaggaagttattgttgggggggcttcaggaaatctttttaaaagggtctgactcctctggcaagctcttcctttcttttcttcttcaagacaggaaggtgggcatgatgactgtagcggcag

SEQ ID NO: 153986 - DNA, 540 bp, Homo sapiens
taatggttacatctttatgagacaagagagtatgctgatgttcaggaaaaaaaatatattctttaccaaatgaacactctaattaaccaaatgttttcattgctgtgtactttatttggcatagatgactaagctaaaccaataaatctgtgactgttttcaaaactgtatttcaaatagattttttgggtgtaccattatgtctagtgtttagttttatttgtttaatttaccacaataccaaaatgtttcttaaaatgttagaccacacccacccacctccacacttcacctagcagaaaatccaggtcatctgtagaagttgaaaagcaacacaaaaaagctcatgcaccttcatctaatcctccaaccctgggcaaggtaaaagctctttccagagcattgcatcccagtttttggaaccgtacctgctcccaaccccaggtgtgaccctgtagcaggtaggcaaaattactgtgacaatctcacaatccatcagctacagagcaaaggatcctctgaggagaagttaggattgct

SEQ ID NO: 153987 - DNA, 523 bp, Homo sapiens
caaagtaataatttactaattcatcagtcctaaaagagtatacaaataataatcaatttataattataatcttaatggtagaaaatttacacaggcggtacggcagtctcatacagcaaataaaatatggttttccaaattttaaaaaatgcatatttcctcatataattctattccattaaagatatattgattttagacctcctaaaagattagcagtataacagggccaacaagaaacaaaaatataaaaatgcacagccctcaggagctctcagtctgctaaaggaggaaaatttgcaaatggataaattaaaagaactagtatttgcagtatctctcatatctttgttctactgtgtcccatacttgtctaaaagctccttgcttttagtggaaaaacctcaaaaaaaacacacacacactcacacacacacacacacacacacacacacactcacacttcaatgaacttcaatttcaagcccagggagtatcacagaaaccccaacattgccatgaa

SEQ ID NO: 153988 - DNA, 366 bp, Homo sapiens
ggacgggaatattctaggtagggagaatccttggatgaaaagtccttaaagtgacaaaaagcttggcagcttcctggatctgcaagatggccaatgttccttgaacacagtgcttttttgggagaaatgcacaggcaatgttaagaggtaggctgaggcagatcatgcagggccttcttggccatgtttaggaatttggattgaacagctagatggatggaggtgccattatctggaatgggaaaactagaaaaacaacagttttgagagagtatctcaagaatttaatacgttaagtttgagatgcttacaagacaaccactaaatacacaattgggtatgtgtaaatctggattgaaaacaggt

SEQ ID NO: 153989 - DNA, 229 bp, Homo sapiens
cttgtcttgtgtgggtctgtccgtcttcaggcccttattcccccgccatgctaggaatttggattgaacagctagatggatggaggtgccattatctggaatgggaaaactagaaaaacaacagttttgagagagtatctcaagaatttaatacgttaagtttgagatgcttacaagacaaccactaaatacacaattgggtatgtgtaaatctggattgaaaacaggt

SEQ ID NO: 153990 - DNA, 479 bp, Homo sapiens
ggtgactggatcatgggggtggtttctctggaataatttggcaccatcctcctagtcctgttctcatgatagagttctcacgagatctggtcgtttacaagcgtgtggggccctcccctctctctcttcctcctgctccagccatgtaagatatatttgcttccccttcgccttccgccatgattgtaagtttccaattaaacctcttttctttataagttacccagcctcaggcattattattattaattttttttttgagaccgagttttgctcttgtcgcccaggctggagttcaatggtgcaatctcggctcattgcaacctccatctcccaagttcaagcgattctcctgcctcggcctcccaggtagctgggattacaggcacccatcaccatgcctggctaattttttgtatttgtagtagagatggggtttcgccatgttgggcaggctggtctccaactcctgacctcaa

SEQ ID NO: 153991 - DNA, 627 bp, Homo sapiens
tccccttcttgaggatcctgacacaggtttgctgcagcaagtcagatatgattcttccctattcggggccccccacggctcttctgggctagggcaggtttgccgcagtaggtacttgccgctgaatggaaggcccacctcagccccccacatctcagtataaataatgcgtgcgctggagaggaatagcaaccagactgcttgggttttgccatgtcttctcttgcataagattggtcgtggaggaaaggcaccctctgaagatgagagtgctggagagagcgttgtgcgctgtggttgagaagagtgcgctggtggggagaggagactgatgggcaagaacgctgcagcaggctcgtcctgcagctgtaaatggcacaggactggagctcttgaattccagttctaggcaggggagcgtgggtgttggatgaaaggtttagtcctgtgttacatacaggactaaagtatagtcctgagtaaagtgtctgaaacaagaagcatgtgaccacctgggcacatcatttttctacctgagtggtacttggtgtactaaagagattatgggatgcagcacacttagacaaggtggaagaatctgagtgggtctcatcacgttggagttgg

SEQ ID NO: 153992 - DNA, 381 bp, Homo sapiens
ttgtaccttctagccttacctttcttctgaacgtcagtgtagaatttccagttgctagctaaacttctctattgggccacctcctgggcacctgagaattaaccaggccacacatccacactgggggaaacatctccactaagggggtgaaattgattcttgggaggagggtaaagaacattttagatattattctgcttgtggtcctccaaagcacacgctaccccacaaattcttattccttagcattaaatttctcttcttaattaaagtgaatttacttctctccttaggagggtcataatgggaaaaaaaataaacagggttgagaaacactgcgctaggccaaaacagagctcgggaacactcccacctcacaag

SEQ ID NO: 153993 - DNA, 478 bp, Homo sapiens
ccgtattccccaacctaaattctgactgcttaatgtagaatcctactacatttattggacaacatccttcttgttgggctgcctcatgggttgaatcccagtctatgattgagctaccttgggtcagatgcatattccagtctaatcagtaaccactcctgcctgaaaagactgcctggccttgctactttgaaggatgggggttggcggggagctgtgggaaatgcagttagagggatcaatagatgatgcaagagcattataattcatggcagagtgtccctgaaaaaaacggtgctagtacactgtagcaaagaaacaaaagggctactaactactgggtgattgttaccaagcccttcacatatgttaactaatttaacctttttttttttttttttggtggggggcagcgggggaggtatgcggagtctcactctgtcgcccaggctggagtgcaatggcgcgatctcggctc

SEQ ID NO: 153994 - DNA, 544 bp, Homo sapiens
agcccactcacattgtagggagtattactcagtgtactgatttaaatgttaatcacatctaaaaaatagccttcagagcaacatctaggcaggtgtttgaccaagtctggttggcatatcctagttagcacacaaagaacagatggtggattaccgtagggaaaaacatacgcttactcaaccttacctacaacagtttcaacaccaaaaaagatttacctgggctgaaagtcctgaaacagctgagacacagaaccaggaagctataacttatacatgacaatgtggatacatacttaacagctaccgcagctgtagctatactaaaatacagactttcttcagggtttacttacccggaaaggcaagaatacaagcataacaataatatcacggtgtttatatgcaccaatcactctctttaatatatacagctctaaaacaaatacctctaataatttaacaattacattaagtccatatttctatactacttgggtctcaacatttgtcaaaacatcaattacttttgaaacattacaat

SEQ ID NO: 153995 - DNA, 368 bp, Homo sapiens
ttatctcagtattaaaacaacactcaggtatcactctaaaaatggtgggggggaaggatagttgaagctacagacataatactgtcctctctaataatatgtatgagtagaattttagaagatatgtaagtaaaaactgtaggatacgaaatggagagatgagagcacacacggcccaagtaggtattgatttacacctacaggtttgtgattaaaggatgagccaagaaagggataaaaggaagatcttgagcctgcacaaggcagacttctgcctattccttaaaatctgagaaaagaaactttggaacaaaagagagagccaattttattctgattgtctttcaggaatatacttgaatgccaga

SEQ ID NO: 153996 - DNA, 370 bp, Homo sapiens
gtttcaatatatgattgttgggaggacacaaaccttcatttatagcactgacatttctctgtaagcttcagccaacctggtatctaagctctttctttcttcctccctacctaccttttttcctctcagggtcttaaattcttgttcacttattatgttaaatagtttaatgatctttttgttttactgtgtccttagaaataatgagattttagtctacctttaatactcaaagctactcatcaagttactttgtaaaaggaaagggcaaaatgcatagtagagtaattcctagttcctttgctgagcagaacttactgtgattataaactttcattttaaatggaagtcttttatcatcatcatcatc

SEQ ID NO: 153997 - DNA, 104 bp, Homo sapiens
tatatcccctacttctacgctaacatcctgcatgaactgaaatgcccctaagatctctctgaaaccacactctctgactagggcctttgctcttctttcctccc

SEQ ID NO: 153998 - DNA, 580 bp, Homo sapiens
cccatttctcactcatgctttgccatctctacatctcaagggtgtgcttggcaggttggtgccctcttcagtgccggctcttcctcatgtgttttctaggccgtactacttccttgatttgagtagtcagccctatcccatttacgttctgtcttccagaaatgtatagagctctttctttcaccactggttctttttcagttctcttcattgttacagagctatggctcttttatgcctcttgtcctctcttgtgttagatcatatcttttccagagtaaatccagtctaatgtcccttattcctttcatctacacaaatatatcatacagaaatcttatagacaccttagtgcgtgagataggaaaaaagaaccgactgtcttttcctattccactctcctcacccgcaatgcttcacttctgataccaggtgtgaatgattttccttgctcatcagttctctggcggataccaattagatgtcctgtaatttaatgcaatggacactatctacctggaattagagttaaatctcacagggcccctaagactgtcccctacttcaaatgtcaatcaca

SEQ ID NO: 153999 - DNA, 340 bp, Homo sapiens
tctattcttccaggcacttatgttcttttgcaactccccaaactgcctattgctgtccactgcagacttactagcctggcaattgccctttctttctctctccccacagacctcccatgtcttgtttcctacaagtcttatacaagttggtaacctgattcatatttacatattaatgactgacagctgccaggggaattagaagaggtttgggaaaggcctctccctgcagctttgaaattcccacctgggcaacaacttaattagctgatctccaagagtgttcctaatcaaattaattgacaagtactgtacagtgaaaaagattagattgcttaaa

SEQ ID NO: 154000 - DNA, 605 bp, Homo sapiens
tctgcagatggcaaagctaaaagagtgcactgtaacacacaccgtctggggctctgggggttgcgggtaccccattagatgctaccatggggcagcacagagttctgctcctgacagcgctaagaagcatttgtcctagctgctgcacccaattacctgcgtgctccccctcctgtgaggggctgagagctgtgggctaagtaaacgagccacccacttcatgagtcccatgaaggggtcaaggaaaattttctacttcaccaccaaacatattagctgtggttccagtttgcctaggtcaaagtaatcctgagctctaggtaatattggctcctctccttatccttgcatactgctgttactaaccaccaacttacctaattgttccctctttggcttctcatctttttcatcacatttgtaatatattctctgtgttcatttccctgtaaaatacactcgtggtgttcataccctatgcagtggtttcatttttcggtttaaatcctaatgatacaaaaagcactttacatcttatttagtccttacaagttccctacaaggcagtaatcattacctcttttacagatgagaaaacccaaaag

SEQ ID NO: 154001 - DNA, 382 bp, Homo sapiens
tcattgtttaaaaaacagtactgccgtatcttatcttaaatatatatatatggctacatatttttagcacagtgctacaaagagtttgtgaaaattacacgtaacattatttctatctgcaggcagtatatgttattatgtatatattactatggcgattttataccatacagtcatgtgctgcttaaagacaaggatacgttctgagcaatatgttgtcgagcatgtagctacatgctcgaaaaacagccccagtgagagcacaagaggaaagaaagagaccttcagcttctgggcatgtcctgccatgctcagtcccccaacaaactggggaatctcccctcttcacagtttccatgcagaccccaaaaagagctctatc

SEQ ID NO: 154002 - DNA, 597 bp, Homo sapiens
gaaaaagccagacaccatattttaaggacatacaagcaaccctgtggggacacccagcagggaggagctaaggcctcctgccaccaaccaacatcatcaactagtcaattctgagtcaaccacctttgatgcaaatccttcacctagtcaagccagtttcgataactgtagttttggctgacatcttaactcaaatctcataagagtttttacggttttttttaagggtgtttcccaagctaaaaccacaaattattgacccacataaactgtaagggctaatacatgcttattgttgttttgagcctctaagctttggggtaatttgtcatgctgaagtagataaggaatgcaattcccttcaagaattatttatcataatgttctttatattagtgtaataaataaggaatatatcaagaagaaacagtatgttcatggagaaaacatttgagaccaaaaaaacttttaatattattattttcaaaggtacataaaatgagagaaaattctcacagattcctaagtactcatcacctatctttaacaaccattcaatgtcttactgctctaccactgctgatcttactatttttt

SEQ ID NO: 154003 - DNA, 167 bp, Homo sapiens
ggtagttccccccgtcagtcctgccctgctgtaatgattcatgactggcccaacaggaagacctcaaaacattttcctgagcacagccagccatctctagggagcgtgggagcccaaactccctgcccctccaatcctttactccagttacacttgccaggaaagaa

SEQ ID NO: 154004 - DNA, 246 bp, Homo sapiens
gtatgacacagttgccagcagtcagaaccaggatctgtatgtgatcatgtggcactgctgccttgcaggtggagggctggagtcccgcagaatggcctcagttattcaggttcccttcctgaccacgcagccttgattggacagttgaatcagccacattccttcagctatcctccctgctccctcccactccagtgcatagctggtgcctggaacctagagggccttagtgggtatccattaacg

SEQ ID NO: 154005 - DNA, 226 bp, Homo sapiens
gattctccaaccgaccccctctccaatctctgatctgcagtgccctccccttctcaccttcgaactgagccccgccccagtctctggtttccagtgcccttgcccactccttctccatctgggctcccctttccattttttctcgcttacctcctctccttcatctgtcttctgtactttctccctttcccctctccccgctgcactccctagactggccgtcgac

SEQ ID NO: 154006 - DNA, 371 bp, Homo sapiens
cctccctgtgtgacagccgcaaatgctgtgtcaggtggcacaaccatcacggcctctagtgatgtggttttctgaaatgggaacaacgcttgatagcactttgatcaaacccaagagcagtcttccatccacttacacaaagggtgcagctctagagaagtcagtatgtttgttaaaactgcaaaatcttccttgtgtttgtgtgttgattggagtgacagtctgagctcaggtcatgccaagcaggttttttactgctgtagatattaggaggacatgagaaaatcgtgtgggatgtgggcaaattctgcatttgtggactatccaccccagggtggaatgcgagcacccatccctctcactccacctag

SEQ ID NO: 154007 - DNA, 595 bp, Homo sapiens
aatcatgagctgaataaagttattttctttatgaattgctcagtctgtggcatctgtcatagcagcagaaaatggacagagacacaatctgaacagagaaaatgagcagaaaaaagatgaagaaagtctttggcagctctggcaataataataataaaaaaaatcaacattcatgttacaggatgtcagaagaaatgagtagagctgagatgacagaatatttgaagaaataatagctgaaaactccctaaagtgatgaaagatacaaacctatagattcaagaagctcagaaaattgggaacaagataaacccctcaaattcaccctaagacacatattaattaaatgcctgaaaactaaaaacatagaaaataatcctgaaagtgctctgagaaaaacaaaacactgcctgtagaagaacttcagctttaaaaactgtatattttttgtctgaaactgtggagaccagaaagcagtgatacaatctattttaaatgctaaaaagaaacccgtggaaattgtgcatcctgtatacagaaaaaagtttctcttgaataaagcttaaaggcattattagctgaagaaaaaaataaa

SEQ ID NO: 154008 - DNA, 273 bp, Homo sapiens
ctcatattggaggagtccaagctgggctgactatgtaatatacatgtacaaatcccattacttctctttctttgagttgcacaacactttttatcataagcccttcagaacaaagggcagggacagggagagtctatactagatgtgcatgcacatttcatataggctgacaggagccatagaaagggactagaagagaatacttcttttggtcattctgtgaaatttctgtgtatttagaaagatcatgaaaggattttagaagtattattt

SEQ ID NO: 154009 - DNA, 358 bp, Homo sapiens
atgattcttgaggaaaaacgacggctagggaagccctcctcataactatacgagtatagtcctgattctagaacaagcatgggagccagttcacggcatgccatctgccacaccggccctaagctctgtcagttgaggactcacctttgaagccactctggtgcttctgtcttcccactgaggagcaggagggatttcctgagggtggaaatggcagatgctgggtggggagagcccaagatgagggggacctaggggcagcgcaacaaggattcacttgggtgacgacgacgatcagtgattctccagggtcatacgggaagaccagctaatctcaggcacgatcccatgagctcat

SEQ ID NO: 154010 - DNA, 407 bp, Homo sapiens
caccaagttggaaaatgttcagaaaagagaaaccagtaaaatgaggagactcaaaacttggtcttgaggggctcaaactaggcctgtgctccacagaactccacagatagcggccattctgggaagcatgggagccagttcacggcatgccatctgccacaccggccctaagctctgtcagttgaggactcacctttgaagccactctggtgcttctgtcttcccactgaggagcaggagggatttcctgagggtggaaatggcagatgctgggtggggagagcccaagatgagggggacctaggggcagcgcaacaaggattcacttgggtgacgacgacgatcagtgattctccagggtcatacgggaagaccagctaatctcaggcacgatcccatgagctcat

SEQ ID NO: 154011 - DNA, 136 bp, Homo sapiens
atgttggcttctggcatagctgtgactcagggcagagttgggactctagggctatgctcttagtctctgctcttactggctgaagctcacagcatctccaagtcctcggcatacagtctagcccttgattctccct

SEQ ID NO: 154012 - DNA, 209 bp, Homo sapiens
gaaacagagagagaagatgctgccaaactcccaagattagattattactaaaatttggctcttaattttctggcagttatggcagaaaagaaaacatattgttgcatactttccattttctgacaaaaacagtgaaagaaattctcaaagatggaattttttcctggaactaacaaagtaggaatttaccaagtgaaatatgactatgg

SEQ ID NO: 154013 - DNA, 268 bp, Homo sapiens
aggtgtagcccccatcccctcctagttgtattgcttggttgtctccatggcatgctttcttgcagtggtgatgtgggtcttcctgcctgtggggtcttgcccactctagttcatgtagtttaagctgcaagaaaaagatcttcctaagtgacagtctgagcctgtcacttaaaaaaaaaaagaaaacaatttggttgtcctttacctatcagggacaggaaattactttactcaacatttgatgctattgaaggatgggacccacatc

SEQ ID NO: 154014 - DNA, 631 bp, Homo sapiens
atgagccactatgtctggcctagagctattttctatgctacaagaagtttcctttttctcctctttaacaatttctcaatggtttaatcaacacaacattaatcattgattgctttcctatccttctattgtactttaccttattttatttgttaatcagattttgtttccaaaaagagataatgctgttgacactggattttgattaatagatttaactatttttggagtagtataggaaaactctaaggcatttgtatattactactttttggattttggttttaaaactcctcgtttacttttgggaattgcatttttttttttattggctgcttgaataacttaacatcttttcactttcctggatagatttatccagaacctgtttcagtcctcatactaataattcgatatacagattacatccttgctacctgtgtctggtttctgagctgagattgtgagggatattatgtttttctaatacatttgagacctggagatcatgtaacaagtagtaagagcttggacagtgagagttaccttttctccaaacggtgctatcaaagaatttatccacatggattaaggttctgataatagttgttaatggtagtatctcacatag

SEQ ID NO: 154015 - DNA, 440 bp, Homo sapiens
ttgtttctaaaggtgctttgagagtcaaggagtgacattttgatctgtgccggttgacaaggacttcccatggtcggtgtggttccaagttatgactagttgaaattgtccagagatttcagttttcaaaactgcaaagactggataaaaagatgggttttctgactctgactcaggctatgggtgctgctgagtgtgatggcgtaagtagcccacagagaatgacagggatgtacctgaaaatggctctgagggcacacagagctgagtaaccgactgcaagcctctgagccagggctgactgagcagttcacaaaaggcttgacctgaagatagatctaggagaaggtgttgaccttccaggaacacaggtacacaaggaagagtgaccatgttgacgtctgcagaccacacttacattctcccaccttccccaacaa

SEQ ID NO: 154016 - DNA, 966 bp, Homo sapiens
tatcctgccatgctcccctatcctgtacccatataaaccccaaacctcgggctccagaagcagatgagcagatgaggagacgcctctattccgtgtcgtttagaatgagcaaacagttgtcttcaccatcccagacaagcagatgaatggtgaaacgatacagcagagaaagagagaagaggaacatttgaacgccgagaggagttcagccgagggtggtcggagaggtttggccacccagcaggaagattatcttcccgtgccatccccgcttccagctctgcatccatccttcagagaaccacctccaccactcaataaaaccctgcattcaaccttcaagcccatgtgtggcctgattcttccaggatgctgggcaagagcttgggatacaaaaagtggtcacattggccctctgcccttgtgaaaaggcagagtgtccattgagctgattaaattcaagccatccatggacagcagggctaaaagggcacactgtaacacacccccacttaggctcctgcacctgtccatctgcatgctcccctcccctcaggggtttgagcgtgtagcaacagaacaggcgagccacaccctgtaaagccctggggcaactgaaggtgtttttttgctgcaaggccccaggactgaagtctgttggctaaaacccccagattttgcttgatgtcttctcttctctcacagtttgaaatggctctcatctcttcctttatgatgttacgggttttggttcaggctgtgcaatattaaatagaatgagcatttggctcagccatcaaaagtgcaattcaggccgggtgtggtggctcacacctgtaatcccagcactttgggaggccgaggcaggcagatcacgaggtcaagacatcgagaccagcctggccaccatggtgaaaccctgtctcttctaaaagtacaaaaattaggtgggtgtggtggcacgta

SEQ ID NO: 154017 - DNA, 469 bp, Homo sapiens
caatctcttttaaccctcacatactttctctgaagaaacttagcaaccatgggccatcttaagagtctgtttttcttgggtttaatgtgaatgtcttgtatgtgcaaaaatctataaatcaatgaacatgaattatatgggatagatgtaggagaacgaaagaaacacgttttgaaagctttctgagaagaagctcaaaagtaaggtagtgaagacccagagctacatccctacaaaattaaatctgtgatgtttagatcatgatttccagtgcaaggcagacaaggagaaaatgccaggagtgttggcatctctctctctctctcacacacacacacacgacacaggatcagggcgggctgaaaaactattaggtactatgtgtagtacctgggtgatgtgatcaatcataccccaaactcagcatcaggcaatatacccaggtgacaaacctgcacatgtaccctgt

SEQ ID NO: 154018 - DNA, 395 bp, Homo sapiens
catgcagatttatattgcatgcctctgagtcttatgcttccttggcaaaccaggcagtcgcaagctccagtgcctactgggaccaatgaggttacgtgagtaagtgggctgaatgtagtacaacagattctgctggaaagtgtggtgaactggagagcacatgtcccgtctaaaacaaaagactccaggttctcactgcaggaatatgggcccaatatggtggcagcttccagttttccaagaaaacccagatctcaatttttattttaaatgtcttatgcaggacaggccaaagaacatgcatgcaggtggatatttgccagctgcctgacagattgcagcctccacttaagtgcatgtttcttatctccctaacagcagcaataataatcgcc

SEQ ID NO: 154019 - DNA, 325 bp, Homo sapiens
tagctgggattacaggcacgtgccaccacagcccggctagtttttgtatttttagtagagatgcggtttcaccatattggtcaggctggtctcgaactcccgacctcaggtgatccgccagcttcagcctcccaaagtgctgggattagaggtgtgagccaccacacctggccagtactattaatctcaatgataaaccaggactcatgctgtctggaccacggacacctctattcaagaggagcagcctgttcctcttgatcctgtgcctcttaatttgcatgtttttcaccaaccaggtgcccttctcatcagcaccgagaaa

SEQ ID NO: 154020 - DNA, 267 bp, Homo sapiens
acagtgactcagagtaaaccgtgactcagagtatacaggtactacactctggacatcctaaagcaattaacaaataaatgtgctggtaggaaaattgttgtctattgtattaccttagtctctctctctttttttttttttttttcttttttgagacggaatgtcactctgtcacccaggctggagtgcaggggtgtgatctctgctcactacaacctctgcctctggggagttcaagtgattctcctacctcaggcccctgagtag

SEQ ID NO: 154021 - DNA, 236 bp, Homo sapiens
gtccttctatagttgaagtttcatgtatctcagcatattttagttttttctttttaaattttgaaatatatcatattcctaaaagttcaaaacacaaaaatgcatggcttagtgaattatgaattatgtgtactccccagatcaagaaagaaaaatatttctggtaccccggaagcctccttttgtgcccctcccagttgcacagttaaaaccaccttcctccccttaagtgtaac

SEQ ID NO: 154022 - DNA, 327 bp, Homo sapiens
cgggatacagcagtgcagcatatagctgggcataattttgtactggcgtacgatgactaggttttaccatgttggccaggctggtctcgaactcctgacctcaagtgatcctcccaaagtgctgggatgacaggtgtgagccaccgtacccggccccttgatctaatttttaagattgatattaataaccttcaaaattcacaagataatgcttaacctagaataactaagtttaggatcagtattcttaattgtgaggttcaagagacattgttgttttttctttttcttttctctcttttttttttttgagactgagtctcattc

SEQ ID NO: 154023 - DNA, 783 bp, Homo sapiens
ttttttgagatggagtctcgctctgtcgcccaggctggagtgcagtcgtgcgatctcggctcactgaaagctccgcctcctgggttcacgccattctcctgcctcagcctcccaagtagctgggactacaggtgcccgccacaacacccggctaattttttgtattttttagtagagacggggtttcaccgtgttagccaggatggtcttgatctcctgaccttgtgatccacccacctcggcctcccaaagtgctgggattacaggcgtgagccactgtgcccggccgcattctttttttttgaagactaaagaagttaacaaaaatgtcaggaaaacattgttttgtttttttttttcttcccctccttttcccattctcgtctgagaacgtgttgtcttcttcctccctggctagtttccctgcctgtgaactccctcagcctcactaatctgtacgtgctttgtggctcatcccatctgtgcttcagtcatgataatcgatgctgtcagtctctctgggctacacagccccacacttggtgttgctgacacattccggtggtgcacgtttgagaaaatcgcacattccagctcatgtcccctgcctcctctgctccatggggagaggtgtgaccagatctgcagggcctggggctgccacactcctgttccttcttgctctgttgctacgtgatgcccctcctcctccttccccagcaccaagccagagagtcacccagtcccaggccccaactccctcccagctgcctcattcctatg

SEQ ID NO: 154024 - DNA, 537 bp, Homo sapiens
atatgtgtggcttatgaagtgtcaggaaataaggggtcagagggagtaataaacacttgggagaaggttaggaatggaaagaatgatggaaccaaaacaaggagcatggtctgtggaagggtgaaaggagttccttaggaagtaagattaaccgaacagaatgagttaccagtcctacccttaaatgtcatgggtgacatttcccaacaattaccaaactaagaaaggatataagatggctgaaataaagaccttcttccgtgtgtccttgggagatgtcagattgaatttgcaaaggcatattaggaactctgtgaaaggacattcaaagagatgcatgcaaaatgaattttcagtttaaacaatatgatatgactatttcttatgtatttccctatgaatgaaagcagtcctgagaagaaaacagcatttattagaattgcttttaaaagagattataataattagactcttgattatgtgaacatcattcaaggcgtacttttgatttttatttttggtgtactgaatacttta

SEQ ID NO: 154025 - DNA, 538 bp, Homo sapiens
agcaactgaacatccccagcagggctgctggacatgggctggaggcactgacccactggactataagtcaaaggcaaaacccagtccagtgtgtgtcatctccccaggctctaaagcacaggcctgctgaggcaggccagacagaagctccagggataaacagtcggacaggaaccaaatcagcttcaacttggcttccccagggctttgccagtgccactgggcagagatacttatgcctcagaaaaatggaagaaattagacccaggcccagtggatctggttggtagggaggagacaggcctccgggaaaaggcactccttaccaggaggggagacagaatacaggagagaaacactgaatgagaaacactcagagaaaaggaactagagaaaagaacacagaaaaacaagagaaagatttgggaggtggcacactgccagcatgagctggggggaactccctggaggaaagaagcccattcctcttgatggccacaaagccctggctcccagaagatagcaagctggcacaagc

SEQ ID NO: 154026 - DNA, 161 bp, Homo sapiens
gtgagccaagatcacaccattgcactccaagatgtggttggggagaaatccacaaattttggtgatcagaactgaggcattctgtgctcagtggcatgagagagtaggaaaaacactttttttttttttgtatttcttttttttggcggggggtggagtct

SEQ ID NO: 154027 - DNA, 891 bp, Homo sapiens
cagtagtgaggatagaatggaatactaaaaacactcattccaaagaagacaggaaaagaaagaagagcaagtaacaacaggtgataaaaatggaaaacaacaagatggtaagtttaaactcatgtggatagttacattaaatgtaaattttgtatacaatacagttagaaggaagagattgtcagattaaaccagtagattcaatggcatgctgtttataaaagacacactttaaccataaacatacagtataggtttaaaactaaaaggatagaaggagatatgccatgctaacaatagaaaagaaagctggagcagctatgttaacaccagacaaactaggcttcaagacaagaaatattacctaagataaagaagggatgtttcataacaatagaacttcaatatacatagaatgaaaatttccagaaataaaaggaaaaataaataaatcaactgttttggttggagattacataattgatagagcaagtaaaaagaaaatcagtgagaatatagaaaactttaggtgtattaggaaacaatttgacctaacattttcggagaactcaacagaagaacagaattcacgttcaaaatgcacgtggaatatttatcagaataaaatgatggaccatgaaacctcaaatttaaaaaactgacataagaatatattctctgacaccagtggaattaaattagaaataaaacgagactttaattcgatatggaataagaattctcagagggggcagagaaccagagcactggaggttgttggaacgaaccatgggggtaacgggggaactaatggaaggacagggttcaaaaaaaggggcgagaaatgggggaagtaagccgtcagcgaagggtgatgaggctgagtgtgga

SEQ ID NO: 154028 - DNA, 460 bp, Homo sapiens
gcttggctcccacagactgttcagagaccccagccacagctgcagccccactttcaggctaccctcagaccatccccagaatgaaggattcccatcagctctctgcccacagaatccctgcatagagaagcaaaagcttgaaagagaaaccttggggtgggatggggactgctgtccaacccacccctgaattctgaaagcaaaagtgagtcaaaagaaacattcatcttgcaaacaggaaggcaaagcattgttatggaaaccctggattctcgtcttctgtcaagacctctctggtcacggattccacactggaccacgagaactgggcccatccagtttttttctttctttcgagacagggtctggctctgttacccaggctggagtgcagcggtgcgatcatagctcactgcagcctcaacctcctgggctcatgcaatcctcccacctcagcctc

SEQ ID NO: 154029 - DNA, 241 bp, Homo sapiens
gtgtattgaaacaaacgctgctgaacagaccaaagtaagaaggtaaacgttctacacttttaaacgtcactacacacagcctcttctgtgcaggaggctgcacatgcggcaggtgatagcaacgcgctcctttcagggttcagggtcaaggagggacactaagaccagaagagggttgataagcaacccttcctcccgcttcccaccatatgcgcccgctccggtgtgcatgtgttctgag

SEQ ID NO: 154030 - DNA, 487 bp, Homo sapiens
tgattataagttttcctgagacccccaagtcatgcttcctgttaagtctgcagaactgtgagtcaactaaacatttccttgataaattacctaatctcaggtagttctttatagcagtgtgaaaatggactaatacaggtggttatgaattggtacctaccaacaaggtatcaaatccattgtttggcatttctgccatcaatgcaacgatctgcctttgtacttgaaggcattttgcttctgcacagtcttctattaaggaaaatgataagccttatcacttaactcagtgctaacagttggaccccagctgatgctctgagagagtctgatgggacaccagcaaggaggacaggaaatggaacatgacagagacacactttgtctctagtttttctctaggggtaaaacaggcaaaattaacacatcttacctgtcaagtaaaattacaagaataacatgtatgtatgtaagtgaacctgtgtga

SEQ ID NO: 154031 - DNA, 1317 bp, Homo sapiens
ggcgatcgagagggtcccggatcgtggttttgctggaggctggagcttcccgacagccctgaccacggagaggtggaatgtggcgctgacgtcacggctgctcctgggaatgttttgcattcctcttcctggcagtggtcaggtggcttccagcaagaatgaaggacagcagcttccaaagaagaaaaaaagagaggaggaaaaggacagtttataatcaaagtattgcgggggaggcacttttattctgagccaaaattgaaattagaaacagatgtcttgcattccgatgcggcacgaatgttaaataaatttattaatgactgtaataactaagctatttggctttttactgaacttaagtcttgaaactctgtaagaattatggaaaaacgacttcttgtagttgacattttaactatgaaagcagctttctgactgtaaaagcaaggaccctgatgaaataaccctctagttaatctacaggctgttttaaggtctgttaatattctgaaaggtcacttctgaaacataaaatctctgtaatctattaacataatttgtgctgttcaaacaaatttaagccaatcattgagagaggtaaactctattttagcatctgctgcagaatgtcttttctcaaaatatttacacttccaatgttatttctgtacattactgctcaaaccagatattcaaaacaaaacagattcttaacaaacaggttttgcccaagtcttacaactctgcaataatatgtgtaatagaaaaatagacagtaattgaaaagtttgtgtttttcttgtcttccagccactaaagtacctctgttcaaaatcactatacgggtttagctaattacaatctatacgtctgtattttaaaataaaatgttatactttttaaaaacaaaaaaaaaaaaagaaagaaaaaaaaaaaaaaaaaaaaagaaaaaaaagaaaaaagaaaagaaaaaagaaaaaaaaaaaggaggggcgaataaacaacagaggggatcaaaacacacaccaatataaacacacggcgccatagggagcaaaaaacaagagacagcgcgaaaaagcggagagaaacagctaagcctggagaaaccacggaggggaaacgtagaccaccacaagcaaaccgagaaaaaaaggcggggaaagccaagctcgagagcgcgcgaaacaacaacacaccacgcacgaaacgatgaacgaacaaacagcagcaacagcaagtacgcaacacgccatctccccccctcccccccgcaagaagaacacgtaaaaagcaaaaaaagataagaagaaa

SEQ ID NO: 154032 - DNA, 545 bp, Homo sapiens
caggttacttattgatttggctctgaaatatttgttttgtaaaacaaatctattaaaagtcaaagacttgctgtcatcaaaactatttaaaaggctgtgaggcctactgtaaagatatcccaaagaaggacttcacaaatgttttttgccaatgatagaatcattccttaattctgtagctcctaaagtaactaccttgaagagcacggatcttaccaacatatgtaggttgtttaaaaaatcattcatattatgtacagaatcaaagatttaaaaaagtatacaagatacaaatacccagttaaatctatagttaggcatttgagacttaaaaaacaatttggtgggactctttactgaagtattaaaaaacagaattctatctcacatctatttcacctactgtgacccagtatctaaatatgtcagtatacttctcttcttatgctcacataggaaaaaattggattgaaatgcttaggacacactggaaactagatgaatttagagcttttagaggaaaaacaccttgccacagatctccc

SEQ ID NO: 154033 - DNA, 350 bp, Homo sapiens
actaccatataaaaggaatatgaaaaatctcaacagaataatacaagaatttggtggaggtaattttaagtgtgtgagagtttcttagataaatagagttctatatgtaactctgaaaagacttcaatgcagttttttgagaccatgctttctgaatttgtctgaatatttcttgtatatttattttgatagtgtagtactatttcttatgcctttattgtgaagaatactatcaatgtttgacggaagtacagatttcagaaacttatatgcctcagttcacttttcagaaataagtttcccactcaaaatgtgttcttggggaatatttttggaaagtccccccatag

SEQ ID NO: 154034 - DNA, 283 bp, Homo sapiens
tggagcctgaaggtaattcaagaggcctgtctccagccttctgcctccagaggtgtaccttactttacagaaaaggcagctgcaaagaacacagcaactttataactaattcaagtttcctgcctctggactattcatgcctcttttcttgtccagtgagtttttaattgtttgggataatcttatgtaatgtctgaactacagcttgctataaactacttaatgtcccatctggtcttgggtggttggtgtggttagtatgtcacctgcatttttctcattt

SEQ ID NO: 154035 - DNA, 465 bp, Homo sapiens
tgacagtttcacagacccctatcattgtgggttccattgatcatgtcttgattttctggcactacaagatgctccaggctttacaaagaaaggaaattctgacacatgctacatcgtggatgaaccttgaagacatcgtgcaaggtgaaataagccagtcccaaaaagacaaataatatatggctccacttataggaggtgcttagaataattaaattcatagagacagaaagtagaagggtggttgccaggggctggagagcaaggcttggggtattcgtgtttaatgaatacagagtttcagttttgccagatgagaagagttctggagatggagggtggtgatggttatgcaacatgatgtatgtatttaataccactgaatagtacacttaaaaatggttacgatgggccaggcatggtggctcatacctgcaatcccaacactttgagacgccaagagag

SEQ ID NO: 154036 - DNA, 223 bp, Homo sapiens
aaaagaaaagaaaaagattatgggcaaatagaaccctggcgtcttctgggacagagagtgactgttgaaaaaattccaatttacccataatctttttcttttcttttcgtttctctttaatatttttatatacagcccatgttaaaagcagtttctattggaagcaaactaggctatttctatttctcccatgatattattgttgtaacgtaggatacttggc

SEQ ID NO: 154037 - DNA, 916 bp, Homo sapiens
ctttgaactgaggccatgtgacaagcagcagcctgctactctaacctcatcctggggaaatccaggcttcacagttgctacacaggatgtttcatcaaaagagggattttccccctctgctctggaagactttgtttccttccccttcctcaactttaccaaagtattctgaaaatagttaacaatttttcctgtcttgggtgactttattgggggtggaatggtggtggggaaggataaggaatgggttaaggggaagttgagcactggggcatagaagggacagtaagaacaagacccgtcaatactttgtcagcccatcatgtctctgggcatattacttgctattacctaatattaaaaaaaaaaataaatcactggccctactatgcatcaagcatggttttggtgttagatcttagttcaaagtccagctttgacatttgccagctgtgtctttaagtttcccatttataaaatgaatcataatacgaacttggccaggcacagtggctcccagcacttagggagttggaggcgagtgggtcacctgaggtcaggagtttgagaccagcctagccaacatggcgaaaccctgtctctactaaaaatacaaaaattagctgggtgtggtggcaggcacctgtaatcccagctactcaggaggctgaggcaggagaattgcttgaacccggtaggtggagtttgcagtgagccgagatcacaccactgcactccagcctggggtatagagcaagactctgtgtcaaataaataaataaatacaaatacaaatacaaacttaacagggttgctgagaggttcaagtgagagaatgtatgaacatttacttcgtttatctctgcttctgtcctcccccatcttcacccttttttcccaagcctaaaaggaatca

SEQ ID NO: 154038 - DNA, 445 bp, Homo sapiens
ctttgaactgaggccatgtgacaagcagcagcctgctactctaacctcatcctggggaaatccaggcttcacagttgctacacaggatgtttcatcaaaagagggattttccccctctgctctggaagactttgtttccttccccttcctcaactttaccaaagtattctgaaaatagttaacaatttttcctgtcttgggtgactttattgggggtggaatggtggtggggaaggataaggaatgggttaaggggaagttgagcactggggcatagaagggacagtaagaacaagacccgtcaatactttgtcagcccatcatgtctctgggcatattacttgctattacctaatattaaaaaaaaaaataaatcacagggccactcaataccggtatggaggggccaggtgaaaacaccgagagcaaacactgggaagctcgc

SEQ ID NO: 154039 - DNA, 377 bp, Homo sapiens
gaaaggaaatcagtctaatctcctaggaagaggcagagatgtgtgtccctctgtagctgggatgggcttggaaggcatcagaggttccagtccactgctggaggggaaagggtgggatgttacggtgagaggagagccagattgctgggagctgcactctgtgactccttgccaatggatagaatagaacgaacccttctatgaccactgctgaggctgtgtaacattgcagagaatcaaacaaagtgtggaaaaggacttttgagatcaagaatttctgatccctgaacctggtcctcgaacaaaatcttaagcagccacccaatatacacttcggattaaagaagagctgttttgttgaagcagagtatgtgcac

SEQ ID NO: 154040 - DNA, 316 bp, Homo sapiens
gcatcagcatagggacctcccaggttcccatttcctgctggagccctctccaaggctgagacacagggcatggccatccttgtgtcggagaccctgtctccacctctaggtttggccttcccctatagggccctcactagggccagtgtattcactgccaagagtctagaatgccattttagtttctgcccaagggagtgtctattttcctcaccatagacactttttattattttattgttatgtttgtgcagggacttaattctttgaaagattattgtttgtcggcctgtgtatattaaatgatgtaaagtta

SEQ ID NO: 154041 - DNA, 304 bp, Homo sapiens
cacgctgacctcttccttttgctgcttcatcctgggaggctgtggtctgatgctttgttccctgatgtggggcagtcgggccactgttcagcgcactgcctgctcacggatcagtccccagtctgcggcggtgcctcttcctcgctggggctgtccttgggcttctgagattccgctggctttacagatgcattctccattcttcacacatcagcaattttgaggatttcttgtggggtttggttagagtcacaagtaacattctttttttcagcaaaaaaaggggcctttctaaaaaattaag

SEQ ID NO: 154042 - DNA, 531 bp, Homo sapiens
ctcaacccccctacttctagccagagcccaggcacctgccttgagcccttcttaggcaaatatatgtaaatgtaggaccctcagttctccctccctgaatttctttagggaaagcaacaaccatccctgtaagccataggtattcatggggaggaaggagagggctagttgtctgagagggaaactgccaaaggctgcagactaggaaatgggattccaggtttaagatagctcctttctggacctcagtccttcacctagtcacctagtcacagggtggattgtctctaaggatacttaggggaaaaggaaccaaattcgggagggtcctccttgctttaagccttgatgggagagggggaggccaacccttctctgcagactgggatcctcaccagacagaggagctccaaacctgcccatctcatcccatgcaccgacggtgcctggcctggctccaaactcccaaaaggaactattttacagggaccaaaaaggggacactggtgataataataataaaaaaaaaaa

SEQ ID NO: 154043 - DNA, 746 bp, Homo sapiens
ggttaatgtcatttaacttatagttctagaagatgtttttgcagtaactacaatatgcatatttttttgcttagtattttacatctttaagtaaagattgaggaggaaacgtaatgccctaaaatattacagctcaccaaacacatcatggagtcatattttaggatattcttagtcccagatagcaggagtagtggctagaaacaaacctttgatacgtagaagtcccccagattcctagatagtatctggaagcatccagggcctggtgctgaaaggatctggttttcttctcctgttgtagtggctaagaggcctgtgtagaaaaagctgtgggtctcacagacagcgatcttatcgctagagctgggttaggggtatatccaggagacattttccttctctgagccccacttgcaagagacattcgctatacccagagggaactccagtagaagtgccaggtaaatctgaaatatgtgctaccattccatataggaaaaattcaaaaaatcacgtcaaatatctggggggaaggaaaggaaagggtatcacagtcaggaaataacatttttgtggttaactttacagattttaaattgttggttttagttttgtgagactaaagggaggtgaaaagggaggagggaggtcccagtgtaaaaagcgtaggtttgggaattactcaggcctgggttttaaacacagctttgccatccaactagccaatgactttagaatactta

SEQ ID NO: 154044 - DNA, 490 bp, Homo sapiens
gtcccttacctctgagatcagtttccttatccgttacagtcaagtaattatttttgccccactgatctgatagacttgtttgaggtatcaaacaacataaaaaatataaaagatcttttcaaactttgaagccttccaaaatgtcatcacccttttacatatcttcagtgcccagaacatagttggcttaacaaacttttcttactgcctactgcagttgtaatgaattaaatggttttctgttggtctaaagaactttactcttcttgcatccacattcagcttaatattaacaactgaattaggcattcagaacaagctgaactactatcttatgaaatcagagcttttctaaagaatgtacgccccatataatgagggcagcccttctgtagccccagaagattgctagagagggcagcactagttaggtctagcagatcactgtcatggaggaacacaggaaactaggcttcagggcatcctagag

SEQ ID NO: 154045 - DNA, 220 bp, Homo sapiens
ggtgggacaagagttacaatggataaacgattcattgtgggtgaaattttctgaagatggagtaatttacacgctcatctatcaggaatgactggagatgaggatggaaacagtgactgccatgggttattcaaagctgatagttctctgattcacagacacctactgggtcaaaaagcctcatgtttttactcccatgagtctaaattttatggccatg

SEQ ID NO: 154046 - DNA, 648 bp, Homo sapiens
  misc_feature (571)..(571): n is a, c, g, or t
  misc_feature (598)..(598): n is a, c, g, or t
agacggagaccctcgaattggcaaaggactgaaaatacaccccggggcgcagggctgctgacctagtaagtacaggactaaaggccagggtgctggccaccatctggccgcttcctttccaaaaccaactcagttatgtctacttggggatacttttccagagtaaatatatccctttcctacatttcataagaaaagacagaggtgaagcaagattgactttacctgaattcacttgacaaacacttactcaacacatacgtcctcaggacataaaaaatgctgcatcctcactgaagctcttgctgcaaggagtagcagtcagactttgtgtggtgatgaacttcggtttgtacatcataaagaattagcacatttaaaaagtaaacatcttaaagagactaaaatcaattcaggattcatttatattataaataagtattatatgagagaaaggagagaagaatcaacccttgtcttgccaaaatccattgtcatcattgatgaaaatatttccttacttaagcatctttggggttacagagttcatctcagctcttatggcattggntatactagccagataggagtttttggnttgggttcttatatagagaacaagtactaattgactcagatctggttggg

SEQ ID NO: 154047 - DNA, 388 bp, Homo sapiens
gagtgagattcggtctcaaaaaacaaacaaacaataacaacaacaacaaagtatgctgaccctacactggtccgagcaacctcttggtcacagcaagaggttatttctgttaagcagcatcttacccccagtgttctcccagatattctgcctaacagctttaagtgggaggttgaatagtcagtttatctaagccatctatttttccaaactagcttgaaaggtatttccatttatgtttactccatgggcctctgatatgctgagatgtaacacagttttggttgtggtatcatctgttatagagacaaagggaaaaaaggttggccaggcccaacataaccagcgtgttaggttgccactggagatgggggagtcagtctccact

SEQ ID NO: 154048 - DNA, 364 bp, Homo sapiens
tcgacttgtagagagctgcaggttcggcgtctgtagagagccactcggtccttttgaaggacaaaacttctcccctgcgggcatcctgctcagcagtctgggaacagacagccgcgctagaagacgaacatagctccatagctacagcctggcgagaccaggttcagagaagccacttgtcagcaaatcgggctggtaatctgggaggctggtgcaggataaggaccccaggggaaagaagggaaggcggtaccaccaggggctaagagcctggggtgcaggggcaggaataatactggttttggttcctggacctttgtgaactttccagccggtcacgtccactgaatgctgcctttcaggg

SEQ ID NO: 154049 - DNA, 264 bp, Homo sapiens
aaaaagaatttagacagtacaattttcctggttgactcagcttcaggtagggaatccactgcaattatactcaataacttagaaaatttgatggcttgaagtcctcatacttttcttcagtctgtgagtcacttaactcaaaaaatgtctctgagtttgacatctaacaaaaccatggaaacaatactaacagtgcttcctccagcctccccgtagagaagtatggtgttttcagaaggagtatgcataaacaaagccacctgg

SEQ ID NO: 154050 - DNA, 278 bp, Homo sapiens
aatacaatctgcagcggggtggtttgaccaatggggagagactttcccctagaagtgatgttcaagctgcaactagaaagataaacagaagtaggttaggtaaagaagggagagaaagagcagtcaaggcagaagggctagcatatgcaaaggccctgtggcatgacagagaatggtgactgaaagagggatgattagagcccaaaggctgacaggaatacaaaagagaggatcaagacccaggaggaggaggcagattctcctgggctgtgtagatc

SEQ ID NO: 154051 - DNA, 459 bp, Homo sapiens
agctcaagaatagttctcaaactacaccccgtgggctaaatcctactcccacctgtttgttcagccttccagctaaaagtagtggttgcatttttaaatggttgaaaaaaatcaaaagaatgttatgacatgagaaagtgatacaacattcaaatttcagggttcatgaagtttatgagaacacagccacgcccattgatttttgtattccctatggtggcttttgtgctgccacagtggagttgaacagttgtgatagagaccatggggcacacaaagcctaaaatatttactgtctaacccttacagaaaaagtttactgacctccgttctagcagattgaaccatggcaaggatgaacattagcaggtgatgatatgggaccttaagagtgtgctcctctaaagcgcaaaatgaacatagatgacctgctctgacacaggaataagaaccaaaaga

SEQ ID NO: 154052 - DNA, 659 bp, Homo sapiens
gttaaataaaatggggcaagtttatgtaacaagacttaggcctaacaaaaaaagtcttcagtacttattacctaaggttaaattctagattgcaaacccctctacttatcctcaatgacaactataacaggttttaaaacctcctaaatctgctgtagatacagataataataataaggttgtgtgtttccttcaaggggctattaggaaaaaattagtaaaaaggtgtaacaggaataaattatggattactatgtagcacaaaggatagtggattttttctaactataattactagcaaagcagataaatgtaacagcgttatgggtagctgtgtctaatttgtcttgggctgtctcgctgtgtttattaatagtttggaggaataaacatgttgttaattttatactccagctataaaatgccatcttttcacattaaacattttaaaaaacagaagttaaagctcagaataaaattaaaagaagcatttgaattttgtttcctattttattcataagataaaaccaatgaaagttacccctgcttttagttataaaaattttgaaatttacattaacataatgttttctggcaagtaaatgctgaattgacaaatatatttttcttcctaagtctcattaaataaatacatattt

SEQ ID NO: 154053 - DNA, 546 bp, Homo sapiens
cacgccgcccagctaatttttgtatttttagtagagagggggtttgaccatgttggtcaggctggtctccaattcctgacctcaagtgatccacccacctcggcctccaaaagtgctggggttacaggcatgagccactgcgcccagcctcctttcctttttctttcctcccactctgtcatcttttatcaatgacaacttttaaagatcccatgactggtcacagtgagaactctcttttgcagtcatcctttgcaatgataatatatgcctgtaaactaaggctttaattttttttttttttttttgagatgaggtctcactctgttgccaacgatggtcctcagctgtgcctgacaagcgtgtgcggggtgctccaggcccgtggcgtgtgctcgggcgtttcccacgcagttgagcacaggccccatcctgcaggaatctgcagtccgctaagcggggagggcgctgcccaggtcaatctacacagaaaagcacccctagaggggcacgcctcaaaggaagcgcacgaggagggaacgcgcc

SEQ ID NO: 154054 - DNA, 405 bp, Homo sapiens
acgcaggccaggctttctagcagtgatgtgggctactataggcctggggtggggctggccagggccaatcctaagcattctggagtccagcctaactcttccaggagggaaggggctggtacaaactgaggtgcatggtgaaggccagagcagagatgcttttggaataagaatggtgtgccccggagccaagaggagactcacctaattaatgtaagaggatgtgtggggggcggtcggataacaggaagccagtgaagttctcgattgaggaaaaaggaacatatgtgtgtctgaacactaaatcaaagatggatctggggtgggcttctggggctcaggtattgtgtctgtaaaatagcctgcatttacattctttgcctgtaaccttaaagtctgtggtga

SEQ ID NO: 154055 - DNA, 334 bp, Homo sapiens
atctactatgacatcctcaatttacagtgggaaaaaaaggttcagagaagttaaagtgtccaagaggacagcaagtagcagagctgggatataaactcaggtctatccaacaactaacccatgctctattatcttaatgcctctagaaagaaggcaagtcttgagaacaggaaaactgagagaagtacacaaatgatttttttctgcttgatgttgtcccttacagaaggcccccaaagagaggacacagtgctccccaagtaactagaattgagataaaggtagaatgacagaagacagatcctctactttctccatgttacttgaggatggt

SEQ ID NO: 154056 - DNA, 323 bp, Homo sapiens
ggagggaggatgggaatcacacctaaagataactctttgatggaagtcctaatgatataaacttgaggaagaccctaaacctgccaataatacttggaaagagacagaatccttttcgactagcctacttctactataaacttcattaaatggattcatattttattgaagcagggttttggtacaattttcttagtagggactttttcccaacccaatatttcatccaagagtcgaaaagctgatcagagttggcattattccccagagggtttgcagggagagaagtttcactcgtcaacaaaggacagactcccctacag

SEQ ID NO: 154057 - DNA, 371 bp, Homo sapiens
cacaacagcaagctctccttcatttccatccttgaagcataggccagtttctctccattttagatttttcaggtgtggatcagacacccgtccaacctcttcagccctgtaagcctctcatgaggttgagtaggtgtggtaggaatcattgcatagctctctctaaaggaagaccctcccacaatccacacacattctgacccttttagacctggatgtgagtaagagccctgttaccagttttcagctgaatcctttgaaaatttgcaccatgggctaaaatgactgtggtatgtctgtgtttccagcgtaaccgtagtgctcattcattcattcatcattgattcattcaggcagtgcaaagtttcact

SEQ ID NO: 154058 - DNA, 175 bp, Homo sapiens
tcgctgctcctgtgatgggcacaggctgcgggcacgtagggctagaccagagcctctgggaggctctaagacagtgcacggatgcaggtaaagtgtagagctgttttaaaagtaaactttaccttttcaaacagctttaaatttatggaaaaaattattttaaagacagtagaga

SEQ ID NO: 154059 - DNA, 374 bp, Homo sapiens
ggcgcctgtagttactctggaggctgaggcaggagaatcgcttgaacctgggaggtggaggtttcagtgagccgagatggcaccactgcactccagcctaggtgacagagcaagactccatctcaaaaaacaaattttttttcatatattttgaaactctgttgttagacaaaaatacatttgcgaatatgtcttttaagtacatttattatgaaatgtgtccctttttatccctggtagtaatttgttgcctgatagttattagcttctttaacctctttctatgcttaatgtttgcatgataatctttttccatccatttgctttcaacttatgtgtatttttatatttaaattgtgtccctcatgtcaaca

SEQ ID NO: 154060 - DNA, 125 bp, Homo sapiens
tcctctttcagcattgtcatttcttctgaaaggtgagcagctatgaatctgagcaagagtgagaaggttcgagctaacacttgcttaggagggctggaactacatctgaaatagtttggggtctg

SEQ ID NO: 154061 - DNA, 571 bp, Homo sapiens
actggtttgtgagacagaacatttgggaatggcatgtagtttggaatgatgacagcacaggatgtagatgtgccagaggtgagagaaggtggagaggtagacaagagatagattttgaagggctttgtatgttgtgctaaaaagtcaggctctatcacatagacagtgaggagccattgtaagatcttaatgcaggaatgacatatcagatttgtgataggtgtctaagtaagaggaccttggcagaagtatggagaatggccttgaaataccagaagtagggacaagctgttgttgttgatccaaaagaaatgataaattataagagcttaaagaaatggtagtgaggagtaagaggagggcataaactcagatatttcggagatagagttgatgggacttagagactgattagctatggagggtgaaggaaaagaagtagagatgagtctgaagttttgagatgactaaatagatgtgatgccattcatagagatagagattataggaaggaaaggaggtggttggaattaggtcagtcatacagaggaaggaggtaatgagttcagtc

SEQ ID NO: 154062 - DNA, 403 bp, Homo sapiens
aggcgagacagaaatatgacatttaaaatgattagctctggctgctgtagggagaagaaactaaggaaataccagcagaagcagggatcctggccaagaggctaatgaaatcatccaagtgagagatgacaggggcttggacaagcagaggtgacctggatagactctgaagttacggttacctgaaagactggtacggggtttgacagaaaaagaagagtcaaggaagatcccaaagttattggccctgggcaagcagaaacatgaagctgggtttaactgaacaaaggaagaagtgactatatcagatctggggacaagatatgaagttcagttttttatttttatttcattattttgagagtctcactctgtcgcccaggctggagtgcggtggcatgat

SEQ ID NO: 154063 - DNA, 118 bp, Homo sapiens
ttgattctcgtttccttccgtacggtctagaaactttgttcttggggatgaagataccagatgggtaaatcccccccataccccaaattagtttaaggagagattggaaagaaatatt

SEQ ID NO: 154064 - DNA, 499 bp, Homo sapiens
tggtgtactgtctatgtctcgatcgttagaagtactaggtctttgtggataaggtaaaactatcggttgctgtaacaagggaaggtctgacaagtttagccatggaacacctaggaagcttagtcatttatcttttcagaagagtccttcctatttggtgttctggccctttagtaagtgttattcatgtttggagaagagagctgaagcttacacatggctaaaaatctgaactccggtaatctaatcttcctgcatttgttcctaaaactggaatgacttttctcactgaatatctaatgactaataagagagaattctggtccctagtccctgaggttattggttaagtggattggtacaatcagatattcttatatatatgtttatgagccatttcctattgggaggcctttcacagtatcagtttgtatgtatcaataatgccagccaatgagttttcattttccaaataatggtaaatgtaacagtcagaatg

SEQ ID NO: 154065 - DNA, 627 bp, Homo sapiens
cagggctgggatgtgaccccggctctttcttggtttctcctcgccgcttctctctctcctgcagcctcacagtctcagacaggattctttcaagaattgcaaacttggctgaagaccttcctgtcccctttcttacctcccatgtacaggatgggggtgatgatcccacttctctgactctcacccagaagttaggaactccttaaggctcctctgtctccagcctggagggagggcgcagagggagctggtgagcctggctgcctgccttctgcagctgacctccagaagtgaccagggcagcatccagcactgggcccagctgactacagttccacaggaaaaggggctgtcttagtcacttttcatccacatagctgctaagttcatgaggggacccagctacgggctttaactgctgccttctgccatgggatgatgcagtaagaaggccctcaccagatgccactgccatgctcttgtgttttccagcccccagaaccataggccaatgaatttctatgatttataaatgagctatctcaggtgttctgttatagcatcacaaacagactgagaaaaaaatgaataaataaagagatgtcgaaatcattcctcaaaatgaaa

SEQ ID NO: 154066 - DNA, 474 bp, Homo sapiens
tccttctcaccctccaaattgctcctgcctcctctgctgcgtctctaggactctcctgattcactctcctcttctgatctgcctctcctggatcatccaagataatctctttattttcaggctcctctgtctccagcctggagggagggcgcagagggagctggtgagcctggctgcctgccttctgcagctgacctccagaagtgaccagggcagcatccagcactgggcccagctgactacagttccacaggaaaaggggctgtcttagtcacttttcatccacatagctgctaagttcatgaggggacccagctacgggctttaactgctgcctcccttgcagagggactaggacttaactgagaaagatggaaaaacaagccacggaagtaacttttcacataaaagtgaatttaaggcacctgagactttaatgtgtgggcagataataaaaattctgttgaaatgttt

SEQ ID NO: 154067 - DNA, 360 bp, Homo sapiens
cagggctgggatgtgaccccggctctttcttggtttctcctcgccgcttctctctctcctgcagcctcacagtctcagacaggattctttcaagaattgcaaacttggctgaagaccttcctgtcccctttcttacctcccatgtacaggatgggggtgatgatcccacttctctgactctcacccagaagttaggaactccttaaggtttattaatcatttttcagtacaccatcttctgtcccggaggggccatgctgaagtcaaccaagccccaggccagaccaagaacagaacaactttgtatgtggtcctggggatgggatgaaagttagtaaaggaaacattctgacatccaaa

SEQ ID NO: 154068 - DNA, 442 bp, Homo sapiens
cagggctgggatgtgaccccggctctttcttggtttctcctcgccgcttctctctctcctgcagcctcacagtctcagacaggattctttcaagaattgcaaacttggctgaagaccttcctgtcccctttcttacctcccatgtacaggatgggggtgatgatcccacttctctgactctcacccagaagttaggaactccttaagcctcccttgcagagggactaggacttaactgagaaaggtgagtagaagccatatcaccacctcccagcctgacctataaaacgtctcatgggtagtcctgcatgctttgttgctgcaaatcagaagatgcttgttaaagatggagaagtcacaggatggaaaaagcctaggttcttgaattagttcttggtggatctactcacccatcaacaaaaatgaccagactggactttca

SEQ ID NO: 154069 - DNA, 370 bp, Homo sapiens
tccagcccccagaaccataggccaatgaatttctatgatttataaatgagctatctcaggtgttctgttatagcatcacaaacagactgagaaaaaaatgaataaataaagagatgtcgaaatcattcctcaaaatgaaagaaaatgagattttaaaagctgtttctctaatccagaagttggcagacatcttctgtaaagagttatatagtaaatattgtaggtctctgttgcacctaaacataacatcatgctcaatagttctgttataaggttattagattctcttataatgtgaaagtagccacagacaatatgcaaataaatgaagttggcttagttctaataaaactttatgtatagacactga

SEQ ID NO: 154070 - DNA, 454 bp, Homo sapiens
gattaatgtcatgagtgaattaatgtcctagctcaggagtgggtttctcttaaagtaagtttgtccctctcttgcactctctcactctgccctcacttgccctcagccttctgccatgggatgatgcagtaagaaggccctcaccagatgccactgccatgctcttgtgttttccagcccccagaaccataggccaatgaatttctatgatttataaatgagctatctcaggtgttctgttatagcatcacaaacagactgagaaaaaaatgaataaataaagagatgtcgaaatcattcctcaaaatgaaagaaaatgagattttaaaagctgtttctctaatccagaagttggcagacatcttctgtaaagagttatatagtaaatattgtaggtctctgttgcacctaaacataacatcatgctcaatagttctgttataaggttattaga

SEQ ID NO: 154071 - DNA, 660 bp, Homo sapiens
gacacgggagtctaggactgcatctgaggctgtcagaaaaggaagtcacgcaggactcagacccaaagaccctatcctgatccttccgggcaaatcctgccaactgcctcaaaagagggtgacattctaaaatgattccacagtccacagcaaaaaaaatgatattgtgttttttcactgttcagtgactgcttagacaactgagaacctctcttgctcacacaacaaattacccaaagcaaaaagtcgaaccactgtggtgtgatccaaggaactttctgtaaggaaaaggtcagagaacacgtacaatatcatcttatatacagatgtttatatttatataattgtctatgttcacatgcagtattttaaaatcaactaaaagacacatttaacttaagagcatatacttctgggaaggggaagcagtaaatgagagtttaaatattcaacatacacgtttttgccagcgtttgaatcttttaataatcaaactatactaatgcactacatgtctgtaactctctttttcaaaaaaaaaaaaaccttaagaaaaaacctcaaaactctagtggggggaaattaaagaactgacagagctcctagaacatgaagaaactcaactagatggcgggcagtaaaaaccaaaacacaacagag

SEQ ID NO: 154072 - DNA, 370 bp, Homo sapiens
cgggctgtgttttcaaataggatattcaggatcttacaaacacagggttcccacccaaaagaaggatcttcaactctcctggtgatggggagacacactgatctcttagctgagcaaatgtccctcaactggaccctccctatcccctggccactgccagccacttccccatgctcaccccctacagggatcttggcaagcctggctaaggtgtggtcacttccaacaggcccctgttgacagagcttaaaacaaacctccctgttcacacacaggccctggtgcatggaagagccaagttgggagactgactctctactggctgaggctaccagtgcagaaacctttcgaaaacaaaacagcacttaaa

SEQ ID NO: 154073 - DNA, 430 bp, Homo sapiens
ggaatgacaaaggataaaggcaaagacttaaagactcaaccaccgagacataagaactcaaccacatggaaaactcatagtaaaaaatagagatgtcagaaaaggataagggtaaaagtaaataaaaactgtataatgctacagaagtcatggtgaaagaatttcattaagaagaaatcaataacctcaaatgcaaaggtcaacttattttaacttttcttatctgagaataagaccaccagatatgactaaggctgagtggaagcctttaaaaaaaccattttctgagtgtgtgaagtgatgagaacagaagccacaataatgagagtaaaaaagggaaaacttccaggtgataacatcttaaggaaaatgcctggttaaaaaaagaaacaaaggccaggcatggtggcacatgcctgtaatcccagca

SEQ ID NO: 154074 - DNA, 1736 bp, Homo sapiens
gggctggagagggaataaaaagacttcactaaaataactgatcccatcactaaacaaataactatgcaaataacaataacaaatccctggtgaggggaaaccagtacccaggtactgcatggtcatccctcagtatccgtggaagattgcttccaggaccctgttgatactcaaatctgtggatgttccagtcctttataaaaaatggtgtagtatttatgaaacctatgcacaccctcctgtatactttaaatcatctctagattacctataatacctaatacaatgtaaatgctatgtagctgttatactatattgtttctgtacttgtattattttttactgttgtattattatttttgttgtctttttcctaaatatttttgatccatggttgcttgaatctgaagatgtagaagttacagagggctgtatgtatattatctaaaatgtctaatttctaacaaagacataaggaggcaggtaaagaaacaggaaaatattacccatacattagaaaaacaaacaaacaacagaaactataagagcaaccagatgtcagacttaactgaaaagtactttgaagtagccattacaaatatgttcacagaactaaagaaaaacatgattatagaagtaaaagaggctatgaggacaatattacatcaaataaagatcaataaagagatagaaattagtttttaaagagagccaaacagaaaatctggaggttaaaagtaaagtcactgaactaaaaaatgcacgagaggggttcacgtgtagatctgaactggcagaagaaagaatttgcaaatctgaaaaacgatcaatagaggttatgtgagctgaagaacaaagagaagaaacaatgaagaaaagttaacagagcttcagagaaatgtgagacattaaatacaccaacatacatataatggaagtacgagagttgggaagagagaaaagaaaagaaatattcaaagaaataatggctgaaaacttttccaaatttattgaaaagcagtaacatatgtttaagaagcttaacaaattacaaataagataaacaaagatcataaacagacacatctcagtaaaattgctgaaattcaaagacaaaaagaaaatcttgaacacagcaagagaaaaacaacatatcacttacaaggaaattgcaataaagttacgtaagagctgacttcccagtggaaacaatgaagccagcaggcagttggataacacatttgaaatgaaaaaaaaaaaaaaaaaacccaccaactaagaatcctatatccagcaaagctagctttcaaaaatgaagaaagactttaccaaataaacaaaatctgcaagagtgtgttgctagcagacccaccttacaagagacactaaaagaagttctatgaatagaaagaataaggaaaaagacagtgatgtctgctgttgacacttatattccatattataccagaggctcaagtaagagaaaatgggcaaaaaaaaaaaaaaaaaaaaaaaagcatccagattgaaacagaagaaactctaccccgtttacagatgacatgatcctttatattattttttttttaaaaaaagcatccagattgaaacagaagaaactctaccccatttgcagatgacatgatcctttatattattaaaaaaaaaaaagcatccagattgaaacagaagaaactctacccctatttgcagatgacatgatcctttatattatt

SEQ ID NO: 154075 - DNA, 603 bp, Homo sapiens
cagtacatctcaatatttggcgcccttccctggtgggcataacccaaccccctagggggccctaaatgacttcttagcccttgaacactccttctaggcctgataaatggccccagacttatgcagaccagttgcatcctcaggccagcccatgcagacactttccagccctaaaagacataccccaggcctctagatggctctgaagatactcttcaggtcttgcagaccctccttcacccctgggacatatctcaagatctcaagatggccccagaaccctctaaccagaccctagcctccggtcagcccaaaaagacaatctacagtgtctacagacacgatccaggccagctgtgtgatggagggcaggccttaggctcggtctaggcccagagacgccccaagtcctctcggagacgccccatagacgcccccaggaacccacggatgcgtcccggggccctgagaaggcccccctctcggcgccaggtttcgccgcagctgccgggcccgagaccgcccccccacagagagagcgtcgcacgctgttgcactggccctgtgactttgacctcttcctcatgaacatcttcccccaaa

SEQ ID NO: 154076 - DNA, 230 bp, Homo sapiens
gcaagagtatgttcaaaaatgaaattttaaaaaaatgaagttatgctctcctttgcttttattacagtccagtaaggagcttggagggcttttagacccccataatctccatcaccctcctcaaagctgctctaaataaacaaatttaagtaaaaagtatttgttatataaatgcaggatgaagacttattatgatggcttttcctctttcaaccagattgcggtgtttg

SEQ ID NO: 154077 - DNA, 476 bp, Homo sapiens
aaacgacccgaagactattctattctaccatgtttacagaagtctaatgcctttttttttcctgtcaaatctcctgtaagaagtgtcccactaagtcctaataagcccacatcctgacagcacagaaaagaacctctttcgggtgaaacaaacggcttaaatcagccaagcccctggcaccctctcctgaagcagcacttctccaaaactcattggcaccatttatggaggagagagtcttgagggtgggccccaccccactggatcatcaagcccaatggggccccagggaacacacaggaagggtctggaacacagttccgtaaaatgccaaacaggcgtaaaaggacaaactcccagcactcacaggtcgccaggaactgtcaaagccctctaactcaggggtcctcgggggaagactgccttctgccccgcacagagaggcaagtcaggccaccacggtcttcgggtcgttt

SEQ ID NO: 154078 - DNA, 483 bp, Homo sapiens
attacaagtgtgcgccaccatgcccagctaatttttgtaattttagtagagatggggtcccgctgtgttgcccaggctggtttcaaactcctgggctcgagtgatctgcccaccttagcctcccaaagtgctaggattacaggtgtgagccacaacacctgacctgtggctgttttcttactgtagcgatagacaaggagttgctgcattgcatagagatgctatattgcacgcaaaggctttactgacttcacaaaaaagtatttgtcccaggtgtagtgtactagatcccttccaatctgtaattttaatttaaaaatgtccaaatacccctgttttgaaggataaactctgtatgcttgtgcttattttggagaagccataaacttactttgttttgtacatgatcagatgtgggcgctatctccaactgtcttgcacttctgagtaagaatctgatgattgtgcacagtgacctggctg

SEQ ID NO: 154079 - DNA, 277 bp, Homo sapiens
ggaggcacaggaaggtaaaagctagcagatgctccgtaataatttggtgaatgaatggataaataaatgaatgaagtagccagaagtgaaattcaaacccaggttagcatggctccaaaaactttggggggaaaaggggcaaggaggggagaatttgaagagacaaaggaaaacaagacagaaaacgtacatccttctctgtctcaacatacatacacgcccttctctctctctctctcatgcacacacacacacacacacacacacacacacacac

SEQ ID NO: 154080 - DNA, 565 bp, Homo sapiens
ctttggtggatcccggtgttcccttgtctttttgcattgtggtcaagtgttgctgtctgcatgttgaagaagtagatatttattccattcttctcagtgtgactttattttaggtcatctttcaacagtaagtctgtctagggtttttgagtagaccatctggtatgggttgctgttgttggtgcagtgttagggagtgccctaagcctagaagtgctttgggtggtgcagcccaggctggaaatttttggctcccacagctggccctgcatcaggcttactttcgtggttcttaatgttgttgcagtcctgggtggttcctgaagcccatggcttctgttgcctgtttgccactgagtattttctgtaaacgaaggtcgctgcagtcatccgtcagtgatataggccagaactcgagtcttttctcaaaggaccgttagattcctgtctggtaccagtgtcagtctagatgcttagactgcagatacctgtcaggaatcagagtccatgagcattttatactggtagatttgttgttagagacaaagggaaacaccgggtaccg

SEQ ID NO: 154081 - DNA, 685 bp, Homo sapiens
ttttctaggtgctggaaagagattggagtttcaggaaacaaatattatccctgtttcatattcatggattttctctctctaactatgtaattataaattgagacaagtgctcaaaggaaaaagaacttctctctctagagtgcataatgaaggagcttgacctagacaaggtcaagaaaggtgtctctggaaggggatgtttgctctgagagctgtgggatgtgtaggagttaagcaggggcagtttgatagggaagaaggaagccaagttgtatggaatagaagagtagtgcagtcaaagtttctacatgggcccaagcgctgagcactcagaggatgttgcctagaaagctgttttaaaagtataaatgccattcaggacataggcatgggcaaggacttcatgtcgaaaacaccaaaagcaatggcaacaaaagccaaaattgacaaatgggatctaattaaactaaagagcttctgcacagcaaaagaaactaccatcagagtgaacaggcaacctacaaaatgggagaaaattttcgcaacctactcatctgacaaagggctaatatccagaatctacaatgaactcaaacaaatttacaagaaaaaaacaaacaacccaatcaaaaagtgggcaaaggatatgaacagacacttctcaaaagaagacatttatgcagcc

SEQ ID NO: 154082 - DNA, 337 bp, Homo sapiens
caccagtcagtgagtccagaaacttctttctcttaaaccaaatggttaagatcctggctgggtgcagtggcttacacctgtaatcccaacactttgggaggccaaggcgggcggatcacttgaggtcaggagttcgagaccagcctggccaacatggtgaaacctcgtctctactaaaaatagaaaaaattagccgggcgtggtggcacgcgcctgtggttccagctgctcaggaggctgaggcaggagaatcgcttgggcccgggaggcaaaggaggttgcagtgagctgagatggcgccactgcactccagcctggccgactgagactccatccc

SEQ ID NO: 154083 - DNA, 231 bp, Homo sapiens
gctcatgagtttgtaggtgatcctggatgtgggacgctgactccagttgaaatctggggttgtttggagagtagctgggagacagaggagactccctgagagctgggggagagctgctgggtgatggcagtaagaacatgtggtacattattgatgaacgcagtgactctgaagaataatcagaggatgacatgggagagcccaatggcttcattgattgcccatcgcggt

SEQ ID NO: 154084 - DNA, 167 bp, Homo sapiens
atatcctgtcatgattggctccctcttgtcacacaggcttcatcccacatatctcccctggcctcctgccctttccatatagccttagtttagtccccttgagttctaacattataacagaaatacctgcgctcatgaagcttgcattctaaggggaagaaacaaac

SEQ ID NO: 154085 - DNA, 185 bp, Homo sapiens
ctctatccgtatctctctatccttaatccctctatccttaatctctctatccttaatccctctatccttaatctccatctcctttatctcagccttctcatactttgccattctcttctttctggaaataaccagcacaacaattccagcaacaactgctatcatcacaaccacaataacagcac

SEQ ID NO: 154086 - DNA, 119 bp, Homo sapiens
acaccctcacatttacagtcaactaatttttgagaagggtaccaagataattcaatggggaaagaataatctcttcaataaatggagctgaacaattgaattgtcacatgcaaaggaat

SEQ ID NO: 154087 - DNA, 232 bp, Homo sapiens
tgacttagtactaatactagcctcttcaatactcatactcttaaggcttaatatttgtctctttattgatttacatatttgaaacctagacagtcttttcaaaggtgagtagatattttatatgtctgccttctggtcggtagcagcagttgtgcagttactcagctgttggcagttctgttacttaatacagaggcagagagcgaaagacttattcagaaacaaaacctct

SEQ ID NO: 154088 - DNA, 632 bp, Homo sapiens
ggctaaatggctcaatttcccaacccctaacaaaaatatgccctaacacagctctgtgactatgactgcatttattagaaaacatttagtaaaaatcatctctagttcaaaccctccagcatcagttcttcttgataattctcatgaacatttagaaataccttaaaagagaattcagactcaaatcaaaaaaccttatttcatttggttgcaggccaagatacctcttttaaccatttctggcttttagaatccttatcatgacagcttgtcctatctcagagcttcaggaggaaaaactagtccctcaaaatcaagtttgctattgagcttaataagaggtttctgtatgtcatatgtttgtttagaagaaaagcacttgttcgactcatttaatcctggcctgatgaattaaggcttgaattaatactgagggaaccttgactatacatctacaaaatcaatgtgtcctggtaggcttctgattaagataacattagctcttgcttgaaggcatctttctctgctcctaccatttatccagtggtagataatatatggagtgaaaaatgaaaaagacatagctgggctttaaagcaagatgaacatctctgtgaaccagaaatgtgaaa

SEQ ID NO: 154089 - DNA, 177 bp, Homo sapiens
ggataaggggaatttataggactgttaggaaggctgaagaccaagacctggaatggagcagaataaaagacaatttcaaagacccagaaaacagcgaaggagaggactacctcatacctggtaccatttggttaggagtgcctgtgatgcttgatgactacctcactgccatttttc

SEQ ID NO: 154090 - DNA, 584 bp, Homo sapiens
ttaagtctgataagaaacattttcttctattgattctgtctgcataatgggagacttggtctccacagctccttatcttaacccagacattcccttctactgattccaggtcttgagacaataacttaactctttaaaccaattgccaaatagaaaattgttgaattcatgtatgacctggacccccctgcttagagttgtcctgccttttgggactcaaccaatgtatagcttagatatattaattgatgtcatatgtcctcctaaaatgtttaaaattaagctgcagccaaaccaccttgggcacctgttcttgggatgtcctggggctatatcatgggccattgttcactcacatttggctcagaataaatatcttcaaatattttacagagtgaatctttttgtcaacattgtatgagcaataagttaaagaagaatatttaaaactgaaaaactaaattgtaaaatgttaagtagtaaagtgggactaagagcattaaaaatcatgtaaatactagagtaaaaaatagagtataaaaatactaaccattaaaattatgtaaataaaaagggaattatta

SEQ ID NO: 154091 - DNA, 110 bp, Homo sapiens
cgacgccgggcagtgggcggtggcctggtcttctccctggaacctctgggcggggccgggcctggagcttgggtctctgtccggagggtggtgtcacaggaagagctgga

SEQ ID NO: 154092 - DNA, 198 bp, Homo sapiens
ctggcacatttcttctgtaaaggactagataataaatataaacaaaagaacagggtcatgttccaatgtaactttacttatggactctgaaatgtgaaagttttatgaaattcaagtgccataaagtattgctgttttttttccccacctattcaactgtaaaatcttttcctacttcacaagccacaaaaatagggt

SEQ ID NO: 154093 - DNA, 378 bp, Homo sapiens
gggtagcctggggaggagataaagcaaggtggggaaatgaggatcagaaagaaggacaggaaggaaagagaagtctatccattgaacacctgctgtgctctgggccaagtgactttgctgatcactaccaactgggggaactcaaggctgctattttcagttttatagatgagaaaactaggactgagcaatgacaagcaacttgtccaaagtcccacagttgagtgagtaagtaagtaggagagtgcgactttaaactcactcctgtgtgactccaaaggctgtggaagctctttctaatgtggccccagtcaaaagtcaactaatctccgacttcagactcttgaaatccagctacccgttggctccccggaccag

SEQ ID NO: 154094 - DNA, 271 bp, Homo sapiens
ctccccatctcaggtgatcctcctgccacagcctcccaaagtgctgggattacaggcgtgagcccctgcgcctggcctgcctacttcccttttcagaaaattctgaaatggcttatagatttcagataaatcatgccagctatgttttggattttactgatgcatccatttcattattcatctaccttagtaaagcatactttttggaaatacattaaaaattattcttcaaaatgaaaatctctaccctaggtttatatttgaacatagt

SEQ ID NO: 154095 - DNA, 147 bp, Homo sapiens
ggttcagcctggcgctcgagtcctgtcgcactgtttttaatactaatccttcctggcatcttgtagacatagttttgagcactaaaccgcattcgtgctgccgtcgctacctgacactcattcttctcgcttgtgtgatccacctcc

SEQ ID NO: 154096 - DNA, 426 bp, Homo sapiens
agctcgcgaccccgagtgccgctagaggccaggactgtggtcagtgcttcaggggacaccaaggataactatctgtttaatatacagtgcctgtcctggaggaggccaccaagtcagcagggacatgagacataggcaatggaaacattagagcacagaagagaataatcaaccagcacactgtcctatacggactgtgcacatggtgccatattgactgtaaatgccacaggaactcagaataatcaaccagcacactgtgctacaccgactgtaaacactgcaggaactcagaggcagcatagttcggcacagatggaagaagtgaaaaccaaatgcttttgaaggaggtggaacttgacatcaacttttaaggcggcaaggtttcttcactattactcaacaggatgacccagttgaaataac

SEQ ID NO: 154097 - DNA, 238 bp, Homo sapiens
aaagcagactctagggacagagaagagtgggatgtgacctcccgagggactatctgaccctgaccacctcgtctactgcccacgctgcatcttcacgcccatgctacgctggggtccgtattctcccaagcccctgtgcccttccttcagctgcttcctatgccaatcctgactcctgacttctgacaccgtctgccagtcatgtcctcatgtacatgtgccaggggtaccgagctcg

SEQ ID NO: 154098 - DNA, 354 bp, Homo sapiens
aattttgaggaaagagtgggaaaatcatatctgaattagaatatttacttttagttgtcatcaatatttgtaatttgccatgcattaactatcaataaacagcagctacatcaaataagtaaatatcagtattatctttgataaaaaatgctctgtaaagactgggagtaaaaaataacatgaatgtgtgacctacgtaccatttttcttaatgtctagacgtcatacaaatattaccactgtcttatttctttgactataagtgtttctgaagaagctgatgtgattatcttaaattagaagatgcctgctataacctgagatatgtgttgctattccttagcagaactttgg

SEQ ID NO: 154099 - DNA, 649 bp, Homo sapiens
cctgtgtatgcctgtgtatatgtgtgtgcacgtgcatgcatgtgtgtgcatgtgaatgcacgtgtgtgtgtgtgtgtgtgtaggtaggtagagctgggttaaggatgagctactgtagagcaagtaaatggcacaacaggctttgatgcccggatgaagttaagagggcaccgagcaccaggtggtaggagaatgaatatgcacagagcaggaggtcaggggaagacccaagacccctaaatgctgaaggcttccgcaaagtcctgcggctcttcccctaagaaaatgcatctgagagggaggataggggactctgttccagttctgagaggcaaggagtaacaccgtgtggcttctttatttgtgttagccctacctacctcctggtacgaaggaactcagtcccagcaagccagagggaagcttccctcactcactcagtcactcactcgctcactcacccactcatcagtcacatcactcagtacaccatcagtcacatcagtcagtacaccatcagtcatatcagtcagtacaccagtacaccatcagtcacatcagtcagtacaccatcagtcacatcagtcagtacaccatcagtcagtacaccatcagtcacatcactcagtacaccatcagtcacatcagt

SEQ ID NO: 154100 - DNA, 455 bp, Homo sapiens
aacccatttctcaagaaaagtcttggagttacggccacagagctctcagcccatggaagccctgctggagtcccaggaaccaccttaaaggatgctgggtgttgtactgtggggaggaagacttctggaaccggctgctctcaccttggcagctttccaaatgagcccttgcctggggtgttgaggatgcacctgggagaatcctaggctgaggggctctgtggatttgcccccctccttcatctgaactacccgcctgccactgatgcaaaaaccagctctcagtgtccatgtcaccccacacttgcactcaccgaggtgggaaagcactttctggatcctgggtgtaagcagaacaaatggaaagtgctagaagaactgtagtgagaggcagaagcccttgaccccggcgagaggcagaagcccttgaccctggcctccctggtttctcccta

SEQ ID NO: 154101 - DNA, 437 bp, Homo sapiens
gaaggtctccttgcccctacagcctatgagagtcacttcgtttagaatcactgcaggtcagcaggtcggagcaaaagagcaggggtccctaggctggctgcttgttagagtcatcttaggatatgtaaagagtgctggtgtcccacatcccatccctagggattcgtatttgatttgttgggaaattaggcctagacattgtgttttgtaaaagcttctcaagagattctcatgtacagccagggttgagaagtatgtccctagaaaaaaggttccaactttgtcatatattataatcacttgaggaattttgaaaaataccaatacctggcctgtaatcccagcactttgggaggccgaggtgggcagatcacttgaggtcaggagtttgagaccagcctggccaacatggtgaaaccctgtctctactaaaaata

SEQ ID NO: 154102 - DNA, 568 bp, Homo sapiens
aaaagaatctaaacagatgaccctcctgagtttccccagtctattagtattagatcacccctttttgtccaatcatatttctacatgactgtccatactttgttgaacctcagcataaaaatggacaatttcccctgtatcttttgatcttcattccgaaggctcccatatatacatgataaataaatctgtatgccttttctctaattaatctgccttttatgagttgatttttcagcaaaacatcaggggaccaagggaaagctctcccttatcccctacggtatccaaaggaaagaaaatcagtgtgtcaaaaagatacctgtatttccatgtgtactgctgccctattcacaacagccaaaatatggaatcaacctaggtatccaataataaatagataaattaaatgtgatatatatatgcactacggaatactactcggtcataaaagagaatgaaatcctgccattcacagtaacatggattgaagtggaaggtaagtgaaataagctgcgaacagaaagttaaactccacatgttctcactcatgtgagagaaaaacagt

SEQ ID NO: 154103 - DNA, 409 bp, Homo sapiens
cccagggagtgaagccagtagcggtgcaaccaccatcagaatgaaaagtgaaaggagggaggaggtgatgaggatgcctcccaaggagcccacagtagggagacggaagctgctggcatccccatggttgacccatgagacttgggttcccctagaaccaagtcagcagctcctcacactgctgttccccgccagccgcccaggcctggggtcactctaggctactccctcttcctcagctttgccacctcagccaagtctcggagagttgacagcctgatggttctggaaacttctccatggccatagtgactctgagcccaggcacagatcacttcccacgtggattccctcagcagtcccttgactggcctccctgccatggtcctgcatgtggcttccagagtgg

SEQ ID NO: 154104 - DNA, 347 bp, Homo sapiens
gggggtgggaggtggctgcagacccaaagaaccagcagcagcagcctggaaagggaacagagccatgagcacagggagacggtggagggatgaagctgacatcttcacaggaaaaccagctgatctctccctgaagatctccttggtgtgtactcacctgtcctttatactggctgaactgttcattcccacatatgaataagtgaataacatgagtaagtgcccaaccctgggccaggcactgtcataggcgtttcaggacactaatgatggaatccctggcctcattaagcaaaccctctggagggtgacaacgttcaaactcataggctgctaggacttagtgt

SEQ ID NO: 154105 - DNA, 421 bp, Homo sapiens
ggtacggcaagggctcctgtgggtggagcgatgccgccaccttctgggcgctgggggcagaggcaggtagaggccaggcccggcggggcgccagagggcggctggcaggctggtgggctccctgctaaaggctggggaggaccacggtctataggtgctcctcagacttgtcggttctgttctcccctgggggaccaggcctggccatgaatcagccccaggaaggttctaatggcaaggagtcccccagaagcgctggtctgatgaatgccgtaggcacagtgcacacctaccagccctgcctggagttcagcatgtctgggccggtgcaccctgggccctggactcagtctggcctgcccagagcagctctgcaggtgtctcttcccactgcccagcacagacagggatgggacattag

SEQ ID NO: 154106 - DNA, 121 bp, Homo sapiens
ccatagtgtttaccaaagaaagccaaaaccactgtcctgcctgctcacctgttgagtaactattcttccttctaccacatgcctctaagatctgctgaaccaagactgaagtagcagtatg

SEQ ID NO: 154107 - DNA, 542 bp, Homo sapiens
gacatgaaggtataggtgggtgatagctaaaagatacagggtttcttttagaagtgattataatattctaatcattgtagagacagtcacagacacctgtgaatatactaaaaaccattgagtttgagtttaaatgtgtgaactgtatatatgtgaattatgtatcaataaacctgttcctcctcccaagaaacagacaaaaaaacagaaaatatgcaagtgtagagatcagttaaatgaataattgcacttcaaaattggcatcactttaattgcaaatatttaattataaaaagtttcaacaaacaaataaattagtaaagactactgtttgcctagcctgtactatttgccatgaacttacgtttcatttcaaactctcgtagcatacagaaaacatttccattatgcagttaagtaagaatctacgagaatgcataacttgcctgtggtcacaacagttagaaaaccaagggaatcagaagatgtatccaaggttacttggggccaaaactgtgctctttaccctacactatgacatt

SEQ ID NO: 154108 - DNA, 386 bp, Homo sapiens
ggcacacatctatatgcatttgtcaaggtttgaagaagtatacaccacaaagagtccattttactgtatgtaacataaaaaaataaaccgacaaaaatgatctgtaccctaagattatacatcggtaaaatatacataagataactggtaacaatggatgtattaggataaatgggtgtcatttccttttctctattttccaaattttgtaatatggccagattgcacttatattaaaaacaaggaaggcatatcattgatattactttcctgatctagtacttactactgaaatttcaaattaaatcaataatgccaaaataacaaactttgacaaaagaatgtaagcgcaacaagatgactcagggccattagaacatttctgc

SEQ ID NO: 154109 - DNA, 546 bp, Homo sapiens
atgccatttctagccttcaccaatgttccaaatatgtatgaatccatttctgaactctctattagtttgtcttttcctgtactaatactatacttcaagtgccataatttttttaacagaggtacttacataaagcatacaaatactgaatgtacagcttgacctttaaatacatatactcctgtgtgtgatccagctcaagccaaactattaacattcctcatgctccaggaggctccctcacgatccttaccaatcagtaccatgcttccaagatgaccacaattctcatctctatcactatagattatttctacttgtttttgagcttgctataaatgaaatcatacaatacgtaatccttgtgtctcactaatttcattcaacattaagtctgggagagagtcatcccatgttatgcataacagtttgttctttgtcattgtatatagtatttcaatctaaatagcataacttttatttctattttttgagatggagtgtcgttcttgtctcccaggttggagtgcaatggcatgatctcgg

SEQ ID NO: 154110 - DNA, 186 bp, Homo sapiens
tttgaaatcctgtcaataccttcccaaaatctctctcttccagtcccactgctattactgagttccttggcaatccaggaaacagctacatgccattgttctggtagctggaatacaccagagtacaaaattacctccttgtgaaggttacatcctagcagaaaaaaacacatcatcaatacacaa

SEQ ID NO: 154111 - DNA, 554 bp, Homo sapiens
gtagtcccagctacttgggaggctgaggcggagaatcgtttgaacctgggaggtagaagttgcagtgagccaagattgcaacattggactccagcctgggtgacaagagtgaaactccgtcttaaaaaataaaaataattaaaaagttttaaaattcactttggtatgatattttgacccctcaaagttgtttataaatagaatgaacagtggagccatctgttaaaatgccttggctgagtgactcagctagtagatgaattttgacatatttatagcaccatgcattgatcattttagttgtaatataacagctgtttattgagtaccttttatgacataggtcctggagaaccagtggtaatcaaaagagatgatacatctgacttctcacagtgtcatctgttgagggggacaaggatgaaagctgtgtcagtgaaggaggaaaattgagtggtaacagggagggcaggtgctgtggtgagcatgtatgtagcggaggccccgaactgaacacggaggtggttaggggaggcttaggaaggaaatactgg

SEQ ID NO: 154112 - DNA, 462 bp, Homo sapiens
acaggaaacctgtgccttttcctctatgtgtctgtttgccctattccagaggcctcttcccccttccctaccctctcctggctaactctgacccatccttcaggtctcaatgtgaacatctcttcctcctagaagccttccttgacccctcctgcctggattagatgcccctatgctctgctttcacagtgcccccattaccaaatgcccccttatttgcctcagtgtccaattagactgagagcccaagagagcaggggcagcatctgccatgttccatttttatatctctagcaggctcagggcttgcagataataaatattagttgatgaatgaaccaagtttgttgatttctgcactgggagctcagcatcctactctccttcaaactgagtgggcagctctggctccactggaaggttgattccagatgggtggtgagaccagaaggtctagggatg

SEQ ID NO: 154113 - DNA, 438 bp, Homo sapiens
ggaccttgcaaatgcctgcagcacagagtagcacaatggtggcatatagtgctcttttgaaaggctaggccataaatatcttaggttttgtgggcctatggtctctgtcgcaactactcagctctgctgttacagcaggaaagctgccatagacactatgtaaacatatgagtgtgtctgtattccaataaaactttatttgcaaaaaccagcagcaggctggactagaaaagtgtgcccattggcaaatggcgacagtaagagaatttgtctgccttgtttgtctttagatctgacctggaaataaggcaagaccccctaaaactgtgtcaacacaagtttgccatctatatgtgttctggttactattgctgagtttattaaaaaaacaaaactcagcagagcacagcggctcatggctgtagttctagcactttg

SEQ ID NO: 154114 - DNA, 365 bp, Homo sapiens
acttctgtcctcgtgttccacctaactctttgcacctacatatgtgcttcctgtgagcttcaatgtacttgattaattctctgttaccctgaccataacggattagtctagtcatcacctgacccaagatggcagggcccttccccaagattccgggcctagatacagttgattggtcaagggtgaatatcagtcctaagctagagtatttaggaactgtaacaaatagagagagtctgtctcttcttgtgtggttaaagtttagagagtcaaggctccaaatatattgactgccctgttttctgcagaaagctgggtcagctatgaaaaaacacaatgaagccaaagacatagaaaatatacac

SEQ ID NO: 154115 - DNA, 315 bp, Homo sapiens
gaaacctagatccctgaaatcattgatggaccctaggaggaaaaaaaaaattacccaaattcatccaagctaggtgtttgtcccatcagatatttttgtgggtctgcatatgagagagtccgggttagaagtctgcaactctgggccgggagaagtcgctcacgcctctaatcccagcactttgggaggtcgaggcgggtggatcacctgaggtcaggagttcgagacaagcctggcgaaaatggtgaaaccctgcctctactaaaaatacaaaaattagctgggcttggtgatgcgcacctgtaaacccagcta

SEQ ID NO: 154116 - DNA, 409 bp, Homo sapiens
agtaagaagtaaagagaactgatgacagagccctgatgggcagaggagaaggagaaaatacggagccagagagcagggaagaaatccagtaggatgtcgtgggagctgggataaaattgtttcaagaaaaggaagtggctactgttgtcagatcctgcaaggggagcggggatatcaagtaagatattgactgaagtgttactagattaagtaacaacaagattgttgatgatcttggggagagcaaattccatggagtgctggggatagaaggcacagtgtgacaaggagataccagtgaagacggcaaatacagccagatccctagctttggtagccctatgtgaactggcctttcttccttttgttctctgtcctccccgccaccgccgccgccccccccaccccc

SEQ ID NO: 154117 - DNA, 489 bp, Homo sapiens
tcaactccccacaccccctggtgtggcatctgaagacagagagacttgccactggggtctccagactgtttttggtaagtgcttaaacctcccccaaactgatccttagcacaaggacataatggtccttaaactttgccaaacttttcataaaggcttactttcactgaaataatgccagagtccaaagagtgttaaatttggaggatgcacttagtgatatttggatgatgacatagataagcattcacagaaagcagacacacccgcccatcttctgtgggcagaggctggggtctagtgcgcacattagagcaggacctgtcgtcatactctgtgtggcctgagctttggtttcagctctgaaaccccccttgtggcatcaggagccctgtaaatattgtaactggctaccgggtgtgtggtccctgaccacaaaatgaatatgcacggacccatactatttgtatataacacaggcctaattcc

SEQ ID NO: 154118 - DNA, 584 bp, Homo sapiens
cccccctgggggaattgaggccaggcttggtggctcatcctgtagaggcgggaggatctcctgagtccaagagttggagaccagcctgggcattatagcaagactcggtctctacaacaaatttttagcattagctgggcgtggtagggctgttgctttactgggtaatttttgtcttgaggcctcttgcttgtgagaaggggacggcagtatacttgagtttctcaagtcagagtcatggttcattggacttagttttttgtattaaaataaaaatagattttcctgattgtgtataaaaatgttcatatagtcatttaatttccacaccaagccacggcctccccaggtgatcagccagtgccaacattttgctgtctctgacctctcttgatcacagtacatacaatgcacagtgcacttgtaatttaaacgggctattctgttactgcttttgttgttgttgtttttgtttttgtttttttgaggtggagtcttgctctgttgctgggctggagtgcagtgaactgacatcacaccactgcactccaacctgggcgacagagtgagatctgtctcattaa

SEQ ID NO: 154119 - DNA, 376 bp, Homo sapiens
ctttgctagtcacatggccataaatagctgatcgtctttcttcctgctttcataaatctccgataaagcatgtcatggaggagctctcgtcatcctggttaaaaacaacctcttcccctttttgactgccttactcgccactctagaaacccacttcaaaagcctggctcttttcactttgtttcgtagagacaggtctctccgttgccctggctggtcttgaactcctgatctcaagcaatcctcccacctcagtctcccaaagcactgggattacaggtgtgagtcaccacacctggcccaaaagcttggctcttttgagagtgtttttatggcttattttgaaactaaaaccgtatctattttagggcctgat

SEQ ID NO: 154120 - DNA, 565 bp, Homo sapiens
cacgttcatcttcaaggcaggaagacaggggaggtgggggtaccgggtgtgttggtgtcctgtggctgctgctgtgacaaatccacagacagggaggttcacagcagcgacgtctgttccctcacagttctggacacccgagtcaaagatcagtgtcattgagcccacatcaccatgtgggcagggctgtggcccactgggaaaatatccactccttgtctcttcagcttccggtggctgccagcatttcttggctgacagccgcatcactgctatctctgccagtctctgcatcgccttctcttttctctgggtgtgagtgtgtgcacgcacgtgcatgcatgtgtggtgtgtgtgtgtgtgcatgtgtgtgcttgtgtgtctttcacaagcatacttgtgacatacttgtgatggcgttcagggctcacctggataatctacccactgtaagatctttaatttaatcaaatctgccaagagttctcttcttccaaatagggtaacatttacagattgcagggattaagacctgatattttggggcccattatcagtctgccac

SEQ ID NO: 154121 - DNA, 422 bp, Homo sapiens
ttgtgctgacagctgatttttatcttttatgtagcctggacattttgtttattatgctaagaggctccaggttagacttaaatattttattttaggcatgtaggtcttagcctacttttatgggctgtggttcaaatggcaatttaattcttaaagcatttgcagctattatttttatcttctttgtttatccggtgccaggaaagctctcactggttcctgccagggctgcccgaggggacacaaagagtttccccaggctgggccacttgtgtgcttcttggtgggtaaggcatgttgtgggatcaccctatggctgcctcctcgctgccccggtgcttcttggcagggaaggaaaatcttggacctaccaggtcaaagagccttcctgggccaggataactgctatagtggggtctctc

SEQ ID NO: 154122 - DNA, 561 bp, Homo sapiens
  misc_feature (8)..(8): n is a, c, g, or t
  misc_feature (54)..(54): n is a, c, g, or t
ctgactgnttcagaaaaaggtgagatgaggtctcactattgttgcccaggctgntctcgaactcctgggctcaagcaagcctcatgccttgcctcccaaagagctgggattacaggcgtgagacaccgcgcccagctgaagctttttatttgatttctgtgtcctttttttccataatagcaattttaacaggtatgtaattttctatacagtgaatgtacaactgcagttttctttaactattacacaatgtttaaagatttgtgttttcttaggatggattatcaaatatggaatctctgggtcaatggaaatagacatcttaaagtcttctgttgtattttgacaaatgatttgccagaaatgtaacactcctgagtcccggtgaggctcagagagcaccccagggcccactgtaacatttaaatattaaaaatggaaccagagctaattttagtttaagaaagtttaagttgtaatattatgtatttgtttatgttttgagacgagtctcactcttgtcacccaggctggaatgcagtagcacaatcttggctcact

SEQ ID NO: 154123 - DNA, 164 bp, Homo sapiens
gaaaactcttaattcctccctgcccaaaaggggcaaaaagggctaaatcttccttctgtgttggtgtgaatgggtgtgatgtatacagtcataaccttagatttatctatcattttcatggctgtaactaaaagctacggttaattgaacatttattagcagtg

SEQ ID NO: 154124 - DNA, 496 bp, Homo sapiens
aaggcatcatttggagtatcaaatacagaggaaaataaagtgattcttcagcctttgctttggcatagaatgttaccaggtatggacttaactatgtttgctgaaattattttcaggttttagagtcaggaatgaaggaacattccttgagtatttgatagatttgtggtttatagacagtaaattctataatcgatgagcttcctctttagaagttcttgaaccaaatttatggttcactgtaagccagtgtataggatttaaaaggatgagtctttgcatgagtctgatttctaactcatttgatacttctttttcacttccaataaatgttatcttgctttctgaacaaagtaggttatacataaatgcaattacatacggatggttcctgactatacctacacccttgtgtaggtttcaggctctggactggatgctctgttgcctctaagacctgatgggacaggtcaggagcaggggctttggggccaga

SEQ ID NO: 154125 - DNA, 220 bp, Homo sapiens
atgtgaacaagaaactaacctttactctgtgaagccaccagctgctgggggtgacttgctacagcagacaggctactcagagcactgtgctcctctctctacagcctcctcgcctgccggctgtatttccattttccacaaacacacctgttttcccactggattgacctccttgaggaaaggaactgtattatactcatttctacgtcctttgcaccta

SEQ ID NO: 154126 - DNA, 392 bp, Homo sapiens
gtacatgatgatgcaagcattgtacgagtgtctaggaagagggaacggagtgaatatgagcatccctcacagggaggtaaagacgtcccaacaccaaaaatatctcaacacaaacaaacatgtaaggaaaaaaaaaagtacaccgactgcttccactctgaccctgctattacagccacaaactcagtggtctaaccagaatgtgagatgaacaaaaaagggcaaataagttagataatgctgtatctgaaatgacaccagtctcaatacttcaccttcaataagaagcttcccagcgctgaagccacactgtacacatggtttctttctttccttaagcatctggcaccaatgacagcctacatttgggggccaacacaaacgtggagcct

SEQ ID NO: 154127 - DNA, 678 bp, Homo sapiens
ggatgaacgagattcccactgtccctacctactatccagcgaaaccacacccaccagtggtgggcggcccctggaggtgctggagaagcctgtgcatttgccaaggccgggacacccagggcctagtgagccagcggaccagaaactgtccgctgttggtgaaaagcaaaccctgtctccaaagcaccccaaaccatccactgtgaaagattgccccaccctgtgcaaacagacagacaacagacagacggacaaaagcccgagtcagccggccgccaacaccgacagaagggcggaagggaagaaatgcactgaagcactttatgctccagcagagggcgacaagctcgaggccggcctttcctttgtgcatagcgagaaccggttgaaaggcgcggagcggccagccgcgggggtggggaagggcttccctgaggccagagggaaagggcccggtccccagaagccaccgacggaggcagacaagcccaatggcatgaaacggtccccctcagccactgggcagagttctttccgatccacgggcctcccggaggcctcttgagccagcatcgacacctctttttcccaaggccccgggggcattgctgaactttcagccccaacaacctggcccattggaagggtaatcctgtccgggaagggcccaacccactg

SEQ ID NO: 154128 - DNA, 376 bp, Homo sapiens
ggatgaacgagattcccactgtccctacctactatccagcgaaaccactagaactcctgagacaccacttctcatgcttctccctccctaccagcggtcaaggctttggagccactcttttgtaactccagattatttaaagagaaaagtacaagacagaaatcttctagcactttgtaaacacagtgaataacctcttggagtatttttggctttatataaaacaaggtttttaattgtaaagtataagtgccattagaaaatgcacagggcatatctttgttaaagtagatttttcaatgttttacagaattacattttcaaaaaaaggtttttataatgaagttgtttattaaaaacttctgaatgaaaaaaa

SEQ ID NO: 154129 - DNA, 677 bp, Homo sapiens
atcccagcactttgggaggccgaggtgagtggatcacaaggtcagcagttcgagaccagactggccaacatggtgaaaccccgtctctactaaaaatacaaaaaaaaataagccgggcatggtggcgggcgcctgtaatcccagctactcaggaggctgaggtaggagaatcacttgaaaccggaatgcagagtctgcagtgagccacgatcacaacactgcactgcagcctgggtaaaagagcgaaactccgtctcaaaaaaacaaaaaacaaaaacaaaggtaaatcacaatatccattcaagaaaaacaacaaatatgctaattataatatttatgcactatctttggtaatattaaattatgaaaaatgaataatatgaaagtgaacaaagagcaaacttccttcttccaaaaaaagtgaacttcttaatgtaatctgctgtagtttgctttaattatataatcacagccattacttaaaagctaaaaaagactcagaaaaagaaacacccagtaggagttaaacactgtataaataaccttggaagtaatgaggcttattaaaacgagtaaattaaaaattgaagcccaatatgcgaaatggtaaatgtgattttagcagaacagcataaaattcttcatcacatgtcatcataaagctctccttttgggag

SEQ ID NO: 154130 - DNA, 709 bp, Homo sapiens
tttcaggatggctttctgtggttgacacacttcaggtggtgacagccccaactccaattgtgagctgcattcaacataaaaggtcaatatgtcactctgtttttcctggttaggtttttatgatgctcagtttagaaagtgacgtaagattcagatgcatcaattcacgtgaaccaggagagataataacacgttactcagtacccttaaccccacttccgttttctgttttaggaggaagcaacaataaaacaatctgatatcaggtatttatttacttttctaaggaaaacggcttagtattgcttagggttgggaaggaatcacccattcttccacactgtggggcgtggcccggtggatcacttgtctacacacgattttggagccccacgctaggcctggctggctgcgtgcccgacatgagaacagacacgagtcagcccactcctgagccagcccgctcctgagccagcccactctgctgccccgcaggaggttgctatctaatgtgggaggcacatgtgaaataacagttgccatctggtgtgggagggaagcgtgtaggctgtccacaggctgcacactctcctcttctttttattctctggcccccattttcctcatctgtaaaatgcggagaattcctgctgtattagtctgttctcatgctgctaataaagacatacccaaaactgggtaatttata

SEQ ID NO: 154131 - DNA, 312 bp, Homo sapiens
aggcaccggcatgtgtggctcaagcaactatataaagctcatgactttatgaaatcaaatacagggatttcctttcttactcccacacattccaacagagacatacataagcacttttgtgcaatttaaacttgaagccatcccagtgtggagagagagggagagagctctctccacactctctctccacactggtgtggtgtggaatgaggggctggacccagagggcctgctttggccggggtgaattctctggcttcagtagggttcacttcctttcctgacagtggcttctctccagtgtggagagag

SEQ ID NO: 154132 - DNA, 755 bp, Homo sapiens
caaaaataagatgtgaaaaatagaatatatatattaagataaaggtattatgaaaagatatatagaaatacccagtccccaatcctcacataaaggacttctgaaaaacttccctttttaatttcaaagactgcatataaaggtataatgaactatatcgcttacttaataaaatcctaagtggcatacatcccagtacatttagaaatttaatctcaataaagtcaaaggagttaccgtcttggatgaggatgaaatctgcttcatttatagtataaaactacagttgtggatatgttaagcatgtcctttcttactccatgttaccactcattataaaatgattggtgttttatgtagcttatattttaggataaacaagaggataatcaagcatgtttaaaatcaagttcaaataaaaaattttctctgaaaacttaattttttatgaatctagtatctctttggttaatagaaaacttgagagaacattttattcacttattatggttcacaatttggggtccttgaatgcactccagtggggttcatgaaacctctgaaattataagcaaaagtatgtctatgtatgtaaacttttctagggagagggttcatggttttcacaggattttgaaaggggtcagtcatctgggagtagagtctctgccttgggtgaaagttgaggactgagcttctttgaaaaagaaccttccccatgacttactgaagatgttaagagattaaaaaaaaaa

SEQ ID NO: 154133 - DNA, 408 bp, Homo sapiens
ttcctcctttcaccttccagggaatctgcatgcatcagccattacctcctctttcaaaacacaagaatgggagcacgcaatgcacactttcctacactttgctcttgtaattttgttttgtttttttgagacagggtctcactctgttgcccagactggaatgcagtggcgcaatctcactcaccgcaacctgcacctcccaggctcaagcgattctcctgcctcagcctcccgcgtagctgagattacaggcacgcaccaccactcccggctaatttttgtatttttttagtagaaacggagtttcaccatgctgcccaggctggtcttgaattcctgacctcaaatgatccacccgcctcggcctcccaaagtgctaggattataggtgagagccgccgcgcccgg

SEQ ID NO: 154134 - DNA, 184 bp, Homo sapiens
gtattgtgcaagagtctaggattgggcaccacagggtagaaatgatgaatcaaagcttactgattctgtttggctttctgtggtgcattttggcagccctgtgtggatgtgtcagaggctgtctgaccacgcgtgaggctcgttgatggtgataggtttctatgtgtgacgctaaaacgccagg

SEQ ID NO: 154135 - DNA, 246 bp, Homo sapiens
  misc_feature (239)..(239): n is a, c, g, or t
ggccactgtaggggaaaagaataaaaaggtagttggctaaaatgcagaagtccctgaatgctaggtcaggaatttggactttatcttgtagacaaaatagacttactgagaaactttgtatacgaattatatgtgaaaaaactattcttgacgattatttatatggcagttgtggaacaggaaggcaaagagggacagttttttttttttttttcccttccccaagggtgaccggcganggggatc

SEQ ID NO: 154136 - DNA, 551 bp, Homo sapiens
aagaaatgtggccagtgcacaggggtgatagagagtaggtacccttgtcctaaggagttttgagaaagctacagtcttctgctggcacctggggcttatccattgccataggaaccattcatcttattgctgaagttctaagtgatttgagatgaagaatgtttgcttgaacacattttaccctgtggtcatccttccgcatacaactctaccctcaaagccggagtgcttcctgctgctgtggagccggggtgctgcaaacttctgggatattccacaatttaatgccagtgattaggatttttgttaggaaactccggcaggcagataactccagcaggtccgagacaagttggtgtaaacgttggcacggactggctcacctgttgtgtgattaagtcatggggctgcctcttgttctctttgggacaaagccaggcagcatttgttcaagtgaaaattaaggctctgtgtggtgtgtgcctgtatcaatagaaacaggcaagcagattccgcaggggaaaagactgagcaagtgggtgggagggacg

SEQ ID NO: 154137 - DNA, 387 bp, Homo sapiens
gaagctttctaggtcaccttacccataaatgcccactgaacagatcttctcagatttcagaggctcagtctcattagtcacgtgtgtgataaggctactttttccgagaaggctgaggtctatgctggcagcttgatgttctctgcagatttgatgcaggatttctccctggctttctcaggtcatttcattggagtcatttccttttggggtcctagacctctttggtgctaatgccattaggctatgccaggaggctgctgtgctaagccttggtaaagatgggtgaaatgaatgcttgttgtgtccccctgtacttcaattctctcccttcttgagtaagcaagccctgattacttagtaacgtctctttcatcatcaattata

SEQ ID NO: 154138 - DNA, 477 bp, Homo sapiens
agttggctgtaagtatgtggatttctttattctgttgcactggtctatgtgtctgtttttataccatgaccatactgttttggttactgtagtcttgtacattttgaagtcaggtagtgtgaggcttccagctttctcccttttgcccaggattgctttagtgattctggctcttttttggttctatacaaatttttttctttttttagatggagtttcactcttgttgccaaggccagagtgccactgtcagaggtgcaatgtcagctcactgcagtctccgcctcccaggttcaggcgattcttctgcctcagcctcccaagtagctgggattacaggcgtgagtcatggcacctggcccatttctttctttttatttaatcattggtttggcttatgctgaatatcagtgacaagagaagacatccttttcttgtttctgatttcagggggaaagcatctagtctttcaccatt

SEQ ID NO: 154139 - DNA, 363 bp, Homo sapiens
aaggtaactctaaaaagttatttagcttccatcagcatcctttttcttgactggggagtgcaactaacctatctgtaaagacaaggaaggaagtaatattgctgcaaatacctaatacagagcttgaagcataatcgattctaaaaacaaacaaaggcaacaaacaataaaaggaagtttccattccttctactgagttcatggattttgagctttggtgaaacttctcatctcccataggagaatcccagcattatctgcctccttgatggcacaggaggcaatctggcagttacagatatttagaaaccaaagtgacactgaatatctcagcagtcctaccatcccattcagggctctttc

SEQ ID NO: 154140 - DNA, 468 bp, Homo sapiens
aatagaaaggcaattccatttgttggaagatttttcttaccaaatgttggagagttaaaaagaaatttcccatatacagcacttcagaaggacccaagtcattcacagactgtttatgactacaattaagtcttctcttagtagatgatatcaactccaaacccacacaagcaagctgagttccattcaaagcaataacagcacctactctgtgcttcctcttctcttctgaaaacagcttagcagcttcacagtaatgatgtcttcaaagaattctgatgagccaaggactgtgagcatagggctgatctccatcatacctagtgcagctctgcctgattgcacaaaaaaacttatgcagtttccctttcaaatgaaattagcatagatgaatgtataatttctgagtaatttgccaggccttccccctttttctcataataaagctattctattcaccatcaaaaa

SEQ ID NO: 154141 - DNA, 112 bp, Homo sapiens
atatgcccactaaaaaaagcctagaaacaatgacaaacccaagcgatgagtacctctagtgccaagggaaccttggagaaatggctgattccagatctgggttagaaaatgt

SEQ ID NO: 154142 - DNA, 274 bp, Homo sapiens
cacaggcctgctacgtgagagaggcagaacgacggctccctcaaagacgtccatctcccaatccccaggacctgtcagtgaatacatcaggttacagagcaagggggaactaggttgcagatgaaacaaggttgatcatcggctgactttacaataaagagattctcctggactgtctgggtgggcccaatgtaatcacaagtgtcttttaaatgtgggtgacagacggagaaagtcaaagtcagagacttgaagatgggggaaggggccatgg

SEQ ID NO: 154143 - DNA, 537 bp, Homo sapiens
ttccatgatatccacggtgttctaaactctcgctgtcagtgccatttccatgatatccacggtgttctaaactctcgctgtgggtgccatttccatgatatccacagtgttctaaactctccctgttggtgccatttccatgatatccacggtgttctaaactctcgctgtcagtgccatttccatgatatccacggtgttctaaactctcgctgtcagtgccatttccatgatatccacggtgttctaaactctcgctgtgggtgccatttccatgatatccacggtgttctaaactctccctgttggtgccatttccatgatatccacgacgttctaagctctccctgtcggtgccatttcgcatgatatccatggtgttctaaactctcgctgtgggtgccatttccatgatatccacggtgttctaaactctcgctgtgggtgccatttccatgatatccacggtgttctaaactctccctgttggtgccatttccatgatatccacgacgttctaagctctccctgtcggtg

SEQ ID NO: 154144 - DNA, 498 bp, Homo sapiens
caggagacagaaacgacgtaaaacaaggttggggagaaaaaatggactccatgaacacccaggacactcccataccagcccagagggctgcaggctcctacaagtaggtacagccccactggctaagaggaggcagaaggtccccaccagagccaatccaagaaacaaggctgtcattccactccaccctgctggaaagcagggcagtggaaagaaccaggctatggaatcaggaacatctgaatttcaatcccacctctgctgtgttttgagaccagcaacttaagttcctcaagcctccattccctcctctgtaaatcggtgctgccaaactgagtcgctctccaggccagtgaaacaatgtctgcatagtaagccggctggcacctggtgctggattaactctctttccgcaattaaactgaggctcaagtagaggtctcccaaggccctactgttgtgtggtcttggcaaagtgctttctgttctctaggctcc

SEQ ID NO: 154145 - DNA, 681 bp, Homo sapiens
aggggaatttgggccttggaaggcaaaaaattgggcaggagggttattgtagcaacgtattctttattttattaaaaatttatataaaaagctccaaaatgaagttacttgaatattcggttggttttttttttttaaagatttattaagtaggctgattgttaaaggatagaaattgtgttttcatctccttaattataatagataatagtggtaggaaaatgggagatgatgatcccctctaaatattcccttttgacaaggttagcattttttctttaaggcagaattgatcttcttttaggtaagtatttagattctgaaactgctgcagatggcaggattttcagtactcggtacatttttttaaatggcccattttgatattcctttcttttttttaacttaaaattttcaaaaaagttagatctcacagtaaatatttctcaaatccttccaataggattcaatttgtacacatgtttctgatgaggtcactgcttgttgttatgatacagaaaagcctgtgtctattttaggcatttactgtacatttctcccgagaaaagagtgagatcgtgtcatctcatgctccccatccgcaggtcacttcctgtagaaatatggactaacttaaacctcgttttactgcaatcacagcaaccaaccccataaacacca

SEQ ID NO: 154146 - DNA, 659 bp, Homo sapiens
tagtgcaaaaggtgaaaggtactattgtagcaacgtattctttattttattaaaaatttatataaaaagctccaaaatgaagttacttgaatattcggttggttttttttttttaaagatttattaagtaggctgattgttaaaggatagaaattgtgttttcatctccttaattataatagataatagtggtaggaaaatgggagatgatgatcccctctaaatattcccttttgacaaggttagcattttttctttaaggcagaattgatcttcttttaggtaagtatttagattctgaaactgctgcagatggcaggattttcagtactcggtacatttttttaaatggcccattttgatattcctttcttttttttaacttaaaattttcaaaaaagttagatctcacagtaaatatttctcaaatccttccaataggattcaatttgtacacatgtttctgatgaggtcactgcttgttgttatgatacagaaaagcctgtgtctattttaggcatttactgtacatttctcccgagaaaagagtgagatcgtgtcatctcatgctccccatccgcaggtcacttcctgtagaaatatggactaacttaaacctcgttttactgcaatcacagcaaccaaccccataaacacca

SEQ ID NO: 154147 - DNA, 850 bp, Homo sapiens
atacagaaaagcctgtgtctattttaggcatttactgtacatttctcccgagaaaagagtgagatcgtgtcatctcatgctccccatccgcaggtcacttcctgtagaaatatggactaacttaaacctcgtgagtactgatctgagcatctcttgcagcctgtagtataagaaacccacctgggattttatgatagctgtggaattagaaggcgggaaattaacttttatttcctgaatttgtgtgtgcattgctaagtctgattcctttataatattccttctagaaggaagaatgaggttttttcagtcatcatgtaataaaagcctggggtcttcagcttggccataacagccttgacctccaaagaatgtaataacaatatatatatagctgtaaatggtattatactatcttaaaagttttagataaaatcatagttctctttgcttagcataacatatttaaaagcctaatacaatgctttccattcttttttgtctgttgatacttggctttcttagaactcttttgcttagctgttttagttttaattacttttaaaggtgggttatacatttaggagggtagggggctggtcttacgaagttgaattaaagtcggaattggccttacggttcccccttaggaaccagtttgcattagaaattccgtaacggtaagggacacacacgggattcgataaggactatagagactaaattaggttaccttagagcgatgtggacacgggagaatctaaagcagtgtactttggcatttgaattatatattatttgttaattattgttatcgagcgagagaacgagtaagcacatatgacaagag

SEQ ID NO: 154148 - DNA, 1080 bp, Homo sapiens
ggcataaatttatggtgaggaagaaaagacagcaagcatgcactattctttctaccagtgtaattgtgaaaggaaaaggaaaaaacaatgtggtatccagaggggacatggattcctaaagattttgaacataattatagatacagtgggggtaaaccaacatagaaggggtttaaaacccaggagttgacaggaggatgttaatttataggaggaggcacctgagaacaaggaaaatggggaagagagaatagtacataaatggagaacgagctcctccacttggaaaaaaatgagtaaggaaaggttgagttagttatacacaatctagtgatggggagaggcaaatgatgactttcgtctatgaagtaaggagttaaggtgatttgctaaaaatgataaggtaggtaatgacaatagagatcctgcaatgatttcatgtggactctgtgggacaaagaataaggagatgaccaggactgcagaccaattttcagagtttacttgaagccggaatccttttttcatgaatttttcatatcattcatcttcacgattgagcattgtgacttttctctagtaggtcctatcagtctaggcatagaagaagaatgaatatacagctgaactgatccaggtctgaagttttgccttgtgtgtgtgatgaatcgatcaggagaatgtgttaagggagtctgcaagagtatattcagaatgacacttagattagttgtagaaaagagaataaataggaatggactgatgaattgggaacaaatggagagattaaagggaaaagggcatggaatgtgtgtgaggaactgatataagaggatgtggttcaacaaatttgaacttggagtttaagagttaaaaaatggaattgttctaggtaatagaaagctaaaatgtggatgcctgaagtcaagcggaggtgggtaataaatagaactgaggacaaagagtgtgaggcaagattatcaaactggtcaaccacgtgaggactaatttcatggagcatgaaggcagtgatgaagagggagactgtgaaccaggtatgaagttattgttgaatcagtg

SEQ ID NO: 154149 - DNA, 1082 bp, Homo sapiens
  misc_feature (2)..(3): n is a, c, g, or t
gnngtgtgtatacatatgcatatatacatatatgtatatgtatacacacgtacatatgcagatatataatgcatctatgtagtgtatgtgtatacatatgcattatatatacatgtatgcattgtatatctatatttatatacagatatatacatatacacagtacagtggtttgattaaaaaatgaaaaagttgggcttttatgggtcattgctctgtttttaatttagagtggttatggaaggtacatgggatatgaagttcaggttttagctctgcgggttattagctgtgtaattgtagacgagtctttgtacaagtcttaactccttatgtaaaattgaataggaaacaataagtactttatagtgaggtgaacataatattagataatgtgaaagtaccaagtaaactgtaaatagtatttgtattttttatggttagtaatatcatctgcctcattcttgaattttttcagtacctttgttattcaaaataatacaagatagaagatatttttggtatgtgccattctgttttaatatcatacattattttgttatgtgaaaacaatgtaaagctacacaattaaaatagtgtggcattattgcagaaatacacatataaatcaatatttttagaataaagtgttcacaaagacctaaatatatgtgacttaacatatgatgaagatacaattttagtaagagaggaaaggatggattctttaataaatagtattgggaccattgcctaggaatttaggaaactaataaagctgactccctcctatatactatatgccaaaataaatttaatatgggttaagtatttaattaaaaacataacactcttagatatttcagatgaataattttaatatattgaaatcaagaaggtccttctaagtgcgagtcaaacaccatgaatttaaaggttaatagattgactaatttaagatttaaagaccctttattcaaaaagcagcatcaaaaaaattgaaatacaaattacacactggcaattattatttatgacatatattcagatgaagatgtattttctttataaagagctcttac

SEQ ID NO: 154150 - DNA, 1279 bp, Homo sapiens
  misc_feature (2)..(3): n is a, c, g, or t
gnngtgtgtatacatatgcatatatacatatatgtatatgtatacacacgtacatatgcagatatataatgcatctatgtagtgtatgtgtatacatatgcattatatatacatgtatgcattgtatatctatatttatatacagatatatacatatacacagtacagtggtttgattaaaaaatgaaaaagttgggcttttatgggtcattgctctgtttttaatttagagtggttatggaaggtacatgggatatgaagttcaggttttagctctgcgggttattagctgtgtaattgtagacgagtctttgtacaagtcttaactccttatgtaaaattgaataggaaacaataagtactttatagtgaggtgaacataatattagataatgtgaaagtaccaagtaaactgtaaatagtatttgtattttttatggttagtaatatcatctgcctcattcttgaattttttcagtacctttgttattcaaaataatacaagatagaagatatttttggtatgtgccattctgttttaatatcatacattattttgttatgtgaaaacaatgtaaagctacacaattaaaatagtgtggcattattgcagaaatacacatataaatcaatatttttagaataaagtgttcacaaagacctaaatatatgtgacttaacatatgatgaagatacaattttagtaagagaggaaaggatggattctttaataaatagtattgggaccattgcctaggaatttaggaaactaataaagctgactccctcctatatactatatgccaaaataaatttaatatgggttaagtatttaattaaaaacataacactcttagatatttcagatgaataattttaatatattgaaatcaagaaggtccttctaagtgcgagtcaaacaccatgaatttaaaggttaatagattgactaatttaagatttaaagaccctttattcaaaaagcagcatcaaaaaaattgaaatacaaattacacactggcaattattatttatgacatatattcagatgaagatgtattttctttataaagagctcttacaaatccataataaaaagacaatctgaaaacctgtaagatagagaaaaacgtagccaaaaatttaagaagaggtatttcacaagagaaatagcaatgttctgtatgtacatcaaatggttattttattaggaattgaaggaatgatttttaaaagtgagataatttttgcttatcaggttggcaaagatgaaagaagt

SEQ ID NO: 154151 - DNA, 469 bp, Homo sapiens
accctgtagacttagccatgacatcttcgtctaggccaatgtcctgaaggatttatcctatgtttccttctagggttaatatggttatatgtcttcaaaatcacaggcaacaaaaataaaaatagacaaatgggactatattaaactgaaaagcttctgcacagcaaaagaaacaatcaacagcaaaattataacctacagaatgggaggaaatatttgcaaactattcatccaacaggggattaatatccagactatataaggaactcaaacatctcgacagcaaaaaaacaatgcaatgttaaaatgagttaatggtctgaacagacatttctcaatttagatgtcttcttagacatgtaaatggtcaacaaatgtatgaaaaaacattcaacatcactaattctcagggaaatgcaaatcaaaaccacaatgagatatcatctcaccctacttagaatggctatta

SEQ ID NO: 154152 - DNA, 377 bp, Homo sapiens
tgtttagctgaaatgagaatttatactagaagacgcctcccagctccatggaccagctcactccataaggctcctgcccctgagggtccgccacctccctcagcacccctccaatcccacacctagggaatttcctgggaacctgccttttaaaccctctccatcctctaccctgcctctagcctctgcaaaggcccaggcacaagtgctgggcatggctggcggggcctttgcttccctcagtgcccagggacaaggatgtgcagggctggcagagggaccccaaggttagcgtggacgggatccatggacgcttccttctttctggctggaaggctgagatgataacagaaaggaagcggatgttctctgaactc

SEQ ID NO: 154153 - DNA, 443 bp, Homo sapiens
agaaaatcagtgaaagaactggttattttaggaagtctctaaaattgacaaacatctagcaagatactacaggataaaaagagagaagacccgaactaccaaaatcaggaatgaaacagaagctatcactagagactcttcagaaatcaaatgggtgataagagactgctataaacacctctacacacataaatttgacaatgcagataaaatcaaccaatccttttaaaagtacaaattaccacatctaaaccaatatgaaataagtgagttgaaaagccctataactattgtgatattatgatacatatattggtttttatccagtgttcccggctaactcccattgcccttgttacagtcttttgttacaatgttggggcactttaggcctcagaaagcaaaatctccctctctaaccttctgccttcctttcccctgtt

SEQ ID NO: 154154 - DNA, 234 bp, Homo sapiens
gttgggtgtgaaatagttgtttagaattgtgtacagttttcttttgttacctttaaagcttccgtagactgtttttggatcaggcagtaaaattgctataaaaagtacttcttttgtcataaaacctcatgatcagttttggaagtggaatgttaggtaacccagccaaatatttacatatacaaaataaacacaagactgaaaaatagtaaatttttaacctttctcttgctg

SEQ ID NO: 154155 - DNA, 244 bp, Homo sapiens
gcttttattttgcagatgctgatgctgtatgagaggttaggagatttaaactccactctaatggaaatgacccatggagataggtgctgaagtttttggtctcaatagctgtctctaggctaaaatgtcttagctctacgttgccgttctttgagatactagtgtcttgtgtttatagattaaatagcttggctgtataagtactgaccaaaaacgtattagcttttccatagactctgaatat

SEQ ID NO: 154156 - DNA, 388 bp, Homo sapiens
ataaattaattttaataactattatatttagctcaaattatataagatactattatttcaacatataactaatatcaaaattattaaggctatatttttcgtgtttttttattgtctttgaagtcagatgtgcattttatacttgcagaaaatgtcagttagggctgcccatattgtaaggcttaatagccacatgtgtctaccatattggacagcacagccctagagttatttttgcttgcttttcacttgaaacaaatgtcagcatgcaggaaacatctaaagccaatttctatagaaaactgtatattatttgtataatatagtagtaatagcaacttttatattctataaaataaattcttcatgatgaattctataataataa

SEQ ID NO: 154157 - DNA, 492 bp, Homo sapiens
atgcatatctaaaatcttgcctacttcaatttgcagtgattcttccccaaatacaatttaatgttcccatgtagatgtcagaaagcatttatcaggcacttaaatgaatcccatacctgtatgccacaatagttaaggacacaagtattgcatagacctgggatgagttactaattcacaatttactctctaccaggctttatgcaaatacataacctctggggcctcgttttacttatctgtaaaatgaggacaataatggtatctatctcatgtggtctttgtgaggtttaaattagaagttacatttaaggggcttgatgtggtgcctggcataaagtgcttaataacctttcatgttttttgttttgttttgctgttttttagagagaggatctcactctgtcatccaggctgaagtgcagtggtgcagtcatagctcactgcatcccagaattccagggtcaagcaatcctttggcttcagcctctc

SEQ ID NO: 154158 - DNA, 346 bp, Homo sapiens
actgtgctaggccaatttttgtatatttttttctttagtgcttttcaatagctttgggggagaaagtttccacatctgtaaaatatggataataactgaggcttaaagaagttaagtaactttctcaagtttatgtaaacaagtttcattgctagaaatcaaaccctggaaactactgactgaaaggtcatcctcttttcctagtaccatatgccacatcatatgtaaaacttttgatctagtccaaacatactttttgggtaagtgattcttaaatttggtttctggtatttttcagtaggttttagaactcaaggctgcctttaacgatgcaggagagatacag

SEQ ID NO: 154159 - DNA, 240 bp, Homo sapiens
ctatagcctcagactcctgggctcaagtagtgatcttctggtgtgagcctcctgagtgcccctttgcctagctactgctccaaagattttattttgttttatttatttatgtatttatttatatatttatttttttagctggagtttcgctcatgttgcacaggctggagtgcaacggtgcgatctccactcaccgcaacctctgcctcccaggttcaagcgattctcctgcctcagcct

SEQ ID NO: 154160 - DNA, 351 bp, Homo sapiens
caggcataagctacatcacctggcctgaaatacgcttgaaggcatcctttgaaccactgttatcacagaagtgtggtcaggttcagtgtggagagtgaatgagaagctgggcaggagcctgtgcgagttgggctttgtggagacacacagaaagatgccccccactttaaccaccttcccttgcctcgtcgtttgactgctgaggtcttactcacactctgagactgtagctttcacgtggcctcctctaatatgttttcagtgtagccttaacaatgaatcgtagtaacttctcaccttacatgctccccaaaagatgtcactttgggagaacatattcaaggaaccctc

SEQ ID NO: 154161 - DNA, 316 bp, Homo sapiens
acacacacacacacacacacacaccttttacttccccagagcaaagccaaataagaggcaagaggcagtgctgctggaggcagcgtggttggggcggagagacaagtctgctttggggaaaggttgctcagactcagttttgtctcctgcattccatcttgggccactgctgtcctcctgccgcagctcagccccactcgtcacaccgctgcagctcggggatgaagcaatgcatcatcgatgttttggaagttgggggagatggcttaatatagggcatagtcagttgtgaatagtggccggcagggcagagggg

SEQ ID NO: 154162 - DNA, 440 bp, Homo sapiens
taattattgtatttttagtagagacagggtttcacaatgttggccagcctggtctcaaactcctgaccttaagtgcctcctgacctgccttccttggcctcccaaagtgctgagattacaggcatgagccaccgtgcccagcccctattccttttcttatgcatacttgtccctggcccatttctggtgtttgtctctccttcagaaaagttggtgtatggacgaggtcaggagatcgagaccatcctggctaacatggtgaaatcccgtctctactaaaaatacaaaaaattagccgggtgtggtggcaggcacctgtattcccagctactggggaggctgaggcaggagaatggcgtgaacccggaaggtggaggttgcagtgagccgagatcgcgccactgcactccagcctgggggacagagcgagactccgtctc

SEQ ID NO: 154163 - DNA, 239 bp, Homo sapiens
tagtcatcatattttaagagcatctaatcaggtatttatcccaaacatgagcagcagtacattcgatttgtttactaaacagaaattggataaatctggcatccaagtcacagtcaccactttgcttgtacagcccaaggtcactcgggtagctcaggtggggagaagggggtaaggcaggatacaagagccacttttccagccgcacaaggcctattctgatgttttgacagagtccc

SEQ ID NO: 154164 - DNA, 228 bp, Homo sapiens
actcggctgggattacggctatccaggtacccaggctggggcaggagaatcactggaacctcgggggtggaggttgcagtgagccaagattgcaccactgcactccagcctggggcaacagagcaagactccatctcaaaaaaaaaaaaaaaaaactttcataggaaaatttgttcttaaggcagctcgaacactacctccttcctaacccctttctccaacatccaa

SEQ ID NO: 154165 - DNA, 573 bp, Homo sapiens
acctctctctgggcaggcagatctgaagacctgagaaaaaccaaacctcaaactctgcctctaaagacatggaactaagtaagaacctagccctggagccagacagggactctccctggagaacagcagttcccaacctttttggcaccagggactggttttatggaagataatttttctacacataggaggtggggggtagggggtggtttcaggatgaaaccgttccaccctccgatcatcagacattagattctcataaggaaggcgcgacctagatccctcacgtgtgccgttcacaacagggttctcgctcctgtgagaatctaatgctgctgttgatctggctggactcagagctcaggcagtaatgctcacttgctcaccactcacctcccactgcatagcccagttcctaacaggccacagacccatactggtctgctgcccaggggttggggacccttgcggtagagggtcccaagaggttagcaagcgccagtgggctctgagggctgcctttgccatggtcagctgatatccttctctctttgttatttactatatttgctc

SEQ ID NO: 154166 - DNA, 330 bp, Homo sapiens
ttggaggacactagtgctatgaggccaattatacaggtcaggaaatggaggctccaggccccagaatagcctcagtcctcttggggaattagacatcccctagaggatcctacgagaagtagcagggactaccctgcccctgcacaaacttgatgtatacctgggaacagaggcatggctcccaggatggagccagctgtcctaccagaggtgctacagcctctcctgactcccaggctgcagttcctcccttaccagcccagaacctctcacaccttaccctacatcttggcacagcagagaaagcccttgttctgtgatcccaaaact

SEQ ID NO: 154167 - DNA, 374 bp, Homo sapiens
tcgtcccagtcacaaggttattagaaccctctgcctccaaggttcaagagattctcccgcctaaggacccggactccaatgtagctgggactacaggcgcccgccaccacgcccggctaattttttgtatttttagtagagacgcggtttcactgtgttagccaggatggtcttgatctcctgacctcatgatccgcccgccttggcctcccaaagtgctgggattacaggcttgagccaccgtgcccggcctaacatttcaccttttagagtgcttttgagttcatgattcaggtgcatgcttcaggtgaagccaccttttaagggaccatgcaggggaaacctttccagattggcttatgaggaaactgaac

SEQ ID NO: 154168 - DNA, 136 bp, Homo sapiens
gagaagatactgatttgcagattcagttgtccttctctaacagactatttatgtaatattgcagttgtgattgtgataggtaagtggaccagtcggttaaaataaatcatattattttccttttgtgaaacctgag

SEQ ID NO: 154169 - DNA, 465 bp, Homo sapiens
ggcagccggccacagagcctggtctcagggtatagcgtagaattgccaatgccactcatgcatccatgggcacacacatgcacactcacacatgcactcgtgtgcacacagacatatgtgcacacatgcatgtacacatgcacatgcattcacatgtacacaatgcactcatgcacaaacacacgtgcacacacacccccctccacctggttcctcgagtccatcgtccttacttctcagggctgcacctgacctctttcacgtgaatgtgtgactctgacctgctggtgcatttcccacccagaggttcacaccaaactccgccctgccctctggagtaccccccaccactggttcctcggttctaaacttgtgtttattttacagaaaatttaatgagtaagcaaagtctgcttttccagcctgtctttctcatcatctatgtgggcttttgcttcttactta

SEQ ID NO: 154170 - DNA, 353 bp, Homo sapiens
cgaggcaatgtgggagttctctgtgctattctaccactttcctgtagccctgaaactatttcaaaatgtaaataatttaagaggcaaaataattcattctgttctactgaaaatcctttcagttcatccggttcaaattactgtctccttgagtttacagctcagttgcaaacatgttcttaggctaaaattccatctaagacctcagtttgagaggctgtttaacttcctatcaaattattttgagatactggtaccaatgtaaatcaaataaaactataccacaggtaaacataagttcctgtgtcaagatgccccatttttatagaatgcactggtaacaattaggagat

SEQ ID NO: 154171 - DNA, 327 bp, Homo sapiens
cctggacccatgtcctcatctgtaatgaggcaataccatgacctttatcatgaggattaaatgagataatccacgtaaaggaaatggctacataattgtcagtgttcagtaaattagagctgttacgatcaatgattagcaatcttgtgaattcaaaactgagcccagaggatagtctttttgccttctgaacaaagcaaatatctctataccagccctcgcatgcacactgcttaacaaagggcattcatagatattcaatgggagttggacagaggggtcagacatcatacaattgcagagctgcacggatgtgggctgaaatca

SEQ ID NO: 154172 - DNA, 166 bp, Homo sapiens
ggagaggagagactgtttgaagagcacatttatagtagaaaaaatagaatgagcaaaaacatggaagagaaaaaataatattcagggtcgagttctagttggctaaaacatggtccatcgggatgaagactggggagacagctggagttagggaagacaggaagtt

SEQ ID NO: 154173 - DNA, 666 bp, Homo sapiens
gtgtcaaattcttcctgaaacagtctcatctttgcctctgtcctgcccagcttctttgctgttatcttgtacactatttcctaagggatacatagcctgcatattagccgagattgtttctcaaatttaaccacttattaaatttaaactctgctcctcctgaactaccaaacatgctggcacagagcaagcactcagagtccctggctgtttgcttaagtagcatgaaataactcctatgttaatccaagggaaaaccagcctgcctgtgcagtgtgggacgggcaaggaagtgctctggtcttcctcttcttccaggtcttccttccaggaagtgctggggaagtgtagtcccaggagggctgcagagctccattgcactgggcatgggccatcctgtcccataacaggttcctagtacttaccagtccctccagctggagcttgggtgctggaataacactgcaaggactcttgatttctgagaccaatctagtttgcttgtttctaagaaatttggattagatattccagcacaaagtgacttttaaaaaatactcatttctattttggccaaaagtgtaaaattcaggcaagttactcaccagagttctgtggagggatgcggacagagctgaccaaggccattctgctcttaccctgatg

SEQ ID NO: 154174 - DNA, 350 bp, Homo sapiens
gcaaatggaaaatgcattatttctaaaagggaaataccaaaagcactggcaggagcaataatggaaacaagagtgaccagatagatgggaaaattatgataggacctaacctaatattcacatgataaaagggtttctcaggctaaaaatgcacacatatgcctatgtatgcagtcactgatttttttcctagttttatttgcttctttctttctcccaatttcctgggaaacaagaaagtttgtgttaactcctgactcaaaccaaaccggactacagtatggtcaagaattagaaacacagacaacactgaagggctgctctcgggataataattgcttgttacgcat

SEQ ID NO: 154175 - DNA, 336 bp, Homo sapiens
gctgcaagcgacaagaacatcaggaaaatgatttaagatcccatcttaaagtagcagtaacaaagaggaaggctataagaactttaaagacaatatcaatgagggaggaagcaataatagtacctgaagacaagaataagttgataaaagtggggaaaaacagaagtcatttttaaaaataatgtactggaatattgtcaaatgttctcataaatacagacagtggaatgtaatactatagagaatagaatatggaatagaaacagtattgaatgttaagcagaatcagcagtgctaaagacacactagcatcctcacactttaattactcaaatg

SEQ ID NO: 154176 - DNA, 507 bp, Homo sapiens
agaggctgataatgggagtgaggaaaatgaaaagagagagcgagggagtggaaggtgtgtgggatcaggccagggagatttatggcgatttgtacctgattgttcatactaaagccattatgggatgattagagaaaaaggtgaggctttaagtccagtgaaaatcaatagagacgtctggagcaattctgccgtgcaagtgaaaggactatttacagtatccggagcacctccccctcggttgccgtctatggagtagagggaagggctggggggaaagcggagggtggagggagagaaagaataaatggacaggaaagagggaagaggagaagagacagaggaagagggggaggatgggagaagcccaggaagaagaagaaaaagtataaggaagagaaagaggacacagaacccaggaagcaacagagcggggaagaaaaaaaaaacacacaaaggaggcccctcatggacccaattttccccacagcatttagcaccttctag

SEQ ID NO: 154177 - DNA, 440 bp, Homo sapiens
atgcaaagtgttaattctagcatggaaatgtaattacattaggtgagatctcagggagacttggtatgttaggctgagaggaatcttggaaatcattgttatgatgtagagcagggagtgatgtcgtgatacagagttggaattgggaagccagttctaagaattgtatcacacctgtagttttgcctacacaaaagactactgctactaatgacaatgataatctctaagtggaatattttatatattggtgctgagcttaatgccttatatttaatacattgtcacatttaaattttctcaaataatgtgacatatgtactaatacattccctttttagagaagtggaaaataatgaatcacctgaaccttcactaaataatgatctcgtctaacacattagagtttttaatgatattgtaattcccatttcacccta

SEQ ID NO: 154178 - DNA, 407 bp, Homo sapiens
gcggttccttagtcacccttggctactgtacttcccccaagattgcatctccatgtttgcatggtcatgatccctggaagatggtgatgaggatgaggtcccagcctcatagaccttttcctctgagttccccccaaggcacaatggaatgatggacccagggtgggccagggatgatctggagatctcaggagaccacaagctgggcttcctgtctactacatgagtatggtgtgagcagaacagtgaaagctgtctatgttggttcaaattctggtgccaacactgatccacttagggaccctcagcctgcccagaaacctcctctgggcctcaattttctcacttgtaaaatgggattatgggagaatgaagtgactttttttgggtcacatgatggatgggat

SEQ ID NO: 154179 - DNA, 397 bp, Homo sapiens
gccctgcagtttcagttccaaccttgtaaaaagtggaatagaaggttccagggcacactagctgcctgttgaatctgacccttgggtttcatgacatcccaaggcagggagagtaggaaggcagagacaataattagctggagacaggttctgccttctgctctcctcccactgagtggcaggaattaaaatgctgagatcatggcaggaagtgagactgaagaccttaagcgcagcacactttaggtttcttccataaatatataaaatatcttgactgaaaacctaaattcagttaggaccaggtgtttctaataaattgactatctctaaaacttggctgggcgtggtgtctcacgcctgtaatcctagcactttgggagcggggagaattgct

SEQ ID NO: 154180 - DNA, 547 bp, Homo sapiens
actgggtggtagtgggtataatactaagttgagatgatatcatttacgggggaaggcgctttgtgaagtaggccttatgtctcttgtcctttcgtacagggaggaatttgaagtagatagaaaccgacctggattactccggtctgaactcagatcacgtaggactttaatcgttgaacaaacgaacctttaatagcggctgcaccatcggcgtgtgacacgccgatgggtgctgttggtcatcaggacaatcctgaagttctcaatggtggcagtgagaatcttgtcccataggtccctgatgggcttgaagtagtgggtgtaagccacaggagggcccaggcccttgcttctggtaccagccatggaccttcacccccagctctcaggtgacctcttccagggcgttcaccttggccaggtaggaggccagataggtggttattgagggtctgcatggtgatcttctcgttgcctaccagcagcccattggacctggccagggcattagcacagctgccactgtaacccccatcgtccccatcat

SEQ ID NO: 154181 - DNA, 174 bp, Homo sapiens
accctccagattcaacctcaacctggcctaaggcccggcgtcagccccacccaccaatcaaagcccaggagggaaacaagcatggcccacatggggcactggagacaagggaggccctgcttcccacgggcgctctcccccactcctcagtgccccatgcatccaccccacaga

SEQ ID NO: 154182 - DNA, 541 bp, Homo sapiens
taccactgtcagagcggatcagagaaatgtctgtgttaccataatggtaactgcagtcatttatatgatatactaactacatatacctaattaacatgcaacacagtaatgatgatgcatataattatctcttgatattaactttctaaatttcatcttagtatgatattaaatgctgatctgatatgttcagactttgatagtttactgctcatgatgacagtaatctgctaacaattttaagcattagaagaaacattcattatacataacagcagatttccagagacaaaagaaagaaacaattagagaaaaatgtgatcaaacatattggccatgacagctggctgtgctttgcattataaataatttaatcaagtccaacataaatgattttggattattcataaattggcattaactattccatagctcttctccattaatatggataaataagggcaaaaacataaacattttttagcaaaataagccattcaagaaactatcataccaagaaaccatactaccacagtaccaa

SEQ ID NO: 154183 - DNA, 424 bp, Homo sapiens
tatctttaagagttagtcgtctttagttctttttcctggtaacactgtttttaagtaatatctctaacctaaaatgttaaaaagaagaggacattggaaactaaaaagtagtgttcgaattttccataaatgctacatgtagttgggtgaactaaggaagttgaaataataagataggctttacacacacacattttagtgtaagtgaaaaactgagatgaaattagaattatgatgaggtctttccatcagtctgaagtaatgtgtgcatgacatcctttgaaatgtttgacttagacctttcatggaaatgagaatatgcttcattttacagagttaatgatttttaaaaggattttaaaaacaagtagaagtgttttataaatcagaataaactgggtttttttcttttgaaatcaagttt

SEQ ID NO: 154184 - DNA, 485 bp, Homo sapiens
cagactgagagtcctttaaaattaactgcctgtttttcccactgtggctagtgagccttatctctccacttcccaggcattgtgaagaccctgtttctctagctgtgcagctgcaaggtcactagacagataatctcaagtcgtaaagcatgttgttccttaaaaagtaagaaatgatgtaatgcatgtcttaactgaataactgtctttgtttcttgcttctgtaatacgcttccccttgcacagatctacccccaccccacgaaatgcttaaaaggtagcttgactttttgttcaaggctcagtcctttgggtgttggtgtcttggcattggggtctgggcattggtgtcttggtgttggggtctgggcattggtgtcttggcgttggggtctgggtgttggcatcttggagttggtgcctcggcattggggtctgggtgttggcgtcttggagttggtgccttggcgttggggtctgggtgt

SEQ ID NO: 154185 - DNA, 282 bp, Homo sapiens
gtcactctaagatccccttgccaaagacctaggtatactctcacctggtcttcttttgctggtgcttctatcatctccttggaaaggactttgttccttgtatgagccatgcccccacactatccctttcccctgctttatttttcttcatagccttcgcccacagctgtcatatttgatatttgtattcactttctactgtccccctcccctgaccccgctgagtgctcacctcattggagcagaacatggctctgccccctgtgcctagagcagggcctg

SEQ ID NO: 154186 - DNA, 127 bp, Homo sapiens
atatacagaccagccctgccacatactcaaggtggattgaatatcaaactatgatgatgatgaaaatagtcactttaaaattcgtgacattggccgggcacggtggctcacgcctataatcccagca

SEQ ID NO: 154187 - DNA, 512 bp, Homo sapiens
gagggggaccctggggtcttccacagtccctcatctccacctgaagagcatcctgacaagttatggtagttttcttattctttcaaatgataccacgcagttcatcagttttctcagaacgattcttggtggagctgcactacactgagttttacagccccactgagatgatctgttgcttgctggagcctgggtggcagattttctagcaggatctgagaagtcaatgagtgaaggcagaactgccctggagaggaggaattctggcagcataagctcagggaattagtttgggaaagaaagtttgtaataacagtgttctagttcctgctgaataaaacattcagagagcttttcttctcccagcagaaaaataaaatactctggaggcaataggatagttgttctttttaaatgttgtttttcataaaactcagatggttgcagtcatctgaccatgacactgttctccctccttctcctgcactgggcatcttgtgggtgtgtgtgag

SEQ ID NO: 154188 - DNA, 386 bp, Homo sapiens
ggtcttttccagtcttctttactcaaaacattcccaaggattcaggaaatttctatcactatctatctatctatctatctatctatctatctatctatctatctatcatctatcatctcagctactcacatttctccagaggttggatttggtgtcactaatgtttagtgtcattgccttaaaatatgaaactcagtgactgaggctgttatcatatcagcctcttgagtagccacagtaaaataataaaaggacaaaacaaacatgggagaaagaatagtatgtctcagccaactttgggcacactgcctgtgagttagccctgtccacgaggagcagcagaaagaaagaaaaagaaaaagaaagaaagaaagaaagaaagaaag

SEQ ID NO: 154189 - DNA, 489 bp, Homo sapiens
agagctctgtcaccagctgagctgtgcttgagtccttgttacccaaaacaatgatcttggttctagaacacatatgggcactgggctccgtgaaggcccacctgcccatgcttgcttggatgcaggaagacgctcacagtaggcgcacctgggagctgctgcctctggatgccacaaggagaagttgctccaccttttgagcagagctgagccaagggccttaatctaggccctggttacaggttggctccgctgaagggatagagagagtaagggcttgaaggtgcctcttcctcaacctcttaggccaagagtgctcaatggcatgccagggcactgcagagttggccagtggccctagccactggatcctacactcctcccctccctcttgtggctttcctcccatcccccttccatcattaagatgatgacgatgggccaggtgtggtggctcacgcctgtaatcctagcactttgcgaggccaa

SEQ ID NO: 154190 - DNA, 234 bp, Homo sapiens
ttagtccaacagtcctagcaagaagagagtgcttggcgccttgaagaggtgaaggtaaagtgaagaatcaaccagcctatgtgattaaaaggaagtcaaccaaacagcccatgcccaccatccccagatacaccccaagccccttcccctacacatacctctcctacaaacccctgctctggtggtgtaggaacctctaaacccaccacacttccccgacacaactccccttcc

SEQ ID NO: 154191 - DNA, 540 bp, Homo sapiens
tcattcttaccttactccataaatacataagtaaaaactgggaaaaggtcaattactagctgttcttaaacaccctttttctcacaaattaaaaatggactgggtggtagcctgcctgagtttcatgggtgcactgtaacgtcaatgttttaagactgagtagtccttcccaggactctgcttgaagtcctccaggctggtactgtttagggcactggctaggcctctcggtggctactcactgccatcaagtaatgcctgaagctaagcatcaactgatgggcagctgtggtcagtgaactccacaccttaaaggttcatggagacgccaaacaagtagctgtgccatttacttccaattacttcttttatttgttaaccagccaggcttcactgactgttagcacccagtttcttgctatggactttggtgaccccagcatagcactagctccagatacttcacattgccatctcctctactttctcacttctctaagatgtatggaacacttgtagctcacccacaactactgaggc

SEQ ID NO: 154192 - DNA, 835 bp, Homo sapiens
gagcaattaaataaaaaagatcagtcatcatcatcaggcttgctgtcccctttccttccaaacacctgaaaaaatgcctttttagagcatattgacatttaagctatgctttatttcattgtgaggaaataattgtatttttccccttttttttttccatgccttctgatttgctggcattttatttattccttaccatggtagaaacccagttgaggcagtattatgtataagttaaaagcagaactctcgagcctgactgcctgggttcaaatcctgccaatgccttttatatctgatcatgagcaggttaacctttctatgacgtagtgtcctcatcgaaaaaaaaaaaaggggggggtgaataatggcagctacttcatttaagtgatttcacattaagttttaggtggcacatagtatgcattataagtgttactatgatggtatcagcctttgctagtgaatcagctgagcttttaaaaaaatgctatagatgcatttgcatgggggtcttgaaggatatgtgaaaaattgctaagataactcatcgtttggtattttttcctttctagatgaatatatgatgttcaccccttgggcttctttctttcctccagagtttagtataacaactttgactcaaagcagttgctgcctccccagagttcatcctatcctcttgtctagtcttagattagctcttctagggaggtggaatgagtttgggctcagaagtgaggcaaacctgctgggttttaacatctgtgtcctgccactttgctagcctaaatatgatttttaatgtatctcagcttcagttttctcacctgtt

SEQ ID NO: 154193 - DNA, 539 bp, Homo sapiens
tcctaagcttcgcctccccatccagcccatctggcaaaagacagagccaaaggctgcctcctgctggcctcatttcaggctttggcttctgggacctggtgtctttgggactggatttgttccttgcagacctggacgaagagctgctgagaagtctccatgtgttgtcagagacccctcctcttcctcaactccctgtgacccctgttgtgcagacttgggggaaaacaagggcacaagaattgtcacccagcaggtggtgtggggctgctaggaggaacagggagtgtctgctactgagttcagggtttctttaattttttgttgttgttgtttgttgttgtttttttttttttgagacagggttttgctctgtcacctagtctggagtgtagtggcgctatctgagctggctgcaaactctgcctcctgggttctctgcggcaattggctgcttttcagaatgcagtgcatctttttctccctgaagatcttgaagcttctgctcaaagtcactttccatctttttcatttccacc

SEQ ID NO: 154194 - DNA, 470 bp, Homo sapiens
taatgaaagatttctcagaagggtgtttataagtgactgacttcactattcattagccctttcttctataaacttaggtgtccagaatggagtcttatgaaagaactaggattccatattctacaagacgtcctagaaatctgatacccttgaccttgtttgctggataactgtgcatgatactttgccaggtgctgtgaatatgaaaatatacttagatgaggttaccattatcaagaactttatatattaggagccagacatatacatttgaaaataccctcataaatagtcattacaaagcaataagtgcaatagagttcaaagaaagaccattattgactgaattgatcaggtaacactttgtcaaggaagtcgtcatttgaaggattggtatgcatggaccagaagaagtgagtaagaagaaatgcagatgtagcattagcaaagtcaacataatgggaaatgta

SEQ ID NO: 154195 - DNA, 327 bp, Homo sapiens
ctagtgtcttgaccagggagaaagaagcatatccccaggaaggctgttggagaaggtggatgggacccacctgatggggagcttggagtccgagcggtcccatcacagcgctcagagtgtgatgcacaggaggttggtgcctcccctcctggccctgagtccatccctcatccctccccagagagctcttctcagaagtgccctgattggggcctgacgccatttcccttgggattcctgagtttgatctcttgtggaggactgaaataaacctgttgagttggggcaacttggaaatttccttctcctcctccttcttctttctct

SEQ ID NO: 154196 - DNA, 178 bp, Homo sapiens
cgtctcttgaggatccccgcacgctctctctgtgggtggggcgagcagcatgtctgtgacttcaacacgttccatctgaaaggatttcacatcagagaggaggagctgaatcagaggagagcatgctttttttttttgagacggagttccccttgcacaggctggagtgcagtctccg

SEQ ID NO: 154197 - DNA, 542 bp, Homo sapiens
cagaagaaaatcaaaatgagagggcccagttaggggcagaaggagagcagttagaatttgccgaaggtgtgggggctggaagaggtaaggtgatgtgtaggggctggatgtcctgggccaggatatcgggaggctttactcttccccactcccactaaccggaggtcccgagaggaacggggtctgggctgctccctgccacctgtcagcaggtcaagccttccaccggaaactgccccttattcaagaatttagcttctctcaaaaactccgaaaccccttttctctctctctctctctctctcttttttttttttttttttcaatgctcctggccttggacccagcacccaaagacatggattagccctatccactaggacagagcattgcagacccactaagccttggagagagaaaaggatcttgttcattcttagtccccagaatgaccaagacaaaccccgttagccaaacccctaaaaaactgtttggcttaggttagattagctccaagtgtttgaccttgaaggggaacaccc

SEQ ID NO: 154198 - DNA, 305 bp, Homo sapiens
gataactggattaagagaaatcacatgggaaaggcatttgttccttgaagtatctgtagattcagggggttgggagggcccctgtatagagataggaagggggagggaaatgagaaagaatgtctgcttccgttattaaatcatccttccaagggattgaaatatatatgcaggtgatacagcaaatttttttaattgaatgtaagatatttaattattatgacatttctttaatgtcatttaacaatccgttgtggcaaaaatctaataggaataaagcctgtgatcattacagatcaactttt

SEQ ID NO: 154199 - DNA, 562 bp, Homo sapiens
gggaggtagaggttgcagtgagccgagatcgcaccagtgcactccagcctggcaacagagcgagactccgtctcaaaaaaaaaaagccttaagttcttgccttcggggaactcaatttgagtgtgagagaccggcaggggacgcttactgtggtgtgaccagtaatgatgagaaacagcagtactcaggctcactgtgagggatacccagggcacactagagaaaacttaccagagggaagagaggatgggttttgaagaatgtgtaggagtggatcaggtcatgggaggggcagcataggcctgttcagattgaactgaaattgggctctttgtcactgacagctggttcttgtttgtcctccccatttacatagagtgagtctgctgtcctttccaaagcttatcaaatgtttatacatagttgtcatgttccccctacatttcttcctgaggccgaggatgatatgtgatatgggggagataattttggataagaggtaagcagggtggagaaagaaaattcagtttagataaagatttaattcatgacttaagctgag

SEQ ID NO: 154200 - DNA, 564 bp, Homo sapiens
tatgtgcatttctaatctatgatacaatgtgaaaataaagtcttactcaaagcttttgagtaatgtaaatcatccaataccctattactcaatgatcctctatccatgtatataatattcaggcctagggattatttgccaaaaggaatagaattatatgaaagtatttttcaaaactatgtgtttggctattaacactattaaaatacttatgagggctagttacatatcaggactatgaagagaaaatctcacatcatatgatattatgtaatttcctagcaaggtcagaagacacacacagtgccagattcttgagtctgaattaagaaagcaaaattaatatcttttattttgtgtataacaggcatttttgtatatagtagacaattttacatgcagttacagaataagtataactcactatagtttacataaacattaccctaatattcacataatcaaagaaaggaaagaatctgctagattaacctgaacaatattaccatacctcttctggatacttataataggattccacaggatatccaaacttccatttta

SEQ ID NO: 154201 - DNA, 204 bp, Homo sapiens
taagttaatttacagttacaaaaaaggaaaagcactatttatgctatcacaagaagcactacccatatcccttctctctcactttctctcactctcttttctctctcatctaagtgattttgcttttgttttctaaggaagtctttcctcagaagctgcctttccattagggatttcccattctgtttcttcgtatcttgtgtt

SEQ ID NO: 154202 - DNA, 436 bp, Homo sapiens
gaactgtgggtagttctatcaaattatggaacttgaggaggctgttgtacaggacccaggtctagatgcagttgctgagaagtacaggtggcccctggggctttgagtggcatctgctgagtggggctgtgttgggtgagccaggaactcatggagtctctgctaactctgggtggcttctgaattgagtggttgcatgactgcttagtgctggagaattcgctggtgttcagcaagcaccacacatttggtgtcagaaaaaaagacagcataggtcagaaccttccactgactcacagtgagcgagtggtctttggtgggcattgagaccccggtggaaggactgtgtccacactgtggggaggggccagcagggtgtgtgtggaagtcccagaagtaattttctggctgctcacatttccctcacacactacct

SEQ ID NO: 154203 - DNA, 551 bp, Homo sapiens
ttctgggattacaggcctgagctagcatgcccagcgaacagtaattttcttaagaaacggaatcagccacctggattcagtagtcttgtgaataccaacttcagagattaaaaggaaataggcggtattaaataccactttcgttttctaaattcataatgaaaagcatttggggaaaattgtgctaagaggatgataaatgcttccctagacttaatccaaatctacattttaacaagatcccctatgatatcatatgtacattaaggtgtaagaagcattgctctagagttaggcaaatactgtatccattcagcagctctgctataccttggctggcatctcttgattatcttcaccttttttttccttgtggtcacaggatggctgctgcagctccaaatatcacatctaggtcatagcttagaagaaagttgaagaggccggtggctctttctttgttcagaatcaaaagcttttccagcagctaccagcagacttccagtatatctcattgactacccctagctgctggagatgctgaaaatggg

SEQ ID NO: 154204 - DNA, 143 bp, Homo sapiens
ttttgtatggccctatgggctaagaatgttctttacattttaaaacggctttgaaaaatcaaaagaaaaatcaaattttgtggcacatgaaaattacatgaaattcaaatcttggtgccaataaataaagttgtactgaaaca

SEQ ID NO: 154205 - DNA, 606 bp, Homo sapiens
ttgttttttattttttttgttttgttttgtttgtaacagtcttgctctgtcatccaagaggggcatgatattggtgcactgcaacctccacctcctgggttcaagtgattctcgtgcctcagcctcccgagtagctgggactatgggcgtgcaccaccacacctggctaatttttgtatttagtagagatggagtttcatcatgttgcccaggctgctctcgaactcctgagctcaagcaatctacccacctccacctcccaaagtgctaagattacaggcatgagccaccatgacagcaaagctgggtatttcttaaattggttcagtcaggtgcaataaattatttgccctactctaaaatttaaaaatcttctaagaattatggttttgcagctgaggtttttttaagactcgagctccctggactcctacatatatccttagaacaacattgtccaatagaagtacaatgtgagccacatgttttgtttaacccagcatatccaaaatattaccccctttgcatgtgcttaatataaaaatttaagatgatttatattccaggttttcaatattcagtgagtaattttacacttagagcaag

SEQ ID NO: 154206 - DNA, 466 bp, Homo sapiens
ccaaacggctgctaaagttcagtcttcaggcatcggaacaagggttaagtataccatctaaataatcccgcactactaaataatctccaaggcaggagtctaggtactgcaaagaccaagttcacagatcaccgaagggaacccttaactcacaaatagtccctgaaactgtggtgtaaaacaggggttccaaaattcagctgcatttcagtatggtctgcagcagcttctaaaaaatcagcatctcgtggctgggtgtggtggctcacacctgtaatcccagcactttgggaggccgaggctggcggatcacttgaggtcaagagttcaagaccagcctggccaatattgtgaaaccccgcctctattaaaaatacaaaaattagccaggcatggtggcgggtgcctgtaatcccagctacttgggaggctgaggcagggagaactgcttgaacctgggaggcag

SEQ ID NO: 154207 - DNA, 547 bp, Homo sapiens
tgtgtgtgtgtctattaattacaaatggatcactctgcagaagtactgtgaagaaaacaaaggaattactacaaaaccaaaaaaattatacaaggaatatttttacaatttgttcttgaatattcaaatttttaagaatcagatatgctcaaatggcaactgatgaggcaccttcaagagtaagtatgcaaaaagaaatgtatagccaggttctgaaaaaagaacaaaaactcaagactgaaaagatgacaatttgaaaacaacttcaaagcttatagtcaaggcaaagtgtattaaaaaaaagaaagggaaaacatcagatcttattaatggtgggaaagacacacaaccaacctaagatgtagtctacagattttatttatttatttattttgagacggagtctccctctgtcacccaggctggagtgcagtggtgcggtatctactcactgcaacctccgcctcctgggttcaagcaattctcctgcctcagcctcccgagtagatgaaattacaggtgcacgccaccatgcccagctaatttt

SEQ ID NO: 154208 - DNA, 573 bp, Homo sapiens
tcgcgaaagtgtatccctaaaaactaatattaaagatagaagagaatcattaaacaaaatccaatcccaaagaaggcaggaaaagagaagaaagggaatgaagaacaaaggggacaaatagaaaattagtagcaggatgttcattttaaaatcaaacttagcattaatcacactaaatgtaaatggtctaaaatgccaattaaaaggcagaggttgtcagaatgaattttaaaaagcaagacccaacagataggtaaagacacatacaggtttaaaagtaaaaggacaggaaaagatacaaattgcaaatactaatcaaaaggaatctagagtggctatattagtatcaaataaagtagacttcaacaaaagaaacattaccagagataaagggggatatttcaaagtgataaaggcagtatttcatcgaaggatgtaataatcctaaatgtatacacatctaaaaacagagcttcaaaatacatgaagcaaaaaccaatataactttatccaggctagctatatccacaattatagtggagatatagttagcctggataacacgtcgccgaa

SEQ ID NO: 154209 - DNA, 625 bp, Homo sapiens
  misc_feature (584)..(584): n is a, c, g, or t
tgccactttcagcttcctgacttgaaatgtctccccgcaaataagtattattactccaccgcaggcctgaggagaaaaaggtgaatgagcctcttcccagtcctgaagctaatcagtctaatgaactggtaatgacaacatattcttatccttctgggccacttctattagcctcatatactgctgagagagtcgaaagtgctgagctaagtcagggaaggtaagagcaggcaggtgactgctaagacacttctgttctacctgtctgacacctgatatcctgcagggacgaaaggccatatttatggatggtgaaggcagtggaaactgtactgacctgggagtcagaaaccctaagtccaagtcctagttctgccactaatatgctgtgatcttaagaaagttactcttctctctgggcctcagtttcctcatctatgtaagtaagggctgagctggtcaatctattaagatcccttacaggccaggcatggtggctcatgcctgtaaacccagcacttcgggaggctgaggcaggtggatcgcctgagcctgggaaatcaaggctacagtgagccattatngcactactgcactccagcctgggcaatggagaccctatctc

SEQ ID NO: 154210 - DNA, 495 bp, Homo sapiens
ctattagcctcatatactgctgagagagtcgaaagtgctgagctaagtcagggaaggtaagagcaggcaggtgactgctaagacacttctgttctacctgtctgacacctgatatcctgcagggacgaaaggccatatttatggatggtgaaggcagtggaaactgtactgacctgggagtcagaaaccctaagtccaagtcctagttctgccactaatatgctgtgatcttaagaaagttactcttctctctgggcctcagtttcctcatctatgtaagtaagggctgagctggtcaatctattaagatcccttacaggccaggcatggtggctcatgcctgtaaacccagcacttcgggaggctgaggcaggtggatcgcctgaggtcaggagttcaagaccagcctggccaacatggtgaaactccatctctactaaaaatatgaaaaattagccaggtgtggtgatgggtgcaatctctgcctcccagcta

SEQ ID NO: 154211 - DNA, 420 bp, Homo sapiens
ttggggagttggggggggtttattccgggtccatctcacacaaagtcacacactctcactggcacatgcgggcacaaagaatcacgctgacacacactggcatgctgcacctccctcaatcaaacagacacaggcgtccccatacaaagaatcttgccctcactcacagacaccttgaggcacccggccacacccgaacacatcgatgcggcattacacactcagggacgtgcatgtgggtgcagacacacgggacacgcgcagtcacacgatcacatgccatgaagcacacagcacagacacaggctctgccaccgtcaaatgcagccccacaggcacagctagaaacacacagcacacacactcagtcataatgtcagtgcccaaaacacacacatgagcaccgatacacccgcacat

SEQ ID NO: 154212 - DNA, 450 bp, Homo sapiens
ttttttcgttttctttgtttcttttttgagacagtttcactcttgttgcccaggctggagtgcaatggcgtgatctcggctcaccatagcctccaccccccgagtttaagggattctcctgcttcagcctcccaagtagctgggattacaggcaagtgctaccacgcccagctaattttgtatttttagtagagacggggtttctccatgttggccaggctgatctcgaactctcgacctcaggtgatccgcaggcctcggcctctcaaagtgctgggattacaggcttgagccaccacttccggcctcctatcccaagcttatccccatctcttatgtcaaatgaataacatcattggtcctgatgcccaagctagaaatttgagtgattttatttttattgttttttgagatggagtctcactctgtcacccaggctggagtgaagtg

SEQ ID NO: 154213 - DNA, 387 bp, Homo sapiens
tggggcatggaaaccaagttgctagtggggtggtaactatggcatttttctcaagagttctatacctagggaagattcgttccctaacatgagactttaaaaaagggctgattacctggactcaaatttattttcatttgtaggttttttttaactactataatacagaccccaatagaatattaactttggtatattgtgaattgaactttcacattttcattacaagacagaatacctgaaacatatttgataggagtctgggggtgaagagttaagaaaatgaaagatatatttgaaccaaattgccatttttataggccttttggttgccttttggcaatttcatatgtttcatcctaaaatgaccacttagggctcagtgtt

SEQ ID NO: 154214 - DNA, 575 bp, Homo sapiens
caaccaaactgtttttattttgaccatatcttttaaactcagaatgcagttagattctaaaaggaaaagggatagacttattcttaaatctatggtattaaaatcttaaagcctttacttgctgcatttctacccctcagttttgttaactattttcttttgtactcagtagatgaacatttaacttgatcaatagtattttatgtagaacttgagaaatttactcaaatggaagcaaagtttaaggtagtgaattgaaaagagaccagtgtggactctggagcctgactgcccatgtttaaatctcttgatgtgtaatcttggacaaatttgtctaacatttttgtgcaaagtgaaggtaacaataatagtacttacctgataaaattattaagaaaattaaataagtatatgtgtaaagcacttagaatagttcctcatatacaactcagtaaataatagctgttacctcatcatcatcactattatcattatccagaacattccctggataggatttatttggttttgcaatatatttctgtaacattaggaaagtgtttatcaaaaaagaa

SEQ ID NO: 154215 - DNA, 248 bp, Homo sapiens
aggggctcagagtctttccagtctccactggggagggaagaaatgggaaatgagataattgggtccaaatcacagtcccagcaaaaactcactgcaggttatcaaatttgaactcaaagaccgagacctgccaatatagggacagagaatgttgaggtcacttagcctaaccttccacacaaagccctgatcgtgtctgcagtaatccagatggatatttctctagctgctgtttgcacatttccaac

SEQ ID NO: 154216 - DNA, 671 bp, Homo sapiens
atagaaattaaggtcaggaccttaaagggaatcttgcccattgatattagtcctgccctaaaaaaagtcggacatggtatgtttactactaatcattttttttccataacgttaatggtattttgtattttcccatgggcacctacattacacttatagactattttgatatttcaacctattattttctttgaatccttttaaggagttgttaaacaatgctgaaatttgccttacagtatgctgttaactaatcatatttctcaaagtcatttgacataatgtttggttaaaggaaatatgtctagcatagttatacccgttcataacaaaagagtatttaaatctttaagaaaaaatattagaaaagctaataatatgaataaataaatatatgaagtatataattcattattaatatatgtgcatgaaatcatggtcatagaatttaaaagtaataatttttgaattaaggatacattctgaactataatagaaaaaggcttcaaaaatgttaggtttataatgtttcatatagatacgaaagtgtaaaaattagtctgatgttacttattttggaaagcatatgaagcaatgggaattttcatacattgctcctagaattgtaaatcagagcaattactttgtctgactatggcattatctgatta

SEQ ID NO: 154217 - DNA, 661 bp, Homo sapiens
ggcactttttaaaaatgtttatatgaggaaacaaagaagacttgctgtgatccagcgacatgcccagtgagtggaagagaagaaactggaattaagctattctgtgtgccacttaggtcaggccctccactacatggtcctgcttctcttgcatgagttagctactcatatcatgagagcatccctttcttaattttctgcgctagtggagcagagccatgtatgtgctatggcccatatgttgaaacttgtttatctacagctagccagatggtctgtaacagcacacaaagaagccatttggaaactttcagagggtcagcacgttttgaaaacaactcagagtaatgcatattgtgatgtcattgcttactttaagcttacagtgaggaatatcttgttaggtactgaatgtgaaacatgcagactttgagaaccaactcagaggtcctagcccccagagacagaaatttatttaattggatcaccctttagacttgttttgtctacatgttctctgaaaaaggaatataatgtcttaatttaaaatactttgttttttaagttgctgctgggttaaatacatttttttttaaagaaaacctgcttatgcagtacatgttaacagatatgatgtggtcatcaataaaaatgtaaaata

SEQ ID NO: 154218 - DNA, 651 bp, Homo sapiens
gtatgcattatactatatatatacataatattaggatcagctgttaaagttttcaaacatctgaatagttaataaaagacctggctaacatatgaagtgttggacttcactagtaatccaagaaacatgaattaaaacaagatgatttatcacctgtctaactaacaaagatctctaacttttaagtacccaacatggctaaatgaaaaggttaaggaacaggaatgggaaactggtaaacttttccctagagcgatttggatctagcaaacattttaaaagtgcattctttataccagcaactccaaggaaattgatttatgtttgtgtgtatgtatgtatttttgtggattttcatcacattatttgtaacagaaaagtccaaaatattgtgtccagcaatgagaaattgtgaaagtatggttcctctataaagcaataatttacaaccattaaaaagagggtgggctgggcgcagtggctcatgtctttaatcccagcattttgggaagccaaggtaggaggattgcttgaggtcaggagttcaagaccagcccggacaacacagggagactccatctctacaaaaaatttaaaaaattagccaggcatggtggtgcatacttgtagtcccagctacttggaaggctg

SEQ ID NO: 154219 - DNA, 459 bp, Homo sapiens
ttatcagttcaaaaaacttaaaaacccaatagaggcaaaagaggatgccagtttgcaatccctgaagtagagagagctcgtgctggggagaagtctgccaagacgctttgaggtgggatgtttaaaagttctgtttcccagagcttggctgggctgggggaggatccctgcagctgaggaggaggaaaagccactaagtcccctcccagagcgggacaaaccagagaccctttgcagttgctgggtcaccagcaggggtggtgtggaatacaaacagtacagctctccgcctgccagggagaggaatggtgtcttcaaagcaaacaatgaggaagtgagggtggagccagggatgcttttgctaatgaaagtgcccctcaggaaaggtgccacaggctgttagctcttcaaaccagcagctcttggcccagtgccagacccagcagggcccgaccaaag

SEQ ID NO: 154220 - DNA, 328 bp, Homo sapiens
aaaaaaaacaaacaaacatgctggatggtgagcaaaccaatctgtgaaggaaatgaaaatggaaatggaggcaatcgccccatgtgagctgtcagagtgcagctggaggagcaggaaacagcgtattcgttaggagatctgggaatctggggccacgcctaagtctgcccatctgcaaagaccccttgtccagaaggtgtggaccacggagattgtgatgttaatttcactgaactggtgccacagggtgcctgatgcaacaccgttcctgggcgtgtctgtgagggtgctcgagatgacattaggattaggacagtgggttcaggaa

SEQ ID NO: 154221 - DNA, 192 bp, Homo sapiens
gggtgacagagatttcatcccccccaaaaacacacacaaaaaaacaaaaaaaacaaaactcaaataacagcacccccgtggccccaggctcctttccatctcaattggagccctgtcttcctgtgggggatgtactgtgatttatccagggctgcagtgcaggtggtcagtggttcgcatggacggtgagag

SEQ ID NO: 154222 - DNA, 229 bp, Homo sapiens
cttgggaggctgaagcaggaaaatcacgtgaactgggaggtggaagttgcagtgagccaagatcacgccactgcactccagcctgggtgacagtgaagctctgtcctgtcacaaaacaaaacattgaccacagacctctgaggtggtggatgtccctcctgtcctggttgtatcattatacattgtatattaatgtatcgaaatactacaggtacccccaacatgtgta

SEQ ID NO: 154223 - DNA, 293 bp, Homo sapiens
ggaacagcacactgccgagctgggagggattttagaagtcatgcaaggcagtttaccctcagccctgctcccatgagcccaaggacagggagtccctacctccccagcagccattccatatctaagtggctcttccagggagaaggttctggagctggtatggcatcagagttgtaaggagtcttagtactcgtcttatgcttcttgatagaggggaccttgaggctcagaagggacacctgccttcctgaagtcacacggggagtcatcctgagtgccacagcaggctctta

SEQ ID NO: 154224 - DNA, 402 bp, Homo sapiens
tgtgcactgtgatgggttttagggattcagtagtgaacgttgtcttcaataagtttacaatttaatggattaaatttctcttaagagaaaagatcactaagaaagtggaataattatcctaaagccattttatgttccaaaaaagcctgctttttggtacatttgagatacacttaaacagctctacttctctagtattgcacgttagaaatcattccagaaaatgtagtcagtggccttggtctgtgggtaaggcttgtcctgtaaaggccactagcaaagaaaatgctttctcccttgctttcctgagccatctaggccttcattatatctacctccccaatttgccctagctccctgatggtggggatgcctgttcaacacccaccccttccaagcata

SEQ ID NO: 154225 - DNA, 153 bp, Homo sapiens
tacttttttacttatcctttttctcctttcttaatatttctgtcactagagctgcccagtacttccccagtcctctgagagcaacatgttttattccccactgaaaccagtgtttcctcaagttatccttaactttgcttccaaagatatttt

SEQ ID NO: 154226 - DNA, 509 bp, Homo sapiens
gcctttgtcgaggtcttaggtgctaaaattcagccaactgtttctcagattctgcttttagcatgtgacgacggggagggggaagaggggtaaaaccaccaaggaagaacaaaacacactcatcaaattgttccagaatctttcttagaagctgagagggattggagcttcacagattattcaagggtaaaagggcaaggtttagaatgcttcccaaatttagaagtcttactccagaccgttccagatgaacggctttctaggttttaccagtctccaagaaaggcgattctctcatctgccctggcaatgaactctcactgtttgatagctttgtgtgaaagttccttcttatatctaacttaaatcccaggagcttatttaaactcatttcctcctcgactgctagtggatattcaaaggagttggccttgatctttgaagcaatccttcatactaaataatatgaaggacttttctgtaattgttagaagaaaaagaaaggaata

SEQ ID NO: 154227 - DNA, 240 bp, Homo sapiens
agatgtatagcagggttacttggggccccctccattgcaacgtttttattttccctgcatgattattgctgcccccgggaactcttcttgaggtcctccaaagaaatcccacagaagtgaaccccaccaggatgtgatgcatttcccatccgcaggagctggctgagagcacgcacttgctgcagccaccagggggagctacaggtttctctttggagccccagaactcagtggcctgag

SEQ ID NO: 154228 - DNA, 298 bp, Homo sapiens
tcaagatcacaccactgcactccagcgtgggtgagacagcaagactccatctcaaaaaaaaaaaaaaaaaaagcacacacacaaagaggagccaggtgaggttcccaacctcaagaaatccttggtgctatgactctcacagtggtgtgaccctcacagtggattctcagtaaacagatactggtcccacagttgaatgtggggatcactgaggaaccaaaatcgaagtcatcagccaatgagaaggctttgaatgcgtctcacagtgagactcaagaccttctgtaacctacctggg

SEQ ID NO: 154229 - DNA, 408 bp, Homo sapiens
gataggccagaatgactctggaagtataactcggaccctgatagagtgtaaacctggaaatctgcactcacaatgtgcctaagctcatagttctcaaacttcagcacacattagaaccatctggagagcttgttaagacatagattgttggttctcactcccagagtttctgattgaggggtctgagggaagacccaagaatctgcatttcaaacaagttcccaaggaatgccgatgctgccggttctgagaccacactttgagaaccactgacgtaaccaaagtctttttttttgagacactgtctcagtccgacacccaggctggtgtgcagtggcacaatcatggctcactgccacgctgacctcctggactcaagcaatcctctcacctcagcctttcaagcag

SEQ ID NO: 154230 - DNA, 296 bp, Homo sapiens
acttcttggagctaggggctagggtctaggggcttcttgaaggtgttgatgtctctggtaacttacactgcagggcaggtctctggagggaactttgaacaggttaagcctcaaatgcaggcagagatttccaattgggaaagttaggtgaacgtggctttatcatctcttttattggtttatgggtattttctctttttcctgttttctttcccaccatttaacattatctgttctctgcctttttaaccttctggctttaaatgaacagttgcttaatctatagattaacagga

SEQ ID NO: 154231 - DNA, 443 bp, Homo sapiens
ctgcaggctctatgccgttcgcacccaggagtacagtcgtctttgcccccctctcccgggatggaggctgtagattgtgtcagcggcaggcaccccctccctacggggcagctcatggcccagggtgccttcccacctgtagaggactttcctacagaggaatcctgatgatcacgcagggctgggctcccaccccctatcaggaaccggagaccaaggaggacctaggcagagagctgggaagccccacgggggatgtgagggagaggaggagggaggggctttcatcacttcccctgtgctcagagcccccagaaccggggatccagagctcggggcgccttctccaaacttccccagtcctgatgggagtccccaaaccatcttcttggggctagatggcctccccaagtctagggggttcaggctatgagacacggggc

SEQ ID NO: 154232 - DNA, 222 bp, Homo sapiens
cagccggagctcctgtctgctgggcgactgtatgccggtctagaaaggccagaagagttactgcacttgaggggcaagggatctgggataaatataacaacttccatgagtccttcattgagggctgcccacagcatttattaactccttggcacatcttgctgtaggcacaaccacatggattccagaagccagagagtgaccttgggcaaaaaataagtt

SEQ ID NO: 154233 - DNA, 558 bp, Homo sapiens
tgggctcaagtgatcctctccactcagcctcatgagtagctgggactacaggcatactccaccgcacctgggtttttgtttgtgtttgtacagacagggtctcactatgttgtgttccctggctggtcttgaactcttggcctcaagcgatccttctgtggcctcccaaagtgttgggattacaggcgtgagccaccatgtccagcctgtgtgtgtgtactaatagctacctagataaaaatacttaacagcaattacctctagattacctcagcaccattgacaatcagcccgaagactttgtggtggggctgtcctgtgtgttgtagggtgttagcagtatccctgggtgcagtagtgtaacaatcaaaaatgtgtttggtagcacaaaagtacaactatagttaacaacaatttattgtatattttagagtaactaacatagtgaaattagaatgttcctaacacacaaaaaagatacatacctgagggtatgaatatctgtcaccctgatttgattattatttattatatgtttatatcaaaatatcacatgta

SEQ ID NO: 154234 - DNA, 391 bp, Homo sapiens
cactgattctgggccaggccagacacccagctggacccaggagatactgaggtgagtaaagccaaaatgcctccattcagcaggaggcgggcagtcacaccaaagtgataaaggcacaaaatgcagaggcagcagaggagcaatgactaccttgttccaggactctgtgacctcagggagagctttcagaggaggacatctgtgcaaggcttggaaggatgaacacaaatttgcctagcagaaaagggagccaagcaaatcctgatggagaacagcttgggtgagagtgtgagccacaggattgaggggctcaggcatgtaactggaggagcagaaagaatgaggggagataaagttgggaggtcagcagaggtcagtcacagaaggtttt

SEQ ID NO: 154235 - DNA, 477 bp, Homo sapiens
atccattttgtgctgttataatagaatgccacaaactagatcatttgtaaacagaagaaattatttagcttgcagttctggaggctgggaagtcaaagattgtgagccttcatctggtgagggccttcttgctgcatcacaacatggtggaaggcatcccagggctagagagcatgctcaagagcaaaaggggaacaaattcacttctataaccaaaccactccctcaataactaacacactcctttgataacaacattaatccattcatgagggtagagttcccattacctaatcacctcttaaaagtcctaccttttaacatagtactgttgtattggggattaagtttccaatatatggccgggcatggtggctcacgtctataatcccagcactttgtggggccggggtggctcacatctataatcccagcacgccaaggcaggtggatcactcctgaggttgggagttccag

SEQ ID NO: 154236 - DNA, 694 bp, Homo sapiens
catttcttccccacccccttaagatggggcctcaatttaattttaccatatagattcatgttgggcttctgcttgagtcatttgtgtattttaccttattttaaaaatatttccatagttttgcagaaaatgctgctctttttgaaatttataaaccttaaacttagtgaaaattttgtgatattaggtatttatattgcatattttgaagtttatttgtaggtgtaagtttctagatgaaaatctagtcagttcatgaaatctaaatttttaatcaaagtctccactgccgatttgatttatttttagcaaatttcaaataggagttttctgggaaattgaagtttcagaaagagaaatgtttcctgattgaaaatttcatgctctggaaagttgaaattttggaaagagaaatattttctgattgaagatttcatgctcttaactaggttcagatgatatggggattattttttctgcaccattgaatagtaataatgaaatgatttatttgattatttccattaacctcaaattgtcaatagtttttttttttttctgtcccatctcttcatagaatcctttaaaaatattaggtgaataattacataaaaatgaaatgatgtcagtagaatgttatctctgaatggaatacatctttccagtgaaacacaatttgtgagattaaaagtac

SEQ ID NO: 154237 - DNA, 160 bp, Homo sapiens
aagattttgaaagtgtagagtttgggcttaaatcaaaggtactggggagccagagaagatgtttgggtagggagaggcctgattagccctcaaaatgtggtcttcagacctacagatagcctgagacctgctgaatctgaatgtgtattttaataagatg

SEQ ID NO: 154238 - DNA, 210 bp, Homo sapiens
gcatacctggaccttctgaggtccaggtgctgtcccctgcttattctgcctcccacctgccccttctcacctgaggctcttctgccctggtgagaaggtccaggtatgccggcatactggagaaaggcttgggtagctatgctactattaaacaaaataggctctaaaattggaagctttattagtaataaagagcatcacttcatattg

SEQ ID NO: 154239 - DNA, 267 bp, Homo sapiens
gcccctactcaagatggagttgctctggtttacctgcctctgaaacctataacatttgagaactttgtcttttatttcaataatatcagcaaataatatgttagactatctattatgtaggaaattttgtgatatagtaatatatttatgcttttaaagtgatttaatcataaaagtacaattttacatcagattatgcaacttagatataaatatcaatccaaagtcaacaaagatcaattgtaattgcttgagtaacaattttta

SEQ ID NO: 154240 - DNA, 856 bp, Homo sapiens
cccggttctggtgggctccaccctcacgttgttctgaggggacttaaggctgggaggccctcatgggtcaggaggagctgctggcaaaacctgatagttgctaagctgatctgaacttagcttgcaaggagcagcagcccagaggccttcccagcaacagcatcgaagctgtcgccagggccgcctaggggatgtaggatgggccacagccatgtgccttctgagttttctcctgcaaactgtgcctttgcctctctttagtaaaaaatggaaacaactgcatctctctaccttctaaccccacggaacctccaagggctaggggcgccaaactgagcaaataaaaatagagaacgtctagttaaacttcaatttcatataaacagtgaacaattttttaatataagtatgccctgagcagtgtttggcacacactgaaattcagagttcactgattcttctgtatttatctggtaatcctccaggggtgagttctgagtggggtgaagtggaattcagacccaggcttgagctctaggttaccctttgctccccgaggttacagatgacaagaatgtggccttaaatgtaatgtgttatttgaaattaaagtatacgcacacacaccctacacacacatgcctgtacacacataccctacgcacacatgcctgtacacacgcaccctacgcacacatgcctgtacacacgcaccctacgcacacatgcctatacacacacacccgacagatacatatacacacaccctacacacacatgcctgtatacacacaccctacgcacacatgccttgtatacacacaccctacgcacacatgcctctatacacacaccc

SEQ ID NO: 154241 - DNA, 808 bp, Homo sapiens
ccagaattctccaatacttaacttccctgtgtacatgaccccctgggtttcagagggcacagggtcaaaggtcttgtccctcccttaatccttgcagctcactccgccctttctgctctcatctgtttccctgtcctagcttgaacaaggctgacctcttcagaaatatttcctaagccccactgtgccttgctctattgcacttcagacccccttacctccaatccttgtgtcctggcttcacaaacctcttgagtggaggaaaacattacctacttgagagtttctggctcaagtgacactgtaagttcatactatctaaccttccttggcccttacttcatcccagtccttttaagttcttaagttttcagtctgcagcaagttccactgcacctaacacatcccactattttggagctcttgcgctccctctggggatgaactagcactgagactgtactgtacgccactggggccttcaaatgccctcttcaagtattagaaacatatgggctaggcatggtggctcatgcctgtaatcctagcactttgggatgctgaggtgggaggatcatttgagctcgggaattcaagattagccagggcagcatagtgagatgccatctctaccaaaaatacaaaaatacaccatgggcatggtggcacatgcctgtagtcccagctactcaggaggccaagaggatcgcttgagcctgggaggcagaggtttcagtaagctgagatcataccactgcactccaacctagggaccctgtctcaaaaaggcagtccaaagctcaggtca

SEQ ID NO: 154242 - DNA, 231 bp, Homo sapiens
catgcgagtttgacgggacacagctcaatccacagcacccatccaggcagagtcctgcccggtcatgttccccatccccaccaagctgcagtcctggccaggctggagccctcagccccaggaaaggagaccctcgatttcccaggctcccagggccagccaggggcttcttttgtaagtgtttcctggaaggcttttcagtgttctcctctccccatctggactagccaa

SEQ ID NO: 154243 - DNA, 1224 bp, Homo sapiens
cgctgtcgtctcaccccgttatctgccctcgctctgaggtgccttcccggaaggaacgtcccacaacattcccataagtctcattggcccagtctcgatcacgcgggcagctgtgaggagtaaagtcgtcctcgctgggcacattgcttccctgaatagaaatgaggttccgttactaaggaaggaaagggatataaatgctggtgagtcatcagcgcagattgggggatgctgaggtaagtttattcatgttgaggtggaagtttctgtgaggacattttgggaacactgttcagcctgcagtctggggtccctcagaaatggactgattagaggtctgggactgggtagataaaagaggaacctggagcattttgttatgctggaaaatgagaacgtgccagggaaatgattgagcaccatcaaagtcaagcaacctccaccaaccttgtctgggattgtttcacaccaacataattaagcatggtaatgagttataagccattgagagaccagagaggccaggaatccaggggtcagtactgacagcaatagatagataatttcattgcagaagagaaggtgcttgcttcaataagatgcataagccatcagtcagtgtggagggactagggcaagaaagtcagcatttcccagccttcgtgggacagatgggaccggcagatgctatgcggggcagggtggagcagggatgcaggggttctggagaggagagtttgcaagtcaataactacagtggagaagtcagacctccctttggccaggtaacctgagtgaacaccccacccactgagggctgtggatgttgtgtgcctgcaggtggaacacatgtgtgtccagctgggtgtgcacacatgagttaatcaggagatgtcaggggaggaaaaaggctgtggaaatgtcctagattaaagaggacaggacccccaagatgcaggaaggactctggactggaccctgttccgtaaatcatcataagttatttccttgtccttaggaaataactcaggacaaagggccaagatgaatgcaacctattcttaaatgattcagagaaaatactatgttattatatattatacatacagcatacatatagagtgagagagctgtgtacagacacacagctgctaaacacttgtatgggtgtctttgtacttattctagtaactttaagcttaaaattctttacaaataaaatgt

SEQ ID NO: 154244 - DNA, 694 bp, Homo sapiens
cgctgtcgtctcaccccgttatctgccctcgctctgaggtgccttcccggaaggaacgtcccacaacattcccataagtctcattggcccagtctcgatcacgcgggcagctgtgaggagtaaagtcgtcctcgctgggcacattgcttccctgaatagaaatgaggttccgttactaaggaaggaaagggatataaatgctggtgagtcatcagcgcagattgggggatgctgaggtaagtttattcatgttgaggtggaagtttctgtgaggacattttgggaacactgttcagcctgcagtctggggtccctcagaaatggactgattagaggtctgggactgggtagataaaagaggaacctggagcattttgttatgctggaaaatgagaacgtgccagggaaatgattgagcaccatcaaagtcaagcaacctccaccaaccttgtctgggattgtttcacaccaacataattaagcatggtaatgagttataagccattgagagaccagagaggccaggaatccaggggtcagtactgacagcaatagatagataatttcattgcagaagagaaggtgcttgcttcaataagatgcataagccatcagtcagtgtggagaggttatgtccaagtcacatacgcttgtaaaacagccgtccagtgacaatcagcacggtgcaagtcaa

SEQ ID NO: 154245 - DNA, 533 bp, Homo sapiens
atctcagcactttgggaggctgaggggggtggatcacttgaggtcaggagttcaagaccagcctggccaacatggtgaaaccgtgtctctactaaaaatacaaaaaattggccaggtatggtggagcgcacctgtagtctcagctactcggaaggcttaggaagatcacttgaaccgaggaagtggagactgcagtaaaccgagatcacaccactgtactccagcctgggcaacagagcaagactctgtcttggggggaagaaaaagaggttatatggctggttacaagagacacatcaaatataaaaacataagaaagttgaatctaaaaggatggataagaccaggtgtggtgactcacacccataatcccagcactttgggaggcctaggtgggaggattgcttgagcccagaagttcaagaccagcctgggcaacatggcaaaacgctgtctctacaaaaaatacaaaatttattcaggcgtgttggtgcatgcctgtattcccagctacttgggaggctgagatggga

SEQ ID NO: 154246 - DNA, 301 bp, Homo sapiens
agggtaaaactctgtccagagaaaaggctctcttccagctttcctgacttaatgcaatgtactccacgggtaaaatcctccaatagctcagagctgggtgtgcccccgcctctgtctgtgcccctgcctctgtctgtgtccccttctgccctgtgggccagtgcagatggccctctgaggggaggagagtgaggctgtttcaacagtatctcttgggctccaagacccagacaaccagatgaagaacaaaaccaagcaaccaagcacaagtgaaggtctgcacgccctgccctaggcaccc

SEQ ID NO: 154247 - DNA, 367 bp, Homo sapiens
ctcaatcacatcgtccttaatctctgtatcccatccaacttcttctgtttgagggttaaacatgttagagagttggaaacactgtgttgcaagtggctgaacagaagcagctgcagctaaagctgaagcttcagtctgctgggaaagtcttgtttgcaaatctgtcacagcgccgaatgccgaagagccactcattggtagagcttgctgctgtttctggcggaatctgcgaagctgtaccagtatagaaagaatcatgtctcctggtccctactatgttaagagcacgcataaacgatatagcctgggtcattgatatcatgagtcactttcactaaaattaatcgctatggagggccgagtatgg

SEQ ID NO: 154248 - DNA, 297 bp, Homo sapiens
taaagtcacagggccaaaagggaaaagaggagcctgacagcttcctcaccctgattcttctctgtccctccaagcacctcaagctgggacctcagtcctctgtccttgacactcactccactcacctgaaggggaagaataaaataaaattgataataagcattagttgtacctcatgggcctggcaccttcctttatacattagtggaaataaagcaccttcctcaaggcaatagccaccctggggtacccatttgatacattaaatgaaatccaaataaagtctttccatgagtc

SEQ ID NO: 154249 - DNA, 476 bp, Homo sapiens
gccttctatgtcacttgtcccgaaagaaaagaaaagaacaagacttcctgattgataactgatctgggccaggaatgcagcagcacttgatgtctgagggaagcggtttttcattgaagaggggaggaagacgaacgtgccccaaagcaaggtggggactttgactacaaactcagtggggctccgctttctgcctgtcgctggctcgttttatcgggcactgcgattgaagcaggagattagatttgggacctttaactcaacctaatcccaaatgcacctttattttatgtctcactgaggaagaactaacattgcaatggaaaactatggcatcctgctttctttagaattttattttcaacttatttgaatgggctttatatttaattaggtaaaaatttttataatatagtacttgggtgaatataaaaagaaaaatataagcaaaataaaattggttaatatattctaaa

SEQ ID NO: 154250 - DNA, 368 bp, Homo sapiens
accagtcctgcaagacatgtgttcttttcctgttgcagttcttttcatgggctcagagttgttagttgtgtcacagttgggtctggctgcagaccataggcaccttctacctcatggtgcacattggggttcttgtcttgtgccacacagcctctcattcttctgtggctggttcagacatctaaacgtgttgcttttcttcactgtgttgagcagcccagccccagaaggaatgctttcttgttctgttcaagttgcttgtgtatcagctgttccccactcccaccctttccagcagccaaaagtttccctaggctttcttgtctcagcaactttcccatcttgtctctcttggatgatgtttgccg

SEQ ID NO: 154251 - DNA, 238 bp, Homo sapiens
ccccaacatgaactctgtacccattaaacagtaactttctcttcttccttttcttacttcctcgtaagttcttgttttttgttgtttttgtctctgaatttgagaaggctgaaattttgtcgctttatagtttgcaactatatttctagtgctaggaattgtgcctaacactcactctaacaaatatttgttaaattgactgaatgcatggtagataagcttgagggaatcacacaag

SEQ ID NO: 154252 - DNA, 871 bp, Homo sapiens
tgtgagatgtgccttttaccttctgtcatgatcatgaggcctcccaagccacgtggaactgtaagtccattaaatctctctctctctctctctctctctttttttctgtaaattgcccagtctcaggtatgtctttatcagcagtgcgatatgtctttatcggcagtgcgaaaatggaataatacagtaaattggtaccagtagagtggagtgctgctgaaaagatactgggaaaggtggaaacgactttggaactgggtaacaggcagaggttggaacagtttggagggctcagaagaagacaggaaattgtgggaaagtttggaactccctagagacttgttgaatagctttgaccaaaatcctgaaaatatggacaatgaaatccagtctgaggtggtctcagagggagatgagaaattttttgggaactggagcaaaggcgactcttgttatggtttagcaagagttttgccactgccctggagatttgtggaacattgagagagattatttagggtatctggcggaagaaatttctaagcagcaaagcatttaagaggtgacttgggcgctgttaaaatcattcagttttaaaaaggaagcagagcataaaagttcagaaaatttgcagcctgagaatgcgatagaaaataaaatcccattttctgaggagaaatccaagccggccgcagaactttgcatcagtaacaaggagcctaatgttattccccaagacaactgggaaaatgtctccagggcatgtcagaggtcttcatggcagcccctcccataacaagcctagaggtctaggaggaaaaagcagttttgcgagctgagccaagggtccctgtgctgtgtgcagcctagg

SEQ ID NO: 154253 - DNA, 264 bp, Homo sapiens
aaggcaagtatggtggccttcaaactttcttggccaggcaacatctttgtagaagaccactcttagagtactctagtattctggagaatacagtttgtcaggggcagttgtcttaaccttctataaatgtgtacttgaatcattgtaatgcaatgttgggcacattaggaaatacacagtacatttttgcctttaaggaattttaaatggagattgttccaaatgatacttattcacaattccatttagtaattagatcactct

SEQ ID NO: 154254 - DNA, 324 bp, Homo sapiens
agtcaaattgtattacacgacttataataaaaacagaagcccttgccgtaccacttctcagccacatgctgttctccagacaacccttttatcacttcctgcacttaactctggtatttgtctgtctttctgactgataggtttatatgggttattcttcgcataccacggttagacactgtgtatacatgtcctcttatgaacgacagggattgccctcacacaccctaatgttcttctcatcatcatcagtatagctgtgtcacaagtataatttttattagtttgattgtctttacattattttgactctgtaaatattgt

SEQ ID NO: 154255 - DNA, 708 bp, Homo sapiens
tcacaacaacaacattactgcatctaggaatgtgggtgggccaagacactgtgaagggtttatgtgaattatgtcatttaatcttcagaaaaaaaccactgtaagttctgccagcccattttatagatgaggaaactgtgacttagagcagtgaaataacttgtctatggtcatacagctgagaagtggcagaggcaagttgcttgtaaagtagagccaagccttagagatggatgggtgaagatagatatagatgtatgtgtatataggtatgtgtatatctgtacacatatgcatacatatttgatgtgcttgagagatagatgctaaggactaatgcattttgaaatttttctggagccaggaatatagtaatacttagtggcaaataatgagcctttttccattaataataagaatataatttctttggaaggaaatactatctaattatagtttccctcagtatatctgggggattggttagcagacccctgtgtataccaaaatttgcgcatattcaaatcccaaaatcggccctgtggaacgtgcttccttgtggaacctatttatacagtatgtgggtttcacatcccacaaatactgtgctttcaatctatgtataagtgtgcccatgccattcaaacccatgttgttcaagggtcaactttactttaaggctagataattcttctgtctaagaactta

SEQ ID NO: 154256 - DNA, 257 bp, Homo sapiens
caagatggtgccactgcactccagcctgggcgacagagcaagacaccatctcaaaaaaataataaaaaacctaaattatcaacctttgaataattcatacttaacgaaaatatttctaatttttatgtaataagaatacttttacttgtagttaagctatcaaaactgtttaaaattttttccatcaccacataaacagccaactgtagaactacaacaatttttcgtaaaagtaggacaacttttttcttaaaaat

SEQ ID NO: 154257 - DNA, 210 bp, Homo sapiens
ctccaaaataaaactctatacccattacgcagtttcttcctagaatatgggtaaatcttaattactgatattttcagatcaatttacatcaaattaagtacaagtctgtcttcttaaagtaacacattctcttgtaaaagtattgcctttaaacagagacatctgtgaatccaaagaaaatgtaaatcctcccaaaacaatcagttttcc

SEQ ID NO: 154258 - DNA, 662 bp, Homo sapiens
tataatcttagatcgttaagctattagaccgatacatgtcgaggatgatgtggatagtggtttagtatatcaggttatcttttaacatttattaatctttttagatttcaaagtgacttgtttttttcttcatatccttgtccttctcaaaactgcagcgttttagacatgtgtttctcaaggttatcagctactcttcccaaggagaagctttcatagattagctcctctggttccggtgctgctcaggacatgaccctatggagttactcagtttcagagcaggctggttggtgatactttccttagccattcctgacagggaccttgacagtgggactcagaacactcttatgtactcgattttgagttgctaataatgggcgaggaatttcttaattctattggtgaggttcctgggcttttctagtaggagggaaaaatgcatttttccaaagatagttctagagaagttcaaaaaacagttgtgcaatggacagaattattgtaatcatcagagggttttccaaagtatctattctgcaggattatactcatctggttctcaagttctcagttgctctgtctcaatcataccttactttcatttaataattatttattaaacaactgcaactacatcctaggcactttgctaggtg

SEQ ID NO: 154259 - DNA, 451 bp, Homo sapiens
cagggttcaagtcttttctgtgtgacctcagtgagtcttttaacttgtcttggctctgttttttctctctaagatggggataatgatggcacctacttcacagagttattctgagctttgaataaattagtgtttataaaatgtttagaacagcacataagtgaattcaaatctttgctaaatatttaggaatgctgttcaacgttgcctttcctgacaacttctcttgtctctcttttctctccataaaatggaaataatgatggcacctgcttcatagttctttagaactttgaacaaattaatgtttataaaatgtgtagaacggcacataagtgaattcaaatatttgttagatatttaggaatgctgttcaacagtgccttcactgacaacttctattgtctctgtttcctctctctaaaatggggataatgatgacacccactgc

SEQ ID NO: 154260 - DNA, 458 bp, Homo sapiens
tattttctctttttttgaattctaatgggccatattgttcgctagtattgcctccaagcttagcatgatacctggcacatatgtgctctgttgatatttgtcaaatcaatgaaaagcttaagtggtgggatcctaattttggggaggagagctgagaaaatgtcctgccatgaacttgctcaggaatctaatcagtcagtcaatgtctgagatgtagccaatagtgatcttcctcctctgcactcttctaggggctgtaggtacctctaagtctctgaccatgaactgctaagtaccataacgtcttactgaactgtatttgccctaccagacttgtgaaccttttgaaggtagtaaccctttcccgtgttttatgcaccatcagtcataaattttttttgctatgaaccatcagtcatatttttttttgctatgagtcttgcacatagcagaaaaat

SEQ ID NO: 154261 - DNA, 448 bp, Homo sapiens
ccacactgtgatagactgaatggaaagggtctggtttacaaaggagagctttgtcttgaattaactcagtgagaggaaggccacagggatggtctgtcccctgcagtgcaggggcctgaggttccgggagggaaagtgatgagatcaggtaactagggaatagcagagtgcggctggagcctccgtgcagaggtctcctttacaccacatccagacacttgtagggagctccttaatctctgtggatgtccagctgttctcttgagacatgggcctctatgtccacaccctatgactctgctgtcagaagagtgtgttgctggcctcagtgtgggcactggcaggtggaggaggggacaccaccacggggaggccagcatctgccccctcgaacagcagcctaccctccctgtgcgcctccttggctgaggtccccctgctgctttgc

SEQ ID NO: 154262 - DNA, 650 bp, Homo sapiens
tgggttttgaagtactgcgtgtcgtcttcagagttgttttcctggaggcgctgataccggacttggtggagaaggatggtatgaatgtgtttctaggtggctgcctggacaagggagttcagcctttgggagataaagcagaatataaagggtcacactctgtcacccagactggagtgcagtggcgcaatctcagctcgctgtagactcaacctcctgggctcaagcgattctcccacctcagccttctgactttgcctcgggagagaaaaagagagtcgattccgagtacagctgggccactgggactgcattcctgcctgtgaggaggacagcctgtcaatgagccagaaggggctaacagaggttgtacttacaggttctcaagttttgctatcataaacacccaaagtacaccacgccggcaagctgaaggctgacaggatagaaaacttgcacaagacagttaacattgtagcgatcatcttgccaaacagagggcagcaatgcttgtgtcttggtcggaaaggagttggagtgaagtcacacaggcaaccttcagttgcagggtcaagaagagccacattcaaacctgactatatgaaataattatcacccagagatattggacttggaatagaatagagaaa

SEQ ID NO: 154263 - DNA, 460 bp, Homo sapiens
tctctctaccccctatctccaacagaacttttaggtaggccaatgcttagacaaatctgtaacagtaatacataaacacaaaggggagatgtagggagccgatggcctgagagacatgaccaactcagcgttccactggaggctatatgaccaaacagcaaactgtttatcatgaatgcaggatgtgggcaaactcatgactgcgcctaccgccagaaggtttgctggaggcaatcattccctggcactgtgctcactgagattatctactgggacatctagagcctattgttcaaagaatgcagtcttgcaagcctgctgtaaatcaagccgctgaccgacaatcacccccacccttctccctcttttacccaataaaatgtgaagggctctaaagctcagggcccttgtccattagaagcaaggagccccctgaccctttcttccaaatatactctat

SEQ ID NO: 154264 - DNA, 350 bp, Homo sapiens
gagatgacacagatgttagagttatctgacaagtatttaaaggaatcaccataaatatgtttcagtgagcaactgtaaacatacaaacaagcaaaaaaatagtctcagaaagacatagacaatataagaaatagtcactgaaaatacatcttacatggaataataggggcgatgatgctcttatggtacggtgaatgcataaagagtaatcaccgaaatcggtacctcttcgtcaaagagccctggaagttatgcagactgcaaggcagtacgccattagtgtgatacaaggtgggctacgtcgcttaccgaggctcgaactctgaacatctaggtcctagcagttgcct

SEQ ID NO: 154265 - DNA, 340 bp, Homo sapiens
ggcaggtgcagtggacggagcttggtggttgtgactgagggacaaagtggtgtgaaagacaacaagggtcaggccacacctgccagcaaccactgctttgtgtgcatggtaggtcacaggcagtaacttggaagtgaattcatcagtgacatgcaagtattaactttatttacaagatttatagaagggatgaacaaacttaaaatgtttgcccctacactgattataaaagagtactaaaatcaattatgaaaatgtgggtttaaattcctatttgttctgcatcagtgaagatgcttcttgagtgtctgagaaaaatcttggtatgaggagtaaacat

SEQ ID NO: 154266 - DNA, 482 bp, Homo sapiens
tggttagaggaaaaaaatgcttttctgagtttatgcaaaatgatcatgttttattcatttggtagaagtcactctaatggcatgcagggtagatgatgtcagcttttccatctcagctgaatcaaattgtacggagcccttaatctctgctaggggctggggcaatccagtggaaaaggatggtctcaatctcagtgcagtaggaaagcaggaatcagctcagtgaggcaggaatctacgcaggtgcgcaggtgtagaggaagtgctgtagggccgcaggggttggggctgtgatagagaagggtggaggatgcaggcaaggggctcccagaggagttggtgtctgggctgtggctgaagttcaccgtgtgacactgtccacgaggaaggcctcagatgaaggagggcacttcaggtagagcgtgggcactgcacaatggttgtcctggatgcgcaggagtggggtggtcatccacaaatga

SEQ ID NO: 154267 - DNA, 547 bp, Homo sapiens
cccaaagtacgggattacaggcgtgagccactgcgcccagccgtttcttttattttaaatgatcaagtttgaggtcatgtgttatggcagccttagtaaactcagacactccccctattctctctttccccaagaacagtcatagccaatgactgaccagagtaagagtatgtattagtccgtttttgcacagctataaagaaatacccaaggctgagtaatgtagaagaaaagaggtttaactgactcacagttccgcatggcgggggagcctcaggaaacttataatcatggcgggaggtgaaggagaagcaggtaccttcttcacaaggtggcaggagggagcgagtgcaagaacaaggaagtgccacactaaaaccatcagctctcttgagaactcactcactatcatgagaacagcatgtgggaaaccacccccgtgatccagtcaccttgacctggtcccttcgttgacacgtggggattacaattcgagatgagatttgggtggggacacagaaccaaaccatatcagagtacaaaggct

SEQ ID NO: 154268 - DNA, 611 bp, Homo sapiens
ccgcgctcggcctcaatttttagttttactttaaaattaaatagccagatgtacctagtcactatcctattgaacagcatggagctttgcctctcaatatgcaaataagctttgcctctcaatatgcaaataaaaaccaaacctttgcttcaaaagctaaatattgtttagggatttatgtttgatttttcaaagaggtggtgttgcagggtttcacagatgtgactgtcaacatttttagcagggaactgggaggagaggcaagatgatactaaaattgaattggagacactctaggattggataaagaagagtacagtgattctaagtgcaagatatgttttaggggacttcatgcagcttggtttgtcactagaagtttattttagtgtttagatgtataaacatactgaattgtgtttctagtcttaacatcaaatgttttataaattaaatctacaaaactaataaaattcaagttccctaacattaatttaatgtgacatatgacatattctacaaattgcttacaatatgaatatggtatggaacaaattattttttagttttgcttgacaatactactggtatcttggaaaggctcaattctt

SEQ ID NO: 154269 - DNA, 548 bp, Homo sapiens
ctacggactgacctgtatccccccagattcatatgctgaagccctggcccagtgtggctgcatttggagatggggcctcttggaggtcattaaggctaactgacatcacaaggatggggccctaatctgacaggactattagccttataggaagagagacgcccccgctctctatccactccctgcaatgcacaacacacactccacagaaaggccatgtgaggacacagcaagaaggcagctgtcttccagctgggaagagggctctcaccagaaacggaattacccagcaccttgaccatcgactgagtctccagaactgagaaaataaatttctgttgcttaaaccacccagtctatggtattttgttatggcagcccaagcgtctggcattccatgtttctgctcctgtggcctccacggtgcaacaagctagcggtttacttggacctctgcctcatctttcttcttttgcgcttcagcctgcgcattcgcttcttcctccacttggctctcatggcgcgaggtttcaaaaaaatggcgctaa

SEQ ID NO: 154270 - DNA, 762 bp, Homo sapiens
gccttttgattcaaagatgtggaacagtgtgtcttttaacatataccatttcactttttactgctactcacctggaaagcaaataattttttaaatatttgactcattttataaaagatttttttaatttaaaatttaatctgagtataatatttttctgagaaatgcctgagcatatctcaatattttatatctaaatctagcatttatattttatcttagaactttgacttttgtagatctctgtgaggtactaattaaattctacaaatatttactgagcgtttgagtatcttctctatgcaaggggctgaacgagctggttgagaacaaaacagggaaaggagttaacatctattgaacacctgttaaattttagatcttcatctcatttaatctgtatagtaaatttgttagtaggtacgatcctcattttataccacaggaaacttaggcatggaggagttaagctctcatcacctaaatggcagttctggaatttgaacctaagcccatgctacttttctaacacacaatactgcctcgtgtgtaaatataaattggattcctatttctagcttatagtctagtccaggagttcacaaagtggagtctgcagatggactgctggtggtccctgatttcacttttggttatcacaagttcacaactgtagtcgttcatcagtattcatggaggattggttccagtacccctgctgtgggtaccaaaatccatggagctgaagtcccttatataaaa

SEQ ID NO: 154271 - DNA, 659 bp, Homo sapiens
ctttgtgaggcttcagtgcagcagctctcaatcttaagtctagacaccctgcaccccatgagacccatctcagtcaacctgggctgctaaaacaactatcatagactggggcgatttataaacaacacaaatttgtccctgttctgatgtgtgggaagtctaagatttaggtgccggtagatctggtgtctggtgaggatcagtttcctagttcatacacggtgtccttgcatggaagaaggaaggagaggtctctcagggacctctttagtaagaacaccgatcccatttgtgagaactccaccctcattagctaatcacacttcaaagaccccacccccacagtctcatcttggaggtcaggatttcaacatatgagtttgggggtccacaaacattccattctcagcaagacccaaacctgagtccacagggagcatgcctggggagagctaagtcaccccacaccctcacccaacctgctgtcctttgtgttactagagcagcctggctgtgctgcctgaacccttccttccttctactgcaagcccttcagtccttgtgaaaatagatttctcttgcttcatgcatgcaaccttttagggtctatcttggaaccttgctacatgaatatcatcttaatatagttgaggacaccc

SEQ ID NO: 154272 - DNA, 185 bp, Homo sapiens
ccttatatcacctatgtcatgtggtactaatgtaaacattgcatcaaatattaaggtcagctgcaaaacccatatacttaggctatttaaccaaaagtgtatgattgtaagagtttgaaacagtcattaacacaaagttaaatagcctaagtatgtgggttttgcagctgaccttaatatttgat

SEQ ID NO: 154273 - DNA, 295 bp, Homo sapiens
cattcaccctgcctttccaggaggtgccatagtaggactgttggcactgccacactctgtccccatcttaccgtgaaccccggaggggggctgaggtgtgattccagcctactgtcctggcttctggcttccagactcagcacacagtagggacttcagagggcttgaaggaaatcagcggctgaatgcctgaaaatataagctttcaaatgcagtttgcttaaggttagtacagatgtccccatcttctatcatccagagtgcatttttccctctaaatggaaggacaacaagc

SEQ ID NO: 154274 - DNA, 555 bp, Homo sapiens
acagtgagacttcatctctacaaaaaataaaacaataaatttacaaagcatgttggtggaatgaatgagttaaagctgccagtgaagccaacttttacttggaaaaaacatcctttgtccctttcaaaccctcttaaaactccacaaagatgggattttctttgggagagggtgagtttgatgctgcacatgggtgaagagactggagggagtggaggtggcaagtcttggagttgtttgcatctctcagagaggttatcccatagagataataaatagatggtgggagaagaatatttcatttcatttggaaggcatggacatctccattccatctaagcaccctgcttgtcagccacaaaacttaaaaattaactggatacattgccactgagggatagactaaatatttggtcggccagtcatgccatatctgtgccactctgagtgtagagtagactcccaccttgggcatcactgtgagacttcatctctacaaaaaataaaacaataaatttacaaagcatgtcggtggactgaatgagttcaagctgt

SEQ ID NO: 154275 - DNA, 340 bp, Homo sapiens
cttcctaaccacctccacagatctccaggagccacagcgtgggagaagatgctcagcctcactctcctgggaaggcctccagctcaagcggggaggctggacaggaaccagcttcctgcatgtcagatcccaggccctgtccagagccaggcctcagtcttccaggatggaacatggcctccccacctcggactccttgcccagaagctagacctcagtttcccggccttggtttcctagcagcgccccaggccagaggctgcaccagtcttccaaggcagcacagcgctttggtcattggctctgagatttccagacaggctgagaagcaacaccaccg

SEQ ID NO: 154276 - DNA, 339 bp, Homo sapiens
aacaaaccctgatgacatgtgtttatctatgtaacaaaccctcacatgtaccaccaaaccgaaaataaaaattttttaaaaaggaatgtggacaaaagagagttgcttattgtgaatgtctgtctggccaagaagcccctcagatgtgcagggaaggcattccctacctttctcctggaggtagctggggatgacctctccttctcattcctgaagactgtctcgctgccagaaccacccatattctgctcctcctcacccaaaattttcctgctgtaagttgacaatccttgccatcaagttacatccgctgccccaccccatcgccactcacttttt

SEQ ID NO: 154277 - DNA, 259 bp, Homo sapiens
aaacaaaagaggtgatataccatgaaatttaacatgatgcctctacttgccagaagctctgaaacttaaagcgagctctctcagctttctctttgtgaaaaaggaaaatcagcaagtgttgcagagacggcggcaccaaaccaagacttcctctttgacgtaatcagaaacgctgatgaaattggaaaggagtgcctttctcattcactctgtggagttcagcgttattcaaccctgccaaactaaattcacttctcac

SEQ ID NO: 154278 - DNA, 211 bp, Homo sapiens
ctagagtaagtttaggttttattagtgttagagtagtatttagcttgatagggcttctaagagtaaaatcatatcttctaagctatttcttgatattgctctttattcaggccaaaactattagaggttctgcttcagtctttcattcatgtggaccctcaaatttagatatagtacttctttggtctttgatttttttcttttcgaataa

SEQ ID NO: 154279 - DNA, 1203 bp, Homo sapiens
gaaattttttttttaataaaaacaggtctcactgacataggactcttcagaagttcctacttcttagcatgtagagaggaggaggggattgatatcctattggcatcacaagagaagatctcttacctgtctagactgagaccaataattgttagtcaaaaagttagctgaagctggaaatcacaaaatgttacacatatatagcttaaacattttattttaactttataaattcattcatttttcatctggagagaccaaggtctttccattgaagcagttctgcagattggagatgactgtagactttctggcactttcattgtacattatccacagtttatactgctagtttttctttaaagagggattctaaagatagtcacaaggcaatttgagtgcagaatttttccagatttgtgcggtttttttcctactattagagtagtctgtacctaatttgaaagcagtttatgtctcaacttaatgttccttgaagcagttttattgttgaagtcatatttcactggtttttataacatttatataaattatgttgctgtaatcacaaaacaactgtgataaacaagttggaaagaaaaaaaactagcttatgttaaaaacaaaactcagctgctgggagaagaaccagccactgcatatgcagtggaccctggccatgtttaaccaggtaaaggagagcattccttaatccttcaaggcaattcagacagtttgtactgcagactaattaacatgatctgtaagccaggggatcaataatgttactgtttttatcataatcaaatcttatacaatagttgggtaaagcatagttcttaattcagttacctataaccttgaagaatcagatttctaaaaatttctataggatggtatatacttttaccttcataatgtaattaacaagttatttgtgttcatgaatcaggtgaagaaaattgagattttgtttctaatgagctctaataataatataagaacacttgaccataatttgactatagtaaaattttttaacattttccgaagtcatgtagacaaattttctgagtatttctaatgagtttgcaggaaggaaataaagttagtagagtgagtctactattatcattaaattaaacttagatactttctaacacactcagttatttttccttctaataaataagtaaaatgtca

SEQ ID NO: 154280 - DNA, 2111 bp, Homo sapiens
gaaattttttttttaataaaaacaggtctcactgacataggactcttcagaagttcctacttcttagcatgtagagaggaggaggggattgatatcctattggcatcacaagagaagatctcttacctgtctagactgagaccaataattgttagtcaaaaagttagctgaagctggaaatcacaaaatgttacacatatatagcttaaacattttattttaactttataaattcattcatttttcatctggagagaccaaggtctttccattgaagcagttctgcagattggagatgactgtagactttctggcactttcattgtacattatccacagtttatactgctagtttttctttaaagagggattctaaagatagtcacaaggcaatttgagtgcagaatttttccagatttgtgcggtttttttcctactattagagtagtctgtacctaatttgaaagcagtttatgtctcaacttaatgttccttgaagcagttttattgttgaagtcatatttcactggtttttataacatttatataaattatgttgctgtaatcacaaaacaactgtgataaacaagttggaaagaaaaaaaactagcttatgttaaaaacaaaactcagctgctgggagaagaaccagccactgcatatgcagtggaccctggccatgtttaaccaggtaaaggagagcattccttaatccttcaaggcaattcagacagtttgtactgcagactaattaacatgatctgtaagccaggggatcaataatgttactgtttttatcataatcaaatcttatacaatagttgggtaaagcatagttcttaattcagttacctataaccttgaagaatcagatttctaaaaatttctataggatggtatatacttttaccttcataatgtaattaacaagttatttgtgttcatgaatcaggtgaagaaaattgagattttgtttctaatgagctctaataataatataagaacacttgaccataatttgactatagtaaaattttttaacattttccgaagtcatgtagacaaattttctgagtatttctaatgagtttgcaggaaggaaataaagttagtagagtgagtctactattatcattaaattaaacttagatactttctaacacactcagttatttttccttctaataaataagtaaaatgtcagaatttcatccataatatcttgtggtcaaacagtggttattatgaaagactactttagaagtcttaagtataactaataaagcagagacttttaatatatttgactttgtcagtctgacagtgttatatactagcatttgaatatagttacatattctacatttcagaagctacactctaagagatagaatgcctcacaggaagatagctcatagatacaaccttcctgtttgcactagttcatgataagatgtttgcaattatgatattctcaagtagcattttggaaatgactttattatgacattttaaataacttttaagaaaaaatctaatttatagtttgatcctttgtacagttaaactcttaagaacgtgaaaaggaatgcacacagaaaggttgcatgtaactctctagtgttattttaattcatccatgtaaatgcattcttgatttttctcttcctttctctacttagattagatgacttatgagaaaggatagatgtaagagttaagcagcataagaagtggggggatagaagaatttgggtgtcttaagaatgtttaagaaagtagaagtatcaagcagtagttggttttatgttggtttttttaaaactttgtttcatttatagactctgtatttatctgaaatgtgtagatctccctttccattccacagtgacattgaagatccgtaccttaggttatctttggttttaactttggtatgattaatgaaataaaattattttctgaaagtttctgtatcttaacatcagtatttgatgaatatgtttaaaagataaaacttggaaaatcttggtatttaaaattatcactgtttagaaacttatagttttgagttagtcaatcttagaaatgaataccatgcttggttctct

SEQ ID NO: 154281 - DNA, 483 bp, Homo sapiens
cagccttgggctccctaagtgctgggattacaggtgtgaaccaccgtgcccagccaagaaacatctctaaacccctctcttcctcccagcagtgactgtgaagggcactggggacaaatccctttttgaaaggatcttctggatgatgtcatggatttgggcctcttcctgctgggggtcactgggtggtacttcttggccatccagccaatagcaacaggccagcatgtgatgacgtcactgtcacccccactgtctcctcgggttccaaggagcaagaggcttgcaccattcctctctaatctgagatggattttgtgggtttgcgtggggggaaggttttgttttttttttttttagcaagaatcttcttaagccatacacccatctcattaggattagttttgttaatctatagatccacttattcggccgcacgccagcctccgagtgtcccaaacacgaagtcaaagggtgagcaga

SEQ ID NO: 154282 - DNA, 424 bp, Homo sapiens
tctggtattacagtgtcctacctggtcaatgttgtctttattttgattatttatgtatgaggataggactttttataccaattaaaatgtttttgtttatcccattctttctgtttctgtttcttctgttttctcttaaatttattgtcttctgctgttttgttttcttgctccatctttttctttttaatattttagactttatatcttctctgatcttctttgaagttttaacatgcatatttaactttagatttcaggatttaaaatattttccttcccccaacttaaggacttcattagctttggtcactcccttcctgaaatgacacttttgttattgaaggtatttaaagtgtgactttttagaaattcaacaatatgcacacaccagtttttcaccacaccagtaaatgtctcatat

SEQ ID NO: 154283 - DNA, 304 bp, Homo sapiens
acaggcatgtgtcaccactctagactaattaaaaacaaaaaattgtagagacagtgtctcgccatgttgtccaggctggtctcaaactcctggcaatccttctgccttgacctcccagtatgctggggttacaggtatgaggaacctgcctggcacccagtatttttaaatcaagttttcctactgctccccaaccaaaatgacttctcatgaggcttctcagcaatcaatgagctttattaatgagatctcaacactgacaaggtgaaaatttcaagaaggacaagcaaggtgctctgtttaa

SEQ ID NO: 154284 - DNA, 334 bp, Homo sapiens
aattacattcacaatgtagtacaagcaataccactatttctgaaactttagtatctcaaacagaaactctgtaaccagggagggcatggtggctcacgcctgtaatcccagcactttgggaggtcaacgtgggcagatcacttgagttcaggagttcaagaacagcctggccaacatggtgaaaccccgtatctactaaaaatacaaaaattggccatgcatggtggcatgcatctgtaacaccagctactaaggaggcagaggttgcagtgagctgaggtcatgccattgcacttcagcctgggctgcacagccagactccatctcaaaaaaa

SEQ ID NO: 154285 - DNA, 233 bp, Homo sapiens
ccacaatcaagttttcttgagctttattttctgagctttttattgtgagaacaacaggcaacctgaatatgctcttgcaaaatacactccctactcttttccttttcactagcagagaattactgatctatgttacttcaataaagcactgggtaagagagctaacaagaacagggttctacctctcaatgctacagtaagaaacatacaagagtactgtacggtcatctttg

SEQ ID NO: 154286 - DNA, 374 bp, Homo sapiens
gcatacatatgataaagcagacatgacttaaacacatttacttttcttattaaaaacaacaacaaataagtagaaatcaaggtagaaagttagaaatggcagaagaaaaagacatttctggcagcttggatgaggaaaccattactctcaaactgggctcaggaaaggattgagaatgaatgtagcatctcttctgggacttgaaggatcaatagaattcgaattggcaaaaatataggtgaagaaggcattaagttatttaaagcgaaggaaacagcatcagcaaaattatagaggaaagtgtgaggtgtgtgggtctaggggcttatacattgcgtttgattagactgaatggtacacaaagaggaatactg

SEQ ID NO: 154287 - DNA, 610 bp, Homo sapiens
gagatcgtgccattgcactccagcctgggcaacaagagcaactccatctcaaaaacaagagaatgggtgtgatgtgtgagtgtgagagcaggtgtgtgtgagcatgcatgagtgtgagctgctgtgagtggatgtgagagcagaatgtgtgtgagcatttgagtgtgcaagtaggtgtctgagtggttgtgtgtgaacaggcgtgtaagcatgcaagtggatatgcatgagcagaatgtatgtgcatgcgtgagcaggtgtgaggtgcaagtgtgtgtaagtggtgtgaaatatgagtgagcaggtgtcaatgaggtgtgaaagagctggtgtgagcgtgtgagtataagtgagcagctgtgaggtgtgagcatgtatgtgagcaggtatgtgtgatgtgtgagcatatgtgtgagcatgtgtgtgtgcagatatgtgtgggcaggtgtgtgtgagtgggtgtgagatgtgagcatgtgtgtgaggtatgaggtgtgagcatgtgtgaggtgtgagcatgtgagtgggtgtgaatgagacagagagagagactgtgggcagccagggagctcaggaacccgtgggaggtttatttcttttcttttttcct

SEQ ID NO: 154288 - DNA, 455 bp, Homo sapiens
atttcatgacccacgaatggatctcaacctacaactggaaaaacccactactctggaggagctgattccgtactctgctggatcttcaattcctgaccgctggaaattggctgcaattttcctggtgagttcctccctccatgttctcctcactaatacaccctacaccagacctccagtcctaaaagccaccacctgcttcacgtcaccacacctgtgccaatcagatttcctctgttccctcttggaccttcagggacctccaggataaatgccaggatcccagttactggcagactgagagaaggatgacagccccaaaagatcacgaggttcctatctgttcatatttggtgggcagctttcgtctgcaagaacaaaatacaagccgggtgaggcggctcacatctgtaatgccagtactttgggaggccgaggcaggcggatcacctgat

SEQ ID NO: 154289 - DNA, 265 bp, Homo sapiens
atagtgccactgaactttagcctgggtaagagaatgagactgtcttaaaaacaaaacaaaaaacatggtaaaggggcatgtcatgtattattacattcacttagtattcaaggaagtattttaggtaaaaggtgtccaaattaggaaaccaaagcactgttggctttcccaagaatctgaagaactctctgagcctggtttcttgctagcaccattataaatgagttagaggtggtgaggcagctggttctgctgtcccacgccg

SEQ ID NO: 154290 - DNA, 166 bp, Homo sapiens
aacccagcagagttcacactaaacctcttttggtcttgctgagtcctcatcaccctgtggcagtacctgttcagctagaaatgcagagctcacctgaacccaatttgactttcaaggaagaatttagtggcaggtgcaattttgctagtttacaaacccacttcga

SEQ ID NO: 154291 - DNA, 608 bp, Homo sapiens
agttgtgaacttccagcagagacaatggtgcctcccccatcttgccctggaggctggcctgaccaggctggattcattcaaagtttaaggcactggtctcccaatgccatctattatataaatcatctttcccatgctggtctgaaataccctgagaatcaggggtgctcagtgtaacatcataatagcaaaaaattagggacgaacacaagttctatcagtattgcagaataaactgatacagctacagaatggttttttttttaaacttttcttatagaatattagacctttgatatagatatttgtttaaatacatggattcataagtatggagttatccttcaatcaatggaaagccaccaaatggttttgtggtcaggagagcttcaggacacttaatgctagttgtgacgtgtggggaaggaacccattgttgcttatgtgaacgtgtaggtaggtctatgagtgaaaaaatagccaaaagaatcaactgcacttattttgagatgagatcacagggacatatgccttctgtattatacctttatgtacaattggaattactataatgaccatttgttacttttgcaaccagaaaaaaaaaa

SEQ ID NO: 154292 - DNA, 431 bp, Homo sapiens
acttttcacaaaaatcttacttatccttacatgtaatagattttttgtaagtgaattaataaattttatttttagtgtgataaatattgataggtataacctactgaaacaaaagctctttggaatccttaatcatttctaagagtctaaaagaggtccaattcccaaagagtttgagaaccactattctagaaggcaagagaaaaggaactcctgacttcaactttcatctacaaagtttaaccagaaaacaaatataaaaggtcatgaaaactttagacaaatagaaggtcacaagaaagaccaagaaatcacgaagatcataaacctggaggacattatgttacatgaaataagacaggcacagagagacaaacaccacatgatctcacatatgtaatctaaaaaagtggaaatcagaaatcacagaa

SEQ ID NO: 154293 - DNA, 509 bp, Homo sapiens
tcaagatgaaagtgacggaatatctagaaggccagacacgctgaaaggagattaagaaaatttaagtaacctttactgttgacctgggaataattacataataaaatcaagtccagccccatccccctaaaaatgcgattatttactccaagaaaaacaaaatgttcagcaggaaaggcaaggtatcacaataacatagctgtgaagagtatttatacagtccttaaaatcttatagtgtaaaccctgaatacaacctaaccaaaattgtgacataattactagcgaggagattggagagcagaaaatgtgcatgtttgtggtgggagtaagggagtgaggagacaggtaaatcctcagcttccttggcttatggttaatggttaataaataaggcctaaatccaatataccaggaagtagcaattagaggctgagacaggagaatgcctaaggccaaaaattcgagaccagcctgggcaatatagggacactccatttcttaaaaaaa

SEQ ID NO: 154294 - DNA, 619 bp, Homo sapiens
ttgtactcatcaatctaaagatctatccatacagcattccatttttgatccatccaatgataacacctaggcatataaccatctgcaccttcactaaatgattccactgtgcatataaccatacatacacccaacaggtttttaaaacctgcattctccattcttgcatccagccatttgctcatattctactttccatctatttcttacattattcaatacacccaattttgcatgcatccgttattatatttcaaattatattagacgattattatattcatctttctgggctttaaatatccaatcccacataatttcaatgactagttattaaatccacattaaccatataatacaaagaaaatttcagtaaccattcttgcatccttccatcaactcacatgtctgcctgtctactactactaccaagcttgaaaacaccaatccaaccctgcctccttgaacgcacctatccaccaatcactgaattattgtgtgtaactttccctctgtactcagattgaagtcatggccacttcaaaattttactggctgaacacatctacttcttactaatgaaaatattcctgtgggtctgttatgatggctctcaggg

SEQ ID NO: 154295 - DNA, 525 bp, Homo sapiens
tttacctggagatggagtcttactctgtcacccaggctggagtacactggcacaattttagctcattgcaacctccgccttccaggctcaagtgattctcctgcctcagcctcctgagtagctaggattacaggtgcctgccgcctgccaccacacctggctaatttttgtatttttagtagagatggggtttcgctgtgttggccaggctggtctcgaactcctgacctcaagtgatccactcacctcggcctccgaaagtactgggactacaggcgtgagccaccgcgcccagctggccccattctttccacccttagtcgcttatgttcttttgattcagctgtctaaatacctgcatctctctgtttctggtcaccctgcttggtgcaggccatcattttatctcaactggatcattacagtagcttctgtagggttgcctctgttcctttcattttccttgctacagccagagtgataattctaaaatacaaatctgataatgccacttcctttaaaatc

SEQ ID NO: 154296 - DNA, 281 bp, Homo sapiens
agaggatgcagtgagctgggttcacaccactgcactccagcctggtgacagagcgagagactgtctccaaaaataaaactttttagaaaaacaacaaaaaaaagtcattaagaaagtaaattttaagttatgtatatcacaatttctaaaaataatgatttttaaaagagtagagcaaagttgtgggtttgccagccttaaccattccctgtgattgcctggatagacatgggccatatccgtgctgaagggggccaggctcatggacttcccaacagatt

SEQ ID NO: 154297 - DNA, 661 bp, Homo sapiens
ataactccccctaacaaataaattagaatcaaccttcatgtggggagacctcccagtggaatacgagaagtaacaagtgacctaattgtgctgcaattgagtgatataaccccagtgaaggcggtggggaagagaaaaactaacccaagtaattatgggaaacagcattttggctgtatatcggagattaaacaaatagaactgtgcataaatactgtattatagttactgagttttttttctcacagggtatggggcagcaattttgaaactgatgtgtgtataaggattgagcaaataagtaaatatgtcgtagataatgagagccaggtttctcattgtcagagaaagaagtttcaaataaagaaaggggaaggctagagtgaaccttgaagtgttggattagaatggaagcataagtattgtgggagacagatgaatgctcaccccactcaaaatatacatgtcctaatttccagaacccatgagtgtgttatgttacatggcaagggggaattaaagttgcaggtggaattgagattgctgatcagctcactttaaaatcgagattcttttcaatgagctgtgtgggtccaatataatcataaaactcattataagtgaaagagggacgtaggagagtcagtgtcagagtgacgca

SEQ ID NO: 154298 - DNA, 331 bp, Homo sapiens
catttgcccctcaccccagatgctactcagggaagttcacgcttagtcaaaattatcacaaaattcagctaggaggttccttcactctgtagccccttcccaattctgctggctgccttcccttccccaaggacctctgtgaggtaacgccaggaatagcttccatgggctcgagctaaggactgggagtacctacggggctcctcctgctgcttcttctacttttatatttcacttggctccctaaatccattttgtcatgcacgtccatgtgaagagtccaccaaacaggctttgtgtgagcaacaaggctgtttatttcacctgcgtg

SEQ ID NO: 154299 - DNA, 192 bp, Homo sapiens
cgtgtgcccctcggtcctggttctgcatttagggttctctctgcagaactcaaccccctccagtgagacagccgtgtccagggatgtgttcagctcccagtgcccccacccagctcctctgctccagactgcaaatgccattaatatttagcattagaaggatctggtgaagcccataaatctgcatatgtt

SEQ ID NO: 154300 - DNA, 384 bp, Homo sapiens
gttacttaatgttaggagtttcagaaagtggttgaaaagactaaatgacatcacatacagaaatccttcaaaagttaaaaactgctgtacaaatattacaataagcagagaagaaaaataattagtgataataattagattttgcattggttgttctttgtagagatcacgcatacagacattgtttctaatttctgtctcaataccttcctattctataatttcaaaaaataacccccacacacactttccctacataccattttagttactatgatgtggaaaatacacttttcggccaggcgcagtggctcacacctgtaaacccagcactttaggaggccaaggagggcagatcacttgggatcaggagttcgagaccag

SEQ ID NO: 154301 - DNA, 720 bp, Homo sapiens
cagatgctataaatatcttcttagactcgtaaattagtattttggttttgtggttgtcattgtaaatagatctgtttatttcccatttgtaattgtttattgtcttgttgtaattatagcaggagaatcgcttaaaccctggaggcggaggttgcagtgagccaagatcacgctactgtgctccaacctgacggacagagcaagactccgtctcaaaaaaataaataaataaataaaaaagctgaaggaatatagtacaaactgttaatagtaggtgtctttgggtggtatcattaatttttcccttttactatacacttttgtaatttttaaaaaaattcagaatgggccaggcacagtggctcatgcctataatccaactttgggaggccagggcaggaggatcacttgagatcaggagttggagaccagcctgggcaacgtagcaagaccttgtgtctacaaaaaaaatttttttaggccgggcacggtggctcacacctgtaatcccagcactttgggaggctgaagcggacagatcacctgaagttaggagttcaagagcagcctggccaacgtggtggaaccctgtctctactaaaattacaaaaattagccaggcgtggtggcgcatgcctgtaatctcagctactcgggaggctgaggcaagagaattgcttgaacccaggaggcagaggttgcagtaagctgagatcatgc

SEQ ID NO: 154302 - DNA, 185 bp, Homo sapiens
acctacttccatccataccacttctctgcttctttcctcatgttacagttaaagaggaacctgttgtgtccttgctatgaaacctagctgtcttttccttagagatctatttctgtttcctgtcttctctctaacctttgtctttagcgtctttattttgagtcaccttttaaacttcctcaaat

SEQ ID NO: 154303 - DNA, 432 bp, Homo sapiens
ctgggaggacgcttggcagtgctgagtcagagcaggcgtggctggccctgcgcaccggtctctctcagctgtgtgtggttctctgaattcagaaggctctggggctcccccggcggctctgcatccaggtcatgccacccctcccagaaagccttcctttttccacatcagcactcaggctgtggtcagcgggagtgcagtgcggacgcctgagagcccatgtgctcttgaggtggctttgtagaacctactccctggcctcttaggaagtgactctcagcgggcagctcacgtctcatttcctgcgctttgctgaggtttctgtttgtggttgggggagtgtgggacctcacatgccttgccttgtgccagcggcatttgcagggcaattaagagcctgggctgcagacagagggcgagcatcactccctg

SEQ ID NO: 154304 - DNA, 328 bp, Homo sapiens
ttcctttgagtcctggatatgatcccttcaaactcctaccttctccatctctctgtcttcctcccctgtcagacttcttctcttaaactttagtccaccctgctgtcaagggactcagagtcctccaaaagtaagtaccaaggctgaagaggaaaaaaagactatttggaaatagactggatattttatccactcagatgggtggtggagacatttcgatagctgttagatgtctttgcagtgactcatttaacatttagtccacagccttcaaaagggcttcacagggcaaatgaagatcttaaaaaccttctccatgaatattggt

SEQ ID NO: 154305 - DNA, 376 bp, Homo sapiens
cttatggttctggggctcagaaatctgatgtggatctcactggctaaaatcaaatcaaggggattattgcttcgggggccaccttcattccttggctcatgacatgcttccatcctcagagccggcaatggccagtcaagtccttcttgcatcttatcactgaatcccctgcctccctcttccacgtttaagggacccttgtgattacagattacacaggacccacccacataatccaggctaatctttttattttgtggtcagatgattagtagccttaattccatctgctaccttgattcccccttgccatgtaacataacgtattcacagcttctgcaggttaggatgtggacatcttggatgcaggaagagc

SEQ ID NO: 154306 - DNA, 603 bp, Homo sapiens
gacaactgcagcagagggagaaatctgaaaacgctgcactgtggacgaagatggaggaaggggccatgaaccttgaaggcagctcacaagctgggaaaggcaaggacacagatttgcctcagagcccctggtgcgagcagagccctaccaccaccttagttttggcccagagaaactgacttcaagacttctggactccagaatataagtattaaatttctgttgttttaaaccaccaagactatagtcatttttctcggcagcaagaggaaaacaaggggaattccgagggcagggatgtgatctgatgtacattttggaaaggtcacccacccaatgccttgctttgtggagaaataatccgggagaagagcatcccggggaccagttgagaggccggagcccgagttggagagacagactctagagagttcgaagaagaagaggaaagtcgtgatgtggaaagcacaccctttggggaaagggtgtgctgccggatgaaacgtggggtgacaggcagagtcctggtgacgcacaggctgctggcgaggaccgcaacgtaggcagaggtgccaccttcacagttgctgaagtgaggaccag

SEQ ID NO: 154307 - DNA, 376 bp, Homo sapiens
ggcgacctagaggacccggaagaggtctttgcatattttggataacagtccttaattcaatatgtcttttgtaagattttctcccagtctgcggcttttcttttaattctcttgacaatgtcttttgcagagcagaaatttttaattttaatgaaatccagcttatcatttctgtcattcatggattgtgcctttggtgatatatctaaaaagtcatcaccaagtccaaggtcatctagattttctcctgtgtcatgttctaggagttttatagttttgcagtgttgttttgttttgttttggttttgagatggagttttgctcttgttgcccaggccagagtgcaatggtacaatctcgtctcaccaacctctgc

SEQ ID NO: 154308 - DNA, 387 bp, Homo sapiens
accagaaatgtgatttagctattaacaaaaaaacaaaactgaaagaggaagaggggtgacaggcacacataagacatgaatggctgcgaacaagttctcagacctggtgcgggagagaaggcacgggactcctcccaaagcttcctcctccagggctccctaacgagatacatgaaaagggaggggaaaaataaccacagtcttttagcttatcaatttctcacatccaactccaaacagcagaaatacaaagactgtctttttcactcctaacccaggaggaagaaggaaaagtgcttatttttagccaagccaaaaaacataagcagctacagattaataagaagcagagagaaaaaagaaccctcacaagagtattgtataaag

SEQ ID NO: 154309 - DNA, 111 bp, Homo sapiens
gctggggccatgtgtttttataaaaatatctacatgagtcacttaggatgcattcagttacagggaatagaaaactcaatttaattggcttcaacaagcaaatgtgttggt

SEQ ID NO: 154310 - DNA, 643 bp, Homo sapiens
catatatccaggctttcaacaatatcaacaaatacttattcagcacttgctatgtgttaggccctatttgaagcatctagcacacagcataaacaaaaacaaagccccaactctcaagaagcttatactctagtggaaagctatacacaaagtacagtagtgattaatgctcagcaaaataaaacaacagaaaataatagggcttaaatttaatcctcattctaggggcccaaaatatagcttactgtggaagactgatgtataagaataaaaaattagttgtcattatctgcatttttgaatcacccaaaaatggtcaagtttttcctacattattaggagggaggccgcaacaatgagaccagtgcactctctaccaacacagactaaagactaaatctcataaaataattagaaataaactaattcaacaatgtagaccacatataattttttctagctaacattatactttcatactagaaaaaaaaaaggcttaaaataaatattctattttatctagtccattctcagtcagaaagacctcagagtgggaacgggtccaggcgcagtggctcacacttataatcccaggagctggggaggctggagaggcctccaggcaggagagaggatcacttaa

SEQ ID NO: 154311 - DNA, 427 bp, Homo sapiens
ggccctatggccacccagcctgggcgttcctgcactaccctctgtgtgcctctgtgccaccgctgacagcaatgacgattggtgctattctttaaggaatgtttccgataccaaccgctgaacctacaagttgtttaagccttacaggaactctcagtcactctcctttaagagatgtggcaaaaagaggcatgggtttgcacagggcctctcctcaaggcctcctgacccaggctgggctttcctctccaagccagcctgcctcatccaaacctgtcccaagacctccctgtggggactgcccagccctctctccaggtaggtgataatgccttgttttccaaaggaaaaaattgaagctcagagagttcgggaagtcacttgtccaaactccgacacaggaagaagccaagcagcagaactgggt

SEQ ID NO: 154312 - DNA, 209 bp, Homo sapiens
tgtcccttgggagtgtgaaatccgagctaaaaccagaacttcactaatagaaaacgagttctctcttacccactaggagaaagagggaaggaaataagaaacaagtttttgtgagagtcacaaagacaattcatcagttagaaaatgagacctatgaggaaaagataaaggattccactggtatcatttagcaaagaaaagagattcta

SEQ ID NO: 154313 - DNA, 690 bp, Homo sapiens
ctgtaatctcagctactcaggaggctaaggtgggagaatcacctgaacccaggaagtggaggttgcagtgagccgagattgagccaattcactccagcctgggcaacagggcgagactccatcaccaaaaaaaaaaagaaaccctgaaatctccctgtaaagaaaccctctacctacactcatcttgtgatatcataaatactatttttattcttccagttgccaaaaaccttgtgtattaattatatattgtggcataacaaattgtcccaaaatttaacagtttaaaaagcacacatgtattatctcagttttgtgggtgaaaaatctggatatggcttagctgtcccctctgctttggtgtctttctcaaagaacagtcacactgttgactggtgccgtgctctcatctcatggcacaactgggaaggatgcactccaagctcacgtggttcaagattcagttcatcaggggtagttggactgacatcttcagttcctggctggctgttggtcaggggctgccctcagttccttgccatgtgggcctctcaacaaggcagattgcttcactgaagtgttaaagccaagaaagcaatggagagaatctgccagcaagacagaagtcacaatcttggtgatatatccacagaaatgagatcccatcaactttgccgtaatctattcatg

SEQ ID NO: 154314 - DNA, 417 bp, Homo sapiens
ctgtaatctcagctactcaggaggctaaggtgggagaatcacctgaacccaggaagtggaggttgcagtgagccgagattgagccaattcactccagcctgggcaacagggcgagactccatcaccaaaaaaaaaaagaaaccctgaaatctccctgtaaagaaaccctctacctacactcatcttgtgatatcataaatactatttttattcttccagttgccaaaaaccttgtgtattaattatatattgtggcataacaaattgtcccaaaatttaacagtttaaaaagcacacatgtattatctcagttttgtgggtgaaaaatctggatatggcttagctgtcccctctgctttggtgtctttctcaaagaacagtcaccagagctgaggaccatcgttgggggatcctcta

SEQ ID NO: 154315 - DNA, 403 bp, Homo sapiens
ctgtaatctcagctactcaggaggctaaggtgggagaatcacctgaacccaggaagtggaggttgcagtgagccgagattgagccaattcactccagcctgggcaacagggcgagactccatcaccaaaaaaaaaaagaaaccctgaaatctccctgtaaagaaaccctctacctacactcatcttgtgatatcataaatactatttttattcttccagttgccaaaaaccttgtgtattaattatatattgtggcataacaaattgtcccaaaatttaacagtttaaaaagcacacatgtattatctcagttttgtgggtgaaaaatctggatatacgggtacttgtatcttttgggtagaatgatttatttccctttgagtatatacccagtatggggatg

SEQ ID NO: 154316 - DNA, 1105 bp, Homo sapiens
tttagagtttttttaattaacacttgtgttgctaaattctatttatgtaagtctgctaaagttttttagcccacttaaaacttaagacaaccatttaaaataatggatgggttactatgagcaatttcgctttcagaacccccttgttttagtatatgaaaaagcctaatgcgcattaatgaggttgaagagactatgagaaatatgtatagtgtatattttaaaacagctttgcttgtattgtgaagatttaaaaacaaacttgagatttttaacgtaactattaacacagttttaacataagttatcccactgggtttaagagcatcttgaatgtataatcctttttgtaacccaggttggtttctacttttaccagtcacccaaacatatttatgtttttagttttatgtactcatttccctttgttttcctcaaacagcatgatttttttgcacatgtagaaattttttaaaagaaagaaattagtacatcattttctctggattttcttcacttccctcttcctttctactaactccttccttaaaggccatatcactccatttgcattatttgtgcaaatgccagggttggtttttatttttatttttgctatttacctaaaaaaagaaaatgcttcagtcaattgcttttttatttaaaaaaaaagaaaagaaaaaaagctgtaaccttatcatttctgagtagaccattgagcgatgaatgcacacctgtagtagcccaggaccagctgtggtggctaaagggaatatgttaattaagcaagaggttcttttctaaaagtggtatctgttatccacaatgtattttagttattcccacaagtcaggggtccagataaaatgagggttatcagctaactgatatgctatcattgaggttcatcaatgaatttgtacatttctagttccctttggtgaagggaaaaatgatgattttgcaagacctagattttggcttggtttcttgcctccttttttggcagccttcatcttctcatctcccaaaccccctgagcccgtagggttttcatagtggacaaagaacttgtggtcttttaaaactgggactgatacttttt

SEQ ID NO: 154317 - DNA, 686 bp, Homo sapiens
taattttttgtatttttagtagagatggggtttcaccatgttagccaggatggtctcaatctcctgaccttgtgatcctcccgcctcggtctcccaaagtgctgggattacaggtgtgagccactacacccggccctgttgtttcattcttttatctttctgtttcatctcatttaatcaccacaataacccgacaagacaggaactattattatccccgtttttctttttctttttttcttttttatggcaggggggagtgcagtttcactcttgccacctaggctggagtgcaatggcgcaatctgggctcactgcaacctccgcctcctgtgttcaagtgattctcctgcctcagcctcccaagtagctgggattacaggcatgcaccaccacgcccagctaatttttgtttttagtgttttagagatgggatttcatcatgttggccaggctgatcttgaattcctgacctcaggtgatcagcccaccttggcctcctaaagtgttgggattacaggtgtgaaccaccacgcccaacctcattgtagttttaattcacattccctgatgatgagtgggttgactatttttccatatacctgtcggccatttgtatgtcttcttttgagaaatgtctatttaggttctttgctcattttaaaatcaggttgtcttcttgctat

SEQ ID NO: 154318 - DNA, 604 bp, Homo sapiens
cttcgcgaacgtgatacatcaatctgaaaacagagattggatggatacacacaccaaattttaataaaggtataagttggactagaagcagaacaaaggtgattttaactgtatttctaatattttaattattttaaaatagctgatgcaaaaatgacaaagattagcatttatttattctagatggttgatcacacatatttgaatattattttctaagtctgtagttttaagcatttcaaaatctaaagaataatttttaaaagctataaaaatatgaataaaggactagaaatcagtaacttttaattaatatgctggattctgggacaactttaaactcaacagtagtatttaccatggtgtcaaatttagcatttatcttgagttcacaaacttgagttcactaattttgtctctgtttttcaaatttctagcgtttacagactactataacaaccatactcttttaggctaagtgttggaagatagtaatagatttctggctgaaaaagaagtcttactttactaacgtaaatcccagatcactattcaagcccatcattctcaccgtcccttcacgtggtcatcgtgcccacctaca

SEQ ID NO: 154319 - DNA, 503 bp, Homo sapiens
gttaagtacaggatttccactcaggcccttttcaaacccatgtttcaattttgcaggtagtcagtatttgtcagcacccctgtaagcaggtggctgtcctggcttggtaggggagggactaacagagacccacatcctggaggacacagtgtggcgctcatggcagcacatggacactgagtggacgtgctgggctgcagaggtcccaccccccggcacagtgagagtgcgtctcggggcagcacacccactgaagctgggtgcttggggcagtgtcctgggagcctgacgggcggcgtcctgggatggccatagtgggggcccctggggctcctgagtggcagagcgcgacacagtggtcctggtgtgtagggagtcaccatgatactggcaccagctgatgtgggaggcaggtcactgtgttgcttgtcacccgtgggacagtgagcttggaagctggaccctcatgctcagcaggtgcttgcagcccaggagctgtggtc

SEQ ID NO: 154320 - DNA, 357 bp, Homo sapiens
cgcacaggcagtcctgagacttctagtttgaaagaatagaattgaccaggttagttagctatgactttgcaaagagtaaagtcccgaggtaaggagatatagggcagctaaatagtaagggataggggtttatgttaaggtgtggaacaagggatatcaagtgagtagttttttttttttttaatattgaagtatatattggaaacaaggccatatccaatgctacagtccaaaccaaacttttaaagccaagacagcggaatgaaacttactcttagccttcttcccttagctgttgagcagacttaacaaactctggtaagaaatccggcataggcaggaaccttacaaaaaaaa

SEQ ID NO: 154321 - DNA, 265 bp, Homo sapiens
gtgtgtgtgtaaaattacttcatgatatataaaacaataaaattggaagtggtctaaatatgctttgtaaaaccatagtttttattgaaggctaaatcaccacaaatttacactgtaacattaccagtattttattgtctcatctgacagaaggacttgtccttagtgtcagataagtagtttggtggaaaaagactcttgtgttaactcttgtcacaagtcaaggaagagtggctttcagggctattgatttgaaaggtagata

SEQ ID NO: 154322 - DNA, 361 bp, Homo sapiens
ctgttcagtttgccctccagccgccacctccttctattattggctgaatgaattagtgcaaaattagtagccaaaagggtagacagtgtgaatggaagggaggagaaggacagaaactttaatctccaggaaagcttatttatcctttaaaaaatggaaagttgggcaggcgcagtggctcacgcctgtaatgccagcactttgggaggccgaggcgggcagatcacgaggtcaggagatcgagaccatcctggctaacacagtgaaaccctgtctctactaaaaaaaaaaaatagaaaaagccaggcgtggtggcaggcgcctgtagtcccagctactcgggaggctgtggcaggagaat

SEQ ID NO: 154323 - DNA, 355 bp, Homo sapiens
aaataagaagagatctgtgaataagcaggaagagaactatgaacagtggtgacctgaaagtcaactgatcaaagcatttcaagaagaatggtgaactatgcagtatgatgctgataggttgagtaagataacttgagaattgactaatgtaaagatattggtgaccttgaactagctatttcagtgtaacaatagtggcagaagtctactctgagtgagcttacagaataatggaaacagatgaattacaaactgcaagtacagataactcaacaagttttgctacagttaccagagaaactgaatagctagaaggacatagctccaaggggataaagaataaagaaattttctc

SEQ ID NO: 154324 - DNA, 107 bp, Homo sapiens
cccttctgttggaacaagcatcctttctattaaaagcaataaatctcctcttatttaagtggcagatggtttagattgttacttttgctttcagcaatcctctagaa

SEQ ID NO: 154325 - DNA, 614 bp, Homo sapiens
gaaggtccaagagtcccaaagctgaactcggagtctgatgttcaagggtaggaagcatccggaactggacgaagtagtaggctggaagactaagccagtctagtcgttccaatttctcctgccttttattttggccacactggcagctgattagattgtgtccacccagattgagggtcggtctgcctttcccagtccactgactcaaatgttaatctcctttggcaacaccctcacagtcacactcgggaacaatactttgcatccttcaatccaatcaagttggcactcaatattaatcatcacatatttgagttttactatataccatcaaaggtcgatatctaagctgaaacatgaagagtgtagattaaccagattgtgtctggcaagtgtggaaatgttaggagagatgataaaggcaaaacgaggggcacaaagctataaagggatgagggcatggcaagttcaggaaacataagttcatctactagaatacagcattgggaaagaatggagctttcatttcatagaggtaaagctacagagagactcaaggggcacatcatgagaggtcttgtaagccactttagaagtttgagcttcagcctaaa

SEQ ID NO: 154326 - DNA, 418 bp, Homo sapiens
aaaaaagaaaaaaagaaaaggctttattagcaactgtatgcagacataaagtaacttttctctctgcctcatgttcaattctatatcagattggcaaaaaggaaaaatatttgactaatcaacttgaatttaataacgtgatctagggcaagtcatttaaattttccagaccttcttgtcctcatgtggtgtgatggactcaatgtttctgccttgccccgctcctctgccctgccaaattcatatattgaaacccaaatgcacaatgtgatggtattacttcccacagataactaggaggtaattaggttaagatgagccatgagggtgggattagtgtccttaaaagaagaggtagagactaaagctagcaagcactctccatctgtctctctccctctctgtctctccctgtcat

SEQ ID NO: 154327 - DNA, 337 bp, Homo sapiens
ggtcacccaaccaaggagtaaagaactgtgacttgaaccctgattctctgccaccaagcccaatgagaaaggcttacaactagtggtaggaaggatgattttcagtggttctcaacacaaatatgaaaaacagaaaggggatgcaagtgactcaagtttggaaaactgcacacgcccctctgctattctaactgaaagatgaaattaatagtaagcagggcattaatcactgatctcttcctaattcagatacttaatttttcttgtcttctttgattagctcctccaatagaataatagaatactgaatagagccataactgataatagctttatc

SEQ ID NO: 154328 - DNA, 331 bp, Homo sapiens
aagagaagcattcgtagaggaagattcatttgatctggtccttgaacagttgataaatgagtgggattgaccaggcaaagaggaggaacaaaggtattgacagcccagggaataacaggttcataggttaagagggcttgaggtatcaagtggtcacgtttacgggaaatgagagtgaaaatatatatgggcaacgggttgtagatgaccgtgtgtgccacatggagaggtaagaacttgactttacaggtgatggggaaatgatgatgatcttacaactatgatataacttgctttgcatttcgggagggtccctctgagaacagtgaag

SEQ ID NO: 154329 - DNA, 279 bp, Homo sapiens
agttggtatcatcaaccattttatttttcaacaatctaagcacatggaaaatggactcctgttttgatttgtgtagagaatcttttcattttctttttttcttttttttttttgtgacttccaagtccattaatgaaaatcacatgagataatgttgagctacttaaatatgctagtattccttgaataaatgaagcataaagctccaccagaagctatcagaacacacatttggcaagatgttaaatctgtgggagtttaaccaccttcgagtcaaag

SEQ ID NO: 154330 - DNA, 352 bp, Homo sapiens
gcttgtttattgttcttagggctggatattcgtatgttctgataagaactcaatcggctcagaaatgtcatttcttagattctactaaacgtttgtgtaggacctgtttaatgaaaacacaggttccattcagccatataaaatgacacatcacacaccacaaaaatagcccccttgttccaaaaacacagacattttacatttctacctgaagtgtacagacgctgactgaagctctgtgttgcagtgatgcgtgctgctaggattgtggctctgttttgcatttgctagccaggcttcggctttccagtcaggtattttttgttttgttgatgttgttgccgccgttggg

SEQ ID NO: 154331 - DNA, 473 bp, Homo sapiens
ttcttgtaaatattatgccagatacagcaaaaggcaaaggcacagttaaagacccggatcataatagctcagaaaatagatctgatccgggatttttttttagactaagcctgactccatttcaccccttaaacaattggctattacatcaggtcagaccatgtcctccccccattatccaaatcgctaatatttaaaactattaccatcaaatcaaaggactctagaaacaagccttcctagtcctgtgggaccctgccagatagccaaatcagacaactctaggaatgaggtttcctagcacgttgggacctgctggtgtttgttggtctacacatacattctatggaatgctttttggccaagagaggggactgaggactaagctatgattttttttatcttgcccaaattcctttctaaggggtctgggtaatcatgccctaaaaaccataaattctcatcagatgggt

SEQ ID NO: 154332 - DNA, 436 bp, Homo sapiens
actgtgttcttctctctctaaccagtgaatcacaaggtccaacctaggctgatttgcaacatcaacttttccctccttaccaccagtactcatttgggaatcttatcttttgattgtcatagtgaaagactcttctccttcctcagaaaggacccccatctctgctctggatgacaaaatctgtctaggatggtattaaaagtggctctacctctacggaactgatgtgtgattgatggcaccctacccaccttggacactcctgggttatatccccatagctaccttttccacagctctgttcagctatatatttctgagtggtattttcttttctttttttttttccactggactaactttgattttgatttgtggcattttttattatactttaagttctgggatacatgtgcagaatgtgcaggtttgttac

SEQ ID NO: 154333 - DNA, 286 bp, Homo sapiens
gcacctcaccataatacacattttaatactagccttatttctagttctattttagatacgtatcatcttttgtcatcatttttacctacttctaatttattgactgttatgttttaagcaactttaagaacaattatttgcatttgaggatgagctgtaaaatcttgattatttgatttagggtgtttgtaatatgtgaatgaaccagctgtacctgattctgtatagtcatgtaataagtatttattgatgtattcctgatggggatagaaagctttcagcaata

SEQ ID NO: 154334 - DNA, 406 bp, Homo sapiens
acacttatccccggcattttgtatttttagtagacggcatgctggccacgctggtctcaaactcctgacctcaagtgatctgcccaccttggactcctgaagggctgggactacaggcgtgagtcaccgtgcccggccatttttgtatttttaggacagcgttttttcatgttggccaggctggtctcaaactcctgacctcaagtgattcacccaccccggactcccaatatgctgggattccaggtgtgagttaccatgccccggctaccactttacttttcctgcaggctatcacagaacgtgtacaatctaggctctaatcaaccaaatcaacgtcttgccatcggagtttgctggtgaagggcacttggggtcctggaaataactgtaggctccaagccac

SEQ ID NO: 154335 - DNA, 453 bp, Homo sapiens
tttcacaatagagactggtctggctttttttccaaccgtgtggttgagaaatgtaagatgtaatactctacagtaaaatgccctttaccatcaactaagctgccagctagaaagcagcatggcccagtttagatcagcattcccccaaatctgtttccaaaacacgctagtgttctatgacattaaaaggtattactatgtaaaacataaatactagcagtatttttctctaaaaatgtactcttttaatatgccaggaagattaagggggtagacagctgtcatcatgcaacaacttgcctttaggaaacagcttaccatagcccagaatgccaggctgtggcatgaagccactcaacccacaagtgtgtgacatacattagagcactgaggcatgggagcatttaccaacagctatgatactgtgtgtgcaacatacagatcaagctgtga

SEQ ID NO: 154336 - DNA, 169 bp, Homo sapiens
ttgattcttttgcatacaaatatggctgaaaagttccaaatgcatatcagcttttttgttagactttggatatgtaagtgctttatttggttattactaaaatttcccagtgatttgtgtatttaactatttgtcttctgctttttttctccagtatactttatctatg

SEQ ID NO: 154337 - DNA, 558 bp, Homo sapiens
tatgctcattgtgaactaaggaaatggcagtgatggcatctcaaatagtggaccatggcacccgtcatgggggtatccctgctttttgtgcccattaaaggtttgccaagttcttctaaacagactcttcagcagtatagtgaccattatactacttcctcatagtgtggcttttgtaaaaaactaaaagaaaatgtcctggattgattttgtcaaaacagttacatgagaagtgtagataatgatggactctttcaaggattattcaaaccaaagtaaatactagatggcacggatggactactcaaatgtggtcagcagtactatccaatgctctacttataaaagactcctcttttggacagataacttgtagaagactgaaaagaaatatgtatacgtctgtatctatgaaatgtattgactttttttttattttttactgctttacttctggtaccattcctttattttgtcttaagaatctacactccttcatttttagttcatctagttcaggtgaagctgattttgccctagattcaaagccaaattgtg

SEQ ID NO: 154338 - DNA, 549 bp, Homo sapiens
aactcattaggcagtggttctgcacaaggaaaggaaagtctagaaggtgggctgctacactccccaccttccccacaaaatgctcagcaactacaaagggtatcactcagagacaagactgccattatccccatccccaactcaagtccccaggctctgagattttgcctaaaggaagaatcagcccataaacagataactcctaatctcttcccaaaggagctgaattcatttgcaacaaagcatagagaagttcaaacctgtctaggtgtggtggctcatgatgtaatcccagcactttgggaggccgaggcaggtagatcatttgaggtcaggagtttgagaccggcctgaccaacatggtgaaaccccgtctctctactaaaaatacaaaacaaaaattagctgggcatggtggcacatgcctgtaatctcagctacttgggaggctgaggcaggagaatcgcttgaactcaggaggtggaggttgcagtgagctgagtccacgccactgtggtacagcctaggtgacagagcgagactccgtct

SEQ ID NO: 154339 - DNA, 437 bp, Homo sapiens
tgaatgtcaatctccttcctatgggtccccatccattgctgtccacctacccaccatgcctagcctgggtgtccagcgcaacatccccagcgcggctccctcccaggtgggtccagccctcccccgtgggctctgagcagagtgaaatggctcggtgggttctgaggactgcctctgaactcgtgggttctgagcagaagaccatcctggggtctctccagccttcggggtagagtgcacagaggtccagatggagtgaggcactggccagctggaatctcagctcccctcaagccccatggacccagagtgaatcccctccctgttccggggctctgtgttctcttctgcacataggagctgcaagcctgccatgtactgttccttcagggcagctgtgagatggggttgggcaggagatgatagtatcatcctgc

SEQ ID NO: 154340 - DNA, 514 bp, Homo sapiens
ttttgtgtctcctaaatgtaatgtctcatttagcctcatttttttcatttgcttcagtttttatgtagctattgttatttctttccatcattaacacgttctcagtacagtttttcacatagggtcaaacctgttaatctgttcagtgtgaccattttccttgaggatttcctcccatgctagtgtttagaattggctgcttgctataccaggtgtgcagctatcatcctgtgttctcccttcagcatcattttggaaattcctattgcttgtctcctgtgttgattcccttgttttgtggatctcattcatttacaacacaccttccactagcttgctggaaaaaaaaaaaagtacaaaggagataaattttgagaccttgaatgtttgagaatgtctttattctaccttttttgaaaaaaaaattgataatttgtctaggtcttaagttctaatatgaaataattttttttctcagaatttggaaagaatttctccattgccttttagttta

SEQ ID NO: 154341 - DNA, 115 bp, Homo sapiens
agagcattctctgaatgtgaacacatgctctcttgtacctgctcagccctcagtccacccatccccatgcctccactacactcagccactcagcaagtctaatgtcagggtcaag

SEQ ID NO: 154342 - DNA, 668 bp, Homo sapiens
gtgaggtgaaacatgaggatatcaattggcttgcctgtatgtaatgttaattcttgcatcatctttgacatatatgccataatctgtcagccacctggtctaagcatttctggaagactatgatctgatgtactgatggtacaaaaaagtgcacaagataataagtatcatagaagcgtattggaaacaaagcagacatcatcctacagaatgttagctctttctttgttacagttcaaaaatattgtcaaggaaatggagaaattcttgagcaaagcaattaattaaaatggtcgagatggtcaaagatgtttttgaagagatagagttaaaacaaattttaaaaaaaagaaaaacaggacagtttgttaatacagagaaaggcaaagaggtgtgtttcagacatgatggaatttgataattgtgaagggacctgaagagcccaaataatactttcagccaaaggtagcattagtttttaatacattgagtaataattttagggatcttgtcatcctaacaatggcccagttcctttgcttttgaactgggatttaaaaaaccagctaatagaagtcagttcctaaaacacagcagaactttattgacttgataaaacttttcaaagtatatagtgttaagaatttagtatttcttatttttacctc

SEQ ID NO: 154343 - DNA, 207 bp, Homo sapiens
tggcttgctgctaataaatacgtgggtaaatctctgttcggggctctcggctgtgaaggctgtgagacccctcatttcccacttcacacctctatatttctgtgtgtgtctttaattcctctagcgcctctgggttagggtctcccagaccgagctggtctcagcagtgtgtacaggttttccactttctatggttcctagattgtc

SEQ ID NO: 154344 - DNA, 239 bp, Homo sapiens
tatcttgggacctaaaccaatagatcatttgtaactgttgggctttggcgttaagaaacttttgtaggcatgctcctgactcctgagaaagtgggccctgattgattagtgtgacttgggtctaggcagcccatgtgtgcatctctgtggcagttgggctgagtaaacttgctaaatacatccagctctctgtaatacctggtgtaactctttaaaacttctgtttttttctgacgtga

SEQ ID NO: 154345 - DNA, 562 bp, Homo sapiens
atgttaagaacccataaattcattttttaaaaaagtcattcatcaacttcagaggttttaaggataccagcagttaagattcgtattaaaagggagaaaaagcaagtatttttcttgtgaatttatttcatattgttaagtaaaacaaaaagaagccacaatgtagaaatgtagaatgtgaaacaagtaaagtataaaacaatcaaaacaggatataaaagaatcaaaataataggtacatacataaaaaatacatggatataaaggtagagagagggcaatgtacagagaagacatggaaaggatggccaattcacaaagttacgtctgagataagcggttagggggtggtggtggacacaatgacattttcatagttagctagtatagtattacattgtttgaatctttagtaatcagaatatgtccatttcacttgtgtaataatggaggaggaaaaagccatacaatatgaaaagaaatgtaaatggctatacatacttgaagaaataatatatgaatcattactgagacggaataaatgctgaggttatacatactt

SEQ ID NO: 154346 - DNA, 354 bp, Homo sapiens
ctagtgttaaataactttttattagaatgtcctctctattgttaagttgccacattatatgaggaaactcacttcagtttttgtgccttggtttcgttgttgtaaaatggagagaatggtacctgttttgttattccatttaaaaaatcacttgatataatataagtggcagtgcttagaaaggaataaaaatagttacaccaatgctaggtggtgtttttgtttttactaagaaagtccctgaagtcaccctgctctccccaccacatacatacacagacacacacatacacacatgtacacgtgtcaggtctaacaatgaaatacccagttaaggcattttgattccatgaa

SEQ ID NO: 154347 - DNA, 575 bp, Homo sapiens
aagatgacccaaggctttaaaaaggacagacataacctagttgaagaaagatggaaaggacattccaggcaaaaggaaacaacgcatatgcaaaggcaaaggggtgagaggaacatgatgaaaccaggacaggattttctgtgacttatctattccatctcattgctttatattccacccatttacctcatatcaagtggaatgatgcaaccccaggcatttcaggaaatttacataaccaatcatttaatctcttaaagagaaaggcattgataatgcaggctttccatgagattaagcacgttcttgagtgaaaatagaattgggtgcttataggaaaccaggtggaaagctgatgaaaatcaggcagtggatggaaaatgcaatacatttgattttctattctctttccctgggaatttgagaagttggaatcctttgccatgagggtaaataaatctatgggccctcttagcctaaagatgaaatgactgaaggaaaaaaacagggtaattctaagaatttcatgtgaggccaaggtccattttgaaacccttttgaactaaacttttgca

SEQ ID NO: 154348 - DNA, 386 bp, Homo sapiens
tgatggtcctcagctcattcctacctcccagtttttgggaggccgaggcaggtggatcacaaggtcaagagattgagaacattttggccaacatggtgaaagcccgtctctactaaaaatacaaaaatcagttgggcatggtggcacactgtagtcccagcttcttgggaagctgaggaccatcgttgaacgatggtcctcatcgcgtcgggctctgtggctaggttcaactttggcaaaagggctcatttccttaaaatctgcctccacagacttggccaaaaacataacgttcctctctgtgcccttgatggcccctgggtgctgcccgggcttccttaccttctcccagatggaagcctgcccagccctgccccggcttctgg

SEQ ID NO: 154349 - DNA, 314 bp, Homo sapiens
acttgattttattggataaaggacaaaaaagttctatcattgtgagaacagatctatgtccaccttataaaataaccccagtcatcttaatttaaacactattgattggtaacccaaatgaaaatcaaaatcaataagagaatttttttttttcagagtgggatattatagactccatcctgaaactagttttagggaataaactttccagtcatataacctaatttatgccactttttatgaatgagtgacttgggctgggagaagagatagaaagttttgacaattttgaaaatgtaggaagtgataagatg

SEQ ID NO: 154350 - DNA, 499 bp, Homo sapiens
catgcccctcagactcaaaaattaccatcccaactcagacgcaaccatccctaaggcttcatttctgagccccctttactggttctgctctaaactcgtcccactggcccctcctggacctcagcctttacctgcacacatctatttccaggagtcttgaccactgtatcccactttaatgtaaacttccagcccctgtgattcttccatactcccgatccctatgtccttccttcaggctttaaccttctccccactctcagggaatgttctatcagtctcaggcccttctataacacaggttgcattcctggcccaattctgtctccacctccagttttctcttttaaatcaaatccagctgctcctcactctccctactctgtctgtgatataaagttctcaatcagatgggatcaaattgccagtttcaagcacaattcttagaacagttatggcatttccagggtagggagagtctgaaggcagtctggagggg

SEQ ID NO: 154351 - DNA, 128 bp, Homo sapiens
ggctctggaaagatgctgggaacacccagataaataagttatggttcttgccttcaagaagtccccaggtcggccaggcgcggtggctcatgcctgtaatcccagcactttgggaggccaaggcgggc

SEQ ID NO: 154352 - DNA, 490 bp, Homo sapiens
tcttcatctactaaaaatgaaagggattaaactagacgcctgctaaggtcctctccagacggtttccttgttaatcaagtcctgctctacgcagaagttaccaactggttctgtaacctataagacactagagaaaagtctgattccaggcttaaaaattggttttttgttttggagggttttattcatgtatttatttaaagacacggtttcatctgtcactcaggcggagtgccatcatagctcaccgcagccttgaactcccaggctcgagcaatcctcccgccttagcctcttgagtagttaggactacaggtgcgctccaccacgcccggctaatttttttttttttctgtagaaacagggtcttgctatgccacccaagttggtctgaaactcttggcctcaagtgacccttccacctcagcctctcaaagtgctggaattaaaggcgtttgagtcactgggtccagtctggtttttttttttt

SEQ ID NO: 154353 - DNA, 400 bp, Homo sapiens
ggccttccctctctgactgcagtgactcatttttcagaggaggatgaaaatagaatcaacctcagaggtttgcgatgaggacccaatgatgtcatgccaaaaagtacacatggcaagccttccagaaatgtcagctattattaggacttgtacttgtcctgcagatggcaatgctaagccccattttatacgaaaagaaagtaagattctgagaaaggaccacttaggcacacaagtaaagctagcagtgtcacacaacagccccacggtcactccttcacttaaaatcctcccatagctctggcctcatttatttttctttctttgtctctttttcttttctcttttctttttttttttttttttttttttttttttggaggatagggagtatggctgt

SEQ ID NO: 154354 - DNA, 785 bp, Homo sapiens
  misc_feature (642)..(642): n is a, c, g, or t
tgatcttcctgctttggcctctcaaagtgctgagattacaggcatgagccaccacacctggccctttattacatttctacacttccttttaaacttccctttgggctgggaacagggactcacgcttgtaaactcagcactttgggaggctgaggcagacagaacacttgaggtcaggagcttgagactggcctggccaacatggtgaaatctcgtttctactaaaaatatataaattagctgggtgtggtggcatgtgcctgtaatcccaggtacttgggaggccaaggcaggagtattgcttgaacccaggaggcagaggtttgcgatgaggacccaatgatgtcatgccaaaaagtacacatggcaagccttccagaaatgtcagctattattaggacttgtacttgtcctgcagatggcaatgctaagccccattttatacgaaaagaaagtaagattctgagaaaggaccacttaggcacacaagtaaagctagcagtgtcacacaacagccccacggtcactccttcacttaaaatcctcccatagctctggcctcatttatttttctttctttgtctctttttcttttctcttttctttttttttttttttttttttttttttttaaaaaatttntttttggggcccccccccctaaattcaaaaacggggttagggttttttcttgggaaaaatttttttccctctccccgggcggggggggaaaaaaaattttcccaaagaagggttttttttctttgggggggcttggggggttc

SEQ ID NO: 154355 - DNA, 349 bp, Homo sapiens
ctcccgggtttaagtaattctcctgcctcagcctcctgagtagctgggattacaggtgcctgccaacatgcccggctaatttttgtatttttagtagagacagggtttcaccatgttggtcaggctggtctcaaactcctgacctcatgatccaaccgcctcggcctcccaaagtgctgggattacaggcatgagccaccgcacccggccccgctcctttctgtagatctgcctggttgtctcatcctgtggacatgcgagatgctcagtctagctttcatagtagggtttgagctgttatctcacctgcagtcttttctccttgcttgtctgaataccatttgctcaa

SEQ ID NO: 154356 - DNA, 660 bp, Homo sapiens
  misc_feature (446)..(446): n is a, c, g, or t
  misc_feature (478)..(478): n is a, c, g, or t
  misc_feature (487)..(487): n is a, c, g, or t
  misc_feature (500)..(500): n is a, c, g, or t
  misc_feature (506)..(506): n is a, c, g, or t
  misc_feature (511)..(511): n is a, c, g, or t
cacaagttaaagataatgcaattagataaacaagtcagtccattgatatgcagactgcaacccaaactctctgaggaattaaaaacaactctccttgtcttgcaaattgtttacaaaaataggacgtgcctctaaaagcaattcaaagcccacttattctaactaaccccaaatctcacctattcatctcaggatgccagcaaatgctgttcaacatcaggacattgaaatcagtactgtcctgcacttaagaaggaaaagccgaaataataattaccctaggcctctagtaggcaaataagccccccaaactctgtttttttgtgaaaatttacattacttctctatgcctttgagatacacattccctaactagtattacctgagaaactatcccttttaaaatgcttttaactggtgacaagaaggaagaagcctatagttanatatcccagaaatttatttgatgtttgcttgnatacatttnatatagaaagatngggatngtttnccttggatgcccctggccaatctcgtgaggcattgaactagaaacggggtgcccatctggagacatcagcgatggaaatcacacgcccgattttagcacgattccttaagatttcgtctctagtgttatcgagcccactcccttaacat

SEQ ID NO: 154357 - DNA, 531 bp, Homo sapiens
tcctttcaaggatatttacatctagaaggggaggtaagtcttcactctagtgtaaggcagaagagacagagaaattgtggcagtggggagtgtcaccaagtaggaatattaattcttgtggggagaatgaggaagtttcattaaggaggaaacatgtatagtagatatttcaggacatgtagggtttggttaggcagaaagagagggaaggggaggaaggatcccatgtggaataaaccatgttaccaggacaagagaggataggatatattagagaaatagtgaacagtcctatgtggttggagggcaggagacagtggtagttgcagtgacacatgagttggaaaggtcaccaactgccaaattatggagggccttgagtccagggtagggaatgaaggtttatttaataaagtacaggaagctactcaagatctttgcataagaaagtgaagcaatcccagctcaacagggtgtagagaatgatcaggagactgactatgccctaggtggtgtgtcctgtgtaaagta

SEQ ID NO: 154358 - DNA, 450 bp, Homo sapiens
gggaaaagagaagagaagggagggagagcaatagaaacactgaaaaggtaatgggtagaaatttctgaaaaactaagaaaaacaataaagcagcttagagaatccaacacatgataattataaatgataacacacctatatgcatcatagtaaaactgctgaaaaccaaagttaaagaaaaaactcctgaaggcagccaaagaaaagaaaaaaaagaaacattacatatagacaaaaaaaaaaagaatttcaaaagatatcttttcagaagtatataaatgagaggatactggagcaatatctttaacgtaatggtggaaaactgtcaacccagaattgaatacccacctaaaacacttcagaaaccaaagcatatagatacctttacacaagcaagagctgagaaatgtcattcccagcagattgcactgcaagaaattatttaagtag

SEQ ID NO: 154359 - DNA, 401 bp, Homo sapiens
ggtcagaggagaggattcttgggcccatgtggagagaatggcttctgatagtagggagagttccttagtggtattaaaaaggaagagagagagagcgaaggtatagatccagtaggtttgtagttttgctgaggggaagaaaagagagttcccatgtgatggcttttatattctctgtgaattgtgggacaaggccttctcctgacagtgggggcaagagaaaggagtcaagtctatagaagttttgaggagtgaagcaaaggtaagacgtgttcacaatgagtggaggaaatgaaagagtaaggtcaccaataataaatcatgaggtgggaaggcccaggggaagcttgtgaactgagttttggatgtgatgatttggaagggacattagagcatacagg

SEQ ID NO: 154360 - DNA, 522 bp, Homo sapiens
acgcaagcaatctcttgccctttttccacgttaccctttaaaataacctttgttcagtggtacatttagttaaggcatttgtattcaaatgtagcatagtatttgcagagaaattaccttttaaaacatctcaaaagtgttttctaaaatgatgaaataaacagtggggttctgtctatggtgggattgtcagtttattaggtgagtattttccaaggtcacagtttgtgaaaaaatggtgctatgtacaagtggagtttgttgggatagacaatcacttacaaagcccagatggccagaagggaattggtgttgctcctttcacttgtatggttgagcagatttgtcacatgccacaaaaccattctttgtagtcatgcttagtatgagcttgctttgttgttacggtcatgttctttccagccctgccccagctatgaattgtctaagtgtgagggagcatcagagcttcagtattgtttaaagaatgtagaaaaatacaaatttgtctaattttgaaac

SEQ ID NO: 154361 - DNA, 279 bp, Homo sapiens
tgatagattcaggctgtgcacgtttggcgggaataccacaaaagggaggttgcgtgtcctccttactgcatcatatcagaaggcacattccatctgtttgttccattactggtgattttcactgtgatcacttaaggtggtgcctgccaggtttccttagtattttctgctttgaaatgaataaatatcttatggggaagtattttaagactatatacaaattctcttaatcattaagctttcaccaactagttttaacattcattggtcatttttgtc

SEQ ID NO: 154362 - DNA, 349 bp, Homo sapiens
atattctttattcttggcctgtgcatactactgactctgaacagataggaattgtctttagggctgagttaacctgagggtcatctgtcaaagtaggactgtgttccaaacttctactaaacctaattagaccttgtgcagtgtgatacatgattattgtttagtttataacatttaaaggaaaatgttatgagaaggctggctgtggtttatttccctgtatcttctttttaacatagatcatctacagttaagtattgtagtacttagtgatggttcagagacagcaaagacacccttttacagcacttagattcccacataagactgacatgatggctcaaatatt

SEQ ID NO: 154363 - DNA, 555 bp, Homo sapiens
ccagaaactgatgtcaaactgggacctgatgtctactacctggggactaggtatccatgtgaggcttgatgttcatccgcggccagacgtccatctgatgcttgatgtccgcctcagtcctgggtgtctactggagacctcatgtccaactagagcttaggaacctactgggggcctcgtgtaaacctggggactggtatgcagctgggtcctaatgatcccctgggtcatattattcacctagtgcctggtgacacttagggcttgagtgtcaaccttaggtcttgttttcatctttgacctggtgtccacctgggacttgggtatcgacctgaggacttggtgtccaattgaggtgtcatgaccacctggggactgaatgtcaatctggagtctgatgtaaacctctagttcagtatacacctgggcatggtcttcacttggggcctgctgtctacctgggccttgctgtcaacctggggcccgatgtaaacctctagttcagtatccacctggggccagatgtcttcctagagacttatattcacttttgac

SEQ ID NO: 154364 - DNA, 2460 bp, Homo sapiens
agcaagaacgccagggacggggtctccgcgcctgcgcagtgaagctgggcgccttcggggcttgagcttctgagggtcgggtccagcgcgtgggctgctggatggcggaaccccaggcggagtcggagcccctgctgggcggggcccgcggcggtggcggcgactggccggcggggctgaccacttaccgcagcatccaagtcggccctggtgccgcggccaggtgggacctctgcattgatcaggctgtggtcttcatcgaagatgctattcagtaccgctccatcaaccaccgggtggatgccagctcgatgtggctttaccgacggtattactcgaacgtatgccaacggactttgagcttcaccatcttcttgatcctgtttttggcttttatcgagaccccatcctcactcaccagcacggcggacgtgcgctaccgcgctgccccctgggagccgccctgcggcctgaccgagagtgtcgaggtgctctgcctgctggtctttgcggccgacctctctgtgaagggttacctgttcgggtgggcccatttccagaaaaacctttggctgctgggctacctcgtggtgctggtggtgtctctggtggactggaccgtgtccctgagtctcgtgtgtcatgagcccctgcggatccgccggcttctccgtcccttcttcctgctgcagaactcctctatgatgaagaagaccttgaaatgcatccgctggtcgctgccggaaatggccagcgtcgggctgctgctggccatccacctgtgcctcttcaccatgttcggaatgctgctgttcgctggtgggaagtgatgattcctgcgtattccaagaaccgggcctatgccatcttcttcatagtcttcactgtgataggaagcctgtttctgatgaacctgctgacagccatcatctacagtcagttccggggctacctgatgaaatctctccagacctcgctgtttcggaggcggctgggaacccgggctgcctttgaagtcctatcctccatggtgggggagggaggagccttccctcaggcagttggggtgaagccccagaacttgctgcaggtgcttcagaaggtccagctggacagctcccacaaacaggccatgatggagaaggtgcgttcctacggcagtgttctgctctcagctgaggagtttcagaagctcttcaacgagcttgacagaagtgtggttaaagagcacccgccgaggcccgagtaccagtctccgtttctgcagagcgcccagttcctcttcggccactactactttgactacctggggaacctcatcgccctggcaaacctggtgtccatttgcgtgttcctggtgctggatgcagatgtgctgcctgctgagcgtgatgacttcatcctgggggctgccctggtcactctgtggaacttgatggtggtgaacaactggcaggtgtttctggatgcatatcggcgctactcaggcccgtggtccaagatctattttgtattgtggtggctggtgtcgtctgtcatctgggtcaacctgtttctggccctgattctggagaacttccttcacaagtgggacccccgcagccacctgcagccccttgctgggaccccagaggccacctaccagatgactgtggagctcctgttcagggatattctggaggagcccggggaggatgagctcacagagaggctgagccagcacccgcacctgtggctgtgcaggtgacgtccgggctgccgtcccagcaggggcggcaggagagagaggctggcctacacaggtgcccgtcatggaagaggcggccatgctgtggccagccaggcaggaagagacctttcctctgacggaccactaagctggggacaggaaccaagtcctttgcgtgtggcccaacaaccatctacagaacagctgctggtgcttcagggaggcgccgtgccctccgctttcttttatagctgcttcagtgagaattccctcgtcgactccacagggacctttcagacaaaaatgcaagaagcagcggcctcccctgtcccctgcagcttccgtggtgcctttgctgccggcagcccttggggaccacaggcctgaccagggcctgcacaggttaaccgtcagacttccggggcattcaggtggggatgctggtggtttgacatggagagaaccttgactgtgttttattatttcatggcttgtatgagtgtgactgggtgtgtttctttagggttctgattgccagttattttcatcaataagtcttgcaaagaatgggattgtcattcttcacttcagcacagttctagtcctgcttctctggagtagggttgttgagtaaggttgcttgggttgtgcattgcacaagggcacatggctgtgaggtgtatcctggcggggggctgtctacctgcagtgaggggcaccttttctgtttt

SEQ ID NO: 154365 - DNA, 5758 bp, Homo sapiens
  misc_feature (3024)..(3024): n is a, c, g, or t
  misc_feature (3029)..(3030): n is a, c, g, or t
  misc_feature (3056)..(3056): n is a, c, g, or t
  misc_feature (3059)..(3059): n is a, c, g, or t
agcaagaacgccagggacggggtctccgcgcctgcgcagtgaagctgggcgccttcggggcttgagcttctgagggtcgggtccagcgcgtgggctgctggatggcggaaccccaggcggagtcggagcccctgctgggcggggcccgcggcggtggcggcgactggccggcggggctgaccacttaccgcagcatccaagtcggccctggtgccgcggccaggtgggacctctgcattgatcaggctgtggtcttcatcgaagatgctattcagtaccgctccatcaaccaccgggtggatgccagctcgatgtggctttaccgacggtattactcgaacgtatgccaacggactttgagcttcaccatcttcttgatcctgtttttggcttttatcgagaccccatcctcactcaccagcacggcggacgtgcgctaccgcgctgccccctgggagccgccctgcggcctgaccgagagtgtcgaggtgctctgcctgctggtctttgcggccgacctctctgtgaagggttacctgttcgggtgggcccatttccagaaaaacctttggctgctgggctacctcgtggtgctggtggtgtctctggtggactggaccgtgtccctgagtctcgtgtgtcatgagcccctgcggatccgccggcttctccgtcccttcttcctgctgcagaactcctctatgatgaagaagaccttgaaatgcatccgctggtcgctgccggaaatggccagcgtcgggctgctgctggccatccacctgtgcctcttcaccatgttcggaatgctgctgttcgctggtgggaagtgatgattcctgcgtattccaagaaccgggcctatgccatcttcttcatagtcttcactgtgataggaagcctgtttctgatgaacctgctgacagccatcatctacagtcagttccggggctacctgatgaaatctctccagacctcgctgtttcggaggcggctgggaacccgggctgcctttgaagtcctatcctccatggtgggggagggaggagccttccctcaggcagttggggtgaagccccagaacttgctgcaggtgcttcagaaggtccagctggacagctcccacaaacaggccatgatggagaaggtgcgttcctacggcagtgttctgctctcagctgaggagtttcagaagctcttcaacgagcttgacagaagtgtggttaaagagcacccgccgaggcccgagtaccagtctccgtttctgcagagcgcccagttcctcttcggccactactactttgactacctggggaacctcatcgccctggcaaacctggtgtccatttgcgtgttcctggtgctggatgcagatgtgctgcctgctgagcgtgatgacttcatcctggggattctcaactgcgtcttcattgtgtactacctgttggagatgctgctcaaggtctttgccctgggcctgcgagggtacctgtcctaccccagcaacgtgtttgacgggctcctcaccgttgtcctgctggttttggagatctcaactctggctgtgtaccgattgccacacccaggctggaggccggagatggtgggcctgctgtcgctgtgggacatgacccgcatgctgaacatgctcatcgtgttccgcttcctgcgtatcatccccagcatgaagccgatggccgtggtggccagtaccgtcctgggcctggtgcagaacatgcgtgcgtttggcgggatcctggtggtggtctactacgtatttgccatcattgggatcaacttgtttagaggcgtcattgtggctcttcctggaaacagcagcctggcccctgccaatggctcggcgccctgtgggagcttcgagcagctggagtactgggccaacaacttcgatgactttgcggctgccctggtcactctgtggaacttgatggtggtgaacaactggcaggtgtttctggatgcatatcggcgctactcaggcccgtggtccaagatctattttgtattgtggtggctggtgtcgtctgtcatctgggtcaacctgtttctggccctgattctggagaacttccttcacaagtgggacccccgcagccacctgcagccccttgctgggaccccagaggccacctaccagatgactgtggagctcctgttcagggatattctggaggagcccggggaggatgagctcacagagaggctgagccagcacccgcacctgtggctgtgcaggtgacgtccgggctgccgtcccagcaggggcggcaggagagagaggctggcctacacaggtgcccgtcatggaagaggcggccatgctgtggccagccaggcaggaagagacctttcctctgacggaccactaagctggggacaggaaccaagtcctttgcgtgtggcccaacaaccatctacagaacagctgctggtgcttcagggaggcgccgtgccctccgctttcttttatagctgcttcagtgagaattccctcgtcgactccacagggacctttcagacaaaaatgcaagaagcagcggcctcccctgtcccctgcagcttccgtggtgcctttgctgccggcagcccttggggaccacaggcctgaccagggcctgcacaggttaaccgtcagacttccggggcattcagtgacccaggaggctctcacgtggagtccccagaacagcatcaactcctcacgatgctcctgacggtggtggacagactctccatgccccgatgaagttgacttgctgtgctcagatcctccattcaagagagctacagacacgggggtgctggtgagcaggagccgagaccatctggggtgggaccgaccaagagtttgaggtgtccagggggtgacgtgaagatgacctattgcagagggtcccttctcattcacgctctgaagtctgcacaggggcaggggctaccgtgctccatttcagtttggcctctgttgtacagccgagcagcagaactctatggtcactcccccgngtcanngacaatttgccacctccaccggcagncangctctgcctgaatattctcgcctgatcgtaggattgtggggagggatattctcattgatctctaaggaaaatattgttcgctttttaaaaacatgatctggtaccatttcattgatctctttaaggaagaaaaatcacatggttgtcatgagcatgtaccgacagagctaggagggccagctgttccgggttgcccagggctgtcttgtttttaaaatggaaagttcgatgtcctggaaaacccctcagtcctgggcaaaccaggtcacgctggatagaaggagttagacattcatatgatgtgccgatgtcttgccagttgtagagttttgtgtaaacctgtgtgtggcctgcgtgtccacatgggtgtgtaggatggcacctacacacatacctgaggtcacctcttggtccagtgagccagaatcctgggacttcatcatctttttttttttttttttgagatggaatctcactctgtcacccaggctggagggcagtggcgcaatcttggctcactgcaacctccgcctctggggctcaagcaattctcctgcctcagcctcccgagtagctgggattataggcgtgtgccaccacgccctgctgatttttgtattttttagtagagatggtgtttcactatattggccaggctggtcttgaactcctgacctcaagtgatctgcctgccttggcctcccgaaatgctggggttacaggcatgagctaccatgcccggcctcagaatcctgggacttctgctggagccaggggtcagaacagactcctctactgggactgcctggcagggaggacagacgctcaaggcggccccatgagaacacagccacctggaaaaatggtggaagggaagattctgccaacctcctccgactccctatctcagttacactggtccataatttcttttctttttcttaagtctgtttcattggtttctgttcctggaaaatggacacaattctgatgaattcatgtattctgcatccacgtgtcagcatctccagccttgtgacgcagtgcctggctcagaacaggcaatcaggccatggcatctgaatgaatgagagggtgtgccctggccgtatctcaggcagcagatgcattcagctgcaggtaacagacacgtagacaaacagtggcttaaaaaagagaggctttaaaagtattttgtttttctttcttcacgtagcaagaagtctggcatttggcattcccaggctgtggcgtgacagctttgtgaagttatcagggtctcagaccctgacatatttctgctctgctaccctcagcatgtagatttgatcttcacggctacaagaaacctgctgctactgcaggcatcttacacgagttccaggcaggaagagaaaggaaagggtgacagagacagaaagcaatgtccccagatacccttagttttccatctcataagccagaatgatgtcacgtggcatccctggatgcacaggaggctgagagatagtggcgtttgttagctggtctcctagccatcctgaatgccaagtttgttataaagaaacagaggcaaaatggcgatcaggcaggcaactgggtggtctctgccacgggccccttggccattctttgtaatgatggtctttgtcttggaccctattttggatatttgggcacctttgtggtacccttatgtgctggttttgctgttgtctgcccttcaggaatagcagctgagtcaagctgtccttggctgctccaatctggagtcagaggttggagatttccatggctccccatggctccttggggcctcctaagaaaatgttttaataaggaagtccaaggctgagacagacatgctccttcttagagacacatgggaacatgcctctgctcacagctggtagccacagatgtaaaccgtagcccatggaacggagacagtgaagaattgatggataaatgaataatgatgatggacagcagatgtataaaaggcataaaaggatagtgttagggctggaatgtcttccccccaattcatatgttgaacctttaatgcctaatacttcagaaagagactgtgtttgaagatatggtctttacagagggaataaagttaaaataaggtcattagggtgagccctaatccaaaggatgggtgtcctaatcagaggaggagattaggacccagacacacacacacacacagagccaggtgaggacacagggagaaaatggccacgtacaagccaagatgagaggactcaggaagaaccagccgactccacccttcaaaactgtgagaacatagatgtctgctgtttgagccaccctgtctgcaagcagtcagcaagcattcattgagtgcttgcagtattcaaggcaccacagatacaatgttgaataaggcaaagcacctgccctcaggtagcttgcagtcagggaggtaagggtagtgggcagagagacctggaaacagatattagacctgcactaagcatgtgtggttattgaacagtaaaaatgccaccacaaattgcgatatgatgtaagtaaaatgcgtactggctattgaagacttggcacagaaaaataatgtaaaatctcattagtaatggttttatattgattacgcattgaaataatactattttggacagattgggttaaataaaatattaaatttgaat

SEQ ID NO: 154366 - DNA, 2840 bp, Homo sapiens
agcaagaacgccagggacggggtctccgcgcctgcgcagtgaagctgggcgccttcggggcttgagcttctgagggtcgggtccagcgcgtgggctgctggatggcggaaccccaggcggagtcggagcccctgctgggcggggcccgcggcggtggcggcgactggccggcggggctgaccacttaccgcagcatccaagtcggccctggtgccgcggccaggtgggacctctgcattgatcaggctgtggtcttcatcgaagatgctattcagtaccgctccatcaaccaccgggtggatgccagctcgatgtggctttaccgacggtattactcgaacgtatgccaacggactttgagcttcaccatcttcttgatcctgtttttggcttttatcgagaccccatcctcactcaccagcacggcggacgtgcgctaccgcgctgccccctgggagccgccctgcggcctgaccgagagtgtcgaggtgctctgcctgctggtctttgcggccgacctctctgtgaagggttacctgttcgggtgggcccatttccagaaaaacctttggctgctgggctacctcgtggtgctggtggtgtctctggtggactggaccgtgtccctgagtctcgtgtgtcatgagcccctgcggatccgccggcttctccgtcccttcttcctgctgcagaactcctctatgatgaagaagaccttgaaatgcatccgctggtcgctgccggaaatggccagcgtcgggctgctgctggccatccacctgtgcctcttcaccatgttcggaatgctgctgttcgctggtgggaagcaggatgatgggcaggacagggagaggctgacctacttccagaacctgcctgagtctctgacttccctcctggtgctgctgaccacggcaacaaccccgatgtgatgattcctgcgtattccaagaaccgggcctatgccatcttcttcatagtcttcactgtgataggaagcctgtttctgatgaacctgctgacagccatcatctacagtcagttccggggctacctgatgaaatctctccagacctcgctgtttcggaggcggctgggaacccgggctgcctttgaagtcctatcctccatggtgggggagggaggagccttccctcaggcagttggggtgaagccccagaacttgctgcaggtgcttcagaaggtccagctggacagctcccacaaacaggccatgatggagaaggtgcgttcctacggcagtgttctgctctcagctgaggagtttcagaagctcttcaacgagcttgacagaagtgtggttaaagagcacccgccgaggcccgagtaccagtctccgtttctgcagagcgcccagttcctcttcggccactactactttgactacctggggaacctcatcgccctggcaaacctggtgtccatttgcgtgttcctggtgctggatgcagatgtgctgcctgctgagcgtgatgacttcatcctggggattctcaactgcgtcttcattgtgtactacctgttggagatgctgctcaaggtctttgccctgggcctgcgagggtacctgtcctaccccagcaacgtgtttgacgggctcctcaccgttgtcctgctgccgatggccgtggtggccagtaccgtcctgggcctggtgcagaacatgcgtgcgtttggcgggatcctggtggtggtctactacgtatttgccatcattgggatcaacttgtttagaggcgtcattgtggctcttcctggaaacagcagcctggcccctgccaatggctcggcgccctgtgggagcttcgagcagctggagtactgggccaacaacttcgatgactttgcggctgccctggtcactctgtggaacttgatggtggtgaacaactggcaggtgtttctggatgcatatcggcgctactcaggcccaacttccttcacaagtgggacccccgcagccacctgcagccccttgctgggaccccagaggccacctaccagatgactgtggagctcctgttcagggatattctggaggagcccggggaggatgagctcacagagaggctgagccagcacccgcacctgtggctgtgcaggtgacgtccgggctgccgtcccagcaggggcggcaggagagagaggctggcctacacaggtgcccgtcatggaagaggcggccatgctgtggccagccaggcaggaagagacctttcctctgacggaccactaagctggggacaggaaccaagtcctttgcgtgtggcccaacaaccatctacagaacagctgctggtgcttcagggaggcgccgtgccctccgctttcttttatagctgcttcagtgagaattccctcgtcgactccacagggacctttcagacaaaaatgcaagaagcagcggcctcccctgtcccctgcagcttccgtggtgcctttgctgccggcagcccttggggaccacaggcctgaccagggcctgcacaggttaaccgtcagacttccggggcattcaggtggggatgctggtggtttgacatggagagaaccttgactgtgttttattatttcatggcttgtatgagtgtgactgggtgtgtttctttagggttctgattgccagttattttcatcaataagtcttgcaaagaatgggattgtcattcttcacttcagcacagttctagtcctgcttctctggagtagggttgttgagtaaggttgcttgggttgtgcattgcacaagggcacatggctgtgaggtgtatcctggcggggggctgtctacctgcagtgaggggcaccttttctgtttt

SEQ ID NO: 154367 - DNA, 1066 bp, Homo sapiens
agcaagaacgccagggacggggtctccgcgcctgcgcagtgaagctgggcgccttcggggcttgagcttctgagggtcgggtccagcgcgtgggctgctggatggcggaaccccaggcggagtcggagcccctgctgggcggggcccgcggcggtggcggcgactggccggcggggctgaccacttaccgcagcatccaagtcggccctggtgccgcggccaggtgggacctctgcattgatcaggctgtggtcttcatcgaagatgctattcagtaccgctccatcaaccaccgggtggatgccagctcgatgtggctttaccgacggtattactcgaacgtatgccaacggactttgagcttcaccatcttcttgatcctgtttttggcttttatcgagaccccatcctcactcaccagcacggcggacgtgcgctaccgcgctgccccctgggagccgccctgcggcctgaccgagagtgtcgaggtgctctgcctgctggtctttgcggccgacctctctgtgaagggttacctgttcgggtgggcccatttccagaaaaacctttggctgctgggctacctcgtggtgctggtggtgtctctggtggactggaccgtgtccctgagtctcgtgtgtcatgagcccctgcggatccgccggcttctccgtcccttcttcctgctgcagaactcctctatgatgaagaagaccttgaaatgcatccgctggtcgctgccggaaatggccagcgtcgggctgctgctggccatccacctgtgcctcttcaccatgttcggaatgctgctgttcgctggtgggaagcaggatgatgggcaggacagggagaggctgacctacttccagaacctgcctgagtctctgacttccctcctggtgctgctgaccacggcaacaaccccgatgtgatgattcctgcgtattccaagaaccgggcctatgccatcttcttcatagtcttcactgtgataggccatgtttccatttgataggggacgcccccggcgctgtgctatcctgtgccggccacccttgcgttggtt

SEQ ID NO: 154368 - DNA, 450 bp, Homo sapiens
gtgagaacgcacccatgtggaactcagggttcctgccggcttgcgtggcaggggaggctggcccccacctggggatcacctggtctcagggtccaggcaggctccccactacatagatagggcggttaccatcatcctctctggaaaggagacggcctgtgatggcaggctccttctacaacaagggttcctttctggaatgctgtggtcagccctcggcaatggagctttgagcagattcgtgatctccccagtcacgagtgtccacgctcaggcagcgccaactcccgtgcttcggactggggaagctcctgaccagcctctgggccctgagggctgctggctcctgtgttttcatgtttctgtcccctttccaggactttgagcttcaccatcttcttgatcctgtttttggcttttatcgagaccccatcctcactcaccagcacg

SEQ ID NO: 154369 - DNA, 160 bp, Homo sapiens
tcaggatgggagtgggatcaggtactgagcttgtcagtttctgttatttcttttttcttttagtgatgattcctgcgtattccaagaaccgggcctatgccatcttcttcatagtcttcactgtgataggtgagtgcaggtaacgtggccagcattttgt

SEQ ID NO: 154370 - DNA, 653 bp, Homo sapiens
agcaagaacgccagggacggggtctccgcgcctgcgcagtgaagctgggcgccttcggggcttgagcttctgagggtcgggtccagcgcgtgggctgctggatggcggaaccccaggcggagtcggagcccctgctgggcggggcccgcggcggtggcggcgactggccggcggggctgaccacttaccgcagcatccaagtcggccctggtgccgcggccaggtgggacctctgcattgatcaggctgtggtcttcatcgaagatgctattcagggttacctgttcgggtgggcccatttccagaaaaacctttggctgctgggctacctcgtggtgctggtggtgtctctggtggactggaccgtgtccctgagtctcgtgtgtcatgagcccctgcggatccgccggcttctccgtcccttcttcctgctgcagaactcctctatgatgaagaagaccttgaaatgcatccgctggtcgctgccggaaatggccagcgtcgggctgctgctggccatccacctgtgcctcttcaccatgttcggaatgctgctgttcgctggtgggaaggtagggcacccgtggtcagggtctgggaatggggctgccctgtgctgtgactaacagagggggctgggctggtgtctgctg

SEQ ID NO: 154371 - DNA, 5860 bp, Homo sapiens
  misc_feature (3126)..(3126): n is a, c, g, or t
  misc_feature (3131)..(3132): n is a, c, g, or t
  misc_feature (3158)..(3158): n is a, c, g, or t
  misc_feature (3161)..(3161): n is a, c, g, or t
agcaagaacgccagggacggggtctccgcgcctgcgcagtgaagctgggcgccttcggggcttgagcttctgagggtcgggtccagcgcgtgggctgctggatggcggaaccccaggcggagtcggagcccctgctgggcggggcccgcggcggtggcggcgactggccggcggggctgaccacttaccgcagcatccaagtcggccctggtgccgcggccaggtgggacctctgcattgatcaggctgtggtcttcatcgaagatgctattcagtaccgctccatcaaccaccgggtggatgccagctcgatgtggctttaccgacggtattactcgaacgtatgccaacggactttgagcttcaccatcttcttgatcctgtttttggcttttatcgagaccccatcctcactcaccagcacggcggacgtgcgctaccgcgctgccccctgggagccgccctgcggcctgaccgagagtgtcgaggtgctctgcctgctggtctttgcggccgacctctctgtgaagggttacctgttcgggtgggcccatttccagaaaaacctttggctgctgggctacctcgtggtgctggtggtgtctctggtggactggaccgtgtccctgagtctcgtgtgtcatgagcccctgcggatccgccggcttctccgtcccttcttcctgctgcagaactcctctatgatgaagaagaccttgaaatgcatccgctggtcgctgccggaaatggccagcgtcgggctgctgctggccatccacctgtgcctcttcaccatgttcggaatgctgctgttcgctggtgggaagcaggatgatgggcaggacagggagaggctgacctacttccagaacctgcctgagtctctgacttccctcctggtgctgctgaccacggcaacaaccccgatgtgatgattcctgcgtattccaagaaccgggcctatgccatcttcttcatagtcttcactgtgataggaagcctgtttctgatgaacctgctgacagccatcatctacagtcagttccggggctacctgatgaaatctctccagacctcgctgtttcggaggcggctgggaacccgggctgcctttgaagtcctatcctccatggtgggggagggaggagccttccctcaggcagttggggtgaagccccagaacttgctgcaggtgcttcagaaggtccagctggacagctcccacaaacaggccatgatggagaaggtgcgttcctacggcagtgttctgctctcagctgaggagtttcagaagctcttcaacgagcttgacagaagtgtggttaaagagcacccgccgaggcccgagtaccagtctccgtttctgcagagcgcccagttcctcttcggccactactactttgactacctggggaacctcatcgccctggcaaacctggtgtccatttgcgtgttcctggtgctggatgcagatgtgctgcctgctgagcgtgatgacttcatcctggggattctcaactgcgtcttcattgtgtactacctgttggagatgctgctcaaggtctttgccctgggcctgcgagggtacctgtcctaccccagcaacgtgtttgacgggctcctcaccgttgtcctgctggttttggagatctcaactctggctgtgtaccgattgccacacccaggctggaggccggagatggtgggcctgctgtcgctgtgggacatgacccgcatgctgaacatgctcatcgtgttccgcttcctgcgtatcatccccagcatgaagccgatggccgtggtggccagtaccgtcctgggcctggtgcagaacatgcgtgcgtttggcgggatcctggtggtggtctactacgtatttgccatcattgggatcaacttgtttagaggcgtcattgtggctcttcctggaaacagcagcctggcccctgccaatggctcggcgccctgtgggagcttcgagcagctggagtactgggccaacaacttcgatgactttgcggctgccctggtcactctgtggaacttgatggtggtgaacaactggcaggtgtttctggatgcatatcggcgctactcaggcccgtggtccaagatctattttgtattgtggtggctggtgtcgtctgtcatctgggtcaacctgtttctggccctgattctggagaacttccttcacaagtgggacccccgcagccacctgcagccccttgctgggaccccagaggccacctaccagatgactgtggagctcctgttcagggatattctggaggagcccggggaggatgagctcacagagaggctgagccagcacccgcacctgtggctgtgcaggtgacgtccgggctgccgtcccagcaggggcggcaggagagagaggctggcctacacaggtgcccgtcatggaagaggcggccatgctgtggccagccaggcaggaagagacctttcctctgacggaccactaagctggggacaggaaccaagtcctttgcgtgtggcccaacaaccatctacagaacagctgctggtgcttcagggaggcgccgtgccctccgctttcttttatagctgcttcagtgagaattccctcgtcgactccacagggacctttcagacaaaaatgcaagaagcagcggcctcccctgtcccctgcagcttccgtggtgcctttgctgccggcagcccttggggaccacaggcctgaccagggcctgcacaggttaaccgtcagacttccggggcattcagtgacccaggaggctctcacgtggagtccccagaacagcatcaactcctcacgatgctcctgacggtggtggacagactctccatgccccgatgaagttgacttgctgtgctcagatcctccattcaagagagctacagacacgggggtgctggtgagcaggagccgagaccatctggggtgggaccgaccaagagtttgaggtgtccagggggtgacgtgaagatgacctattgcagagggtcccttctcattcacgctctgaagtctgcacaggggcaggggctaccgtgctccatttcagtttggcctctgttgtacagccgagcagcagaactctatggtcactcccccgngtcanngacaatttgccacctccaccggcagncangctctgcctgaatattctcgcctgatcgtaggattgtggggagggatattctcattgatctctaaggaaaatattgttcgctttttaaaaacatgatctggtaccatttcattgatctctttaaggaagaaaaatcacatggttgtcatgagcatgtaccgacagagctaggagggccagctgttccgggttgcccagggctgtcttgtttttaaaatggaaagttcgatgtcctggaaaacccctcagtcctgggcaaaccaggtcacgctggatagaaggagttagacattcatatgatgtgccgatgtcttgccagttgtagagttttgtgtaaacctgtgtgtggcctgcgtgtccacatgggtgtgtaggatggcacctacacacatacctgaggtcacctcttggtccagtgagccagaatcctgggacttcatcatctttttttttttttttttgagatggaatctcactctgtcacccaggctggagggcagtggcgcaatcttggctcactgcaacctccgcctctggggctcaagcaattctcctgcctcagcctcccgagtagctgggattataggcgtgtgccaccacgccctgctgatttttgtattttttagtagagatggtgtttcactatattggccaggctggtcttgaactcctgacctcaagtgatctgcctgccttggcctcccgaaatgctggggttacaggcatgagctaccatgcccggcctcagaatcctgggacttctgctggagccaggggtcagaacagactcctctactgggactgcctggcagggaggacagacgctcaaggcggccccatgagaacacagccacctggaaaaatggtggaagggaagattctgccaacctcctccgactccctatctcagttacactggtccataatttcttttctttttcttaagtctgtttcattggtttctgttcctggaaaatggacacaattctgatgaattcatgtattctgcatccacgtgtcagcatctccagccttgtgacgcagtgcctggctcagaacaggcaatcaggccatggcatctgaatgaatgagagggtgtgccctggccgtatctcaggcagcagatgcattcagctgcaggtaacagacacgtagacaaacagtggcttaaaaaagagaggctttaaaagtattttgtttttctttcttcacgtagcaagaagtctggcatttggcattcccaggctgtggcgtgacagctttgtgaagttatcagggtctcagaccctgacatatttctgctctgctaccctcagcatgtagatttgatcttcacggctacaagaaacctgctgctactgcaggcatcttacacgagttccaggcaggaagagaaaggaaagggtgacagagacagaaagcaatgtccccagatacccttagttttccatctcataagccagaatgatgtcacgtggcatccctggatgcacaggaggctgagagatagtggcgtttgttagctggtctcctagccatcctgaatgccaagtttgttataaagaaacagaggcaaaatggcgatcaggcaggcaactgggtggtctctgccacgggccccttggccattctttgtaatgatggtctttgtcttggaccctattttggatatttgggcacctttgtggtacccttatgtgctggttttgctgttgtctgcccttcaggaatagcagctgagtcaagctgtccttggctgctccaatctggagtcagaggttggagatttccatggctccccatggctccttggggcctcctaagaaaatgttttaataaggaagtccaaggctgagacagacatgctccttcttagagacacatgggaacatgcctctgctcacagctggtagccacagatgtaaaccgtagcccatggaacggagacagtgaagaattgatggataaatgaataatgatgatggacagcagatgtataaaaggcataaaaggatagtgttagggctggaatgtcttccccccaattcatatgttgaacctttaatgcctaatacttcagaaagagactgtgtttgaagatatggtctttacagagggaataaagttaaaataaggtcattagggtgagccctaatccaaaggatgggtgtcctaatcagaggaggagattaggacccagacacacacacacacacagagccaggtgaggacacagggagaaaatggccacgtacaagccaagatgagaggactcaggaagaaccagccgactccacccttcaaaactgtgagaacatagatgtctgctgtttgagccaccctgtctgcaagcagtcagcaagcattcattgagtgcttgcagtattcaaggcaccacagatacaatgttgaataaggcaaagcacctgccctcaggtagcttgcagtcagggaggtaagggtagtgggcagagagacctggaaacagatattagacctgcactaagcatgtgtggttattgaacagtaaaaatgccaccacaaattgcgatatgatgtaagtaaaatgcgtactggctattgaagacttggcacagaaaaataatgtaaaatctcattagtaatggttttatattgattacgcattgaaataatactattttggacagattgggttaaataaaatattaaatttgaat

SEQ ID NO: 154372 - DNA, 5605 bp, Homo sapiens
  misc_feature (2871)..(2871): n is a, c, g, or t
  misc_feature (2876)..(2877): n is a, c, g, or t
  misc_feature (2903)..(2903): n is a, c, g, or t
  misc_feature (2906)..(2906): n is a, c, g, or t
agcaagaacgccagggacggggtctccgcgcctgcgcagtgaagctgggcgccttcggggcttgagcttctgagggtcgggtccagcgcgtgggctgctggatggcggaaccccaggcggagtcggagcccctgctgggcggggcccgcggcggtggcggcgactggccggcggggctgaccacttaccgcagcatccaagtcggccctggtgccgcggccaggtgggacctctgcattgatcaggctgtggtcttcatcgaagatgctattcagggttacctgttcgggtgggcccatttccagaaaaacctttggctgctgggctacctcgtggtgctggtggtgtctctggtggactggaccgtgtccctgagtctcgtgtgtcatgagcccctgcggatccgccggcttctccgtcccttcttcctgctgcagaactcctctatgatgaagaagaccttgaaatgcatccgctggtcgctgccggaaatggccagcgtcgggctgctgctggccatccacctgtgcctcttcaccatgttcggaatgctgctgttcgctggtgggaagcaggatgatgggcaggacagggagaggctgacctacttccagaacctgcctgagtctctgacttccctcctggtgctgctgaccacggcaacaaccccgatgtgatgattcctgcgtattccaagaaccgggcctatgccatcttcttcatagtcttcactgtgataggaagcctgtttctgatgaacctgctgacagccatcatctacagtcagttccggggctacctgatgaaatctctccagacctcgctgtttcggaggcggctgggaacccgggctgcctttgaagtcctatcctccatggtgggggagggaggagccttccctcaggcagttggggtgaagccccagaacttgctgcaggtgcttcagaaggtccagctggacagctcccacaaacaggccatgatggagaaggtgcgttcctacggcagtgttctgctctcagctgaggagtttcagaagctcttcaacgagcttgacagaagtgtggttaaagagcacccgccgaggcccgagtaccagtctccgtttctgcagagcgcccagttcctcttcggccactactactttgactacctggggaacctcatcgccctggcaaacctggtgtccatttgcgtgttcctggtgctggatgcagatgtgctgcctgctgagcgtgatgacttcatcctggggattctcaactgcgtcttcattgtgtactacctgttggagatgctgctcaaggtctttgccctgggcctgcgagggtacctgtcctaccccagcaacgtgtttgacgggctcctcaccgttgtcctgctggttttggagatctcaactctggctgtgtaccgattgccacacccaggctggaggccggagatggtgggcctgctgtcgctgtgggacatgacccgcatgctgaacatgctcatcgtgttccgcttcctgcgtatcatccccagcatgaagccgatggccgtggtggccagtaccgtcctgggcctggtgcagaacatgcgtgcgtttggcgggatcctggtggtggtctactacgtatttgccatcattgggatcaacttgtttagaggcgtcattgtggctcttcctggaaacagcagcctggcccctgccaatggctcggcgccctgtgggagcttcgagcagctggagtactgggccaacaacttcgatgactttgcggctgccctggtcactctgtggaacttgatggtggtgaacaactggcaggtgtttctggatgcatatcggcgctactcaggcccgtggtccaagatctattttgtattgtggtggctggtgtcgtctgtcatctgggtcaacctgtttctggccctgattctggagaacttccttcacaagtgggacccccgcagccacctgcagccccttgctgggaccccagaggccacctaccagatgactgtggagctcctgttcagggatattctggaggagcccggggaggatgagctcacagagaggctgagccagcacccgcacctgtggctgtgcaggtgacgtccgggctgccgtcccagcaggggcggcaggagagagaggctggcctacacaggtgcccgtcatggaagaggcggccatgctgtggccagccaggcaggaagagacctttcctctgacggaccactaagctggggacaggaaccaagtcctttgcgtgtggcccaacaaccatctacagaacagctgctggtgcttcagggaggcgccgtgccctccgctttcttttatagctgcttcagtgagaattccctcgtcgactccacagggacctttcagacaaaaatgcaagaagcagcggcctcccctgtcccctgcagcttccgtggtgcctttgctgccggcagcccttggggaccacaggcctgaccagggcctgcacaggttaaccgtcagacttccggggcattcagtgacccaggaggctctcacgtggagtccccagaacagcatcaactcctcacgatgctcctgacggtggtggacagactctccatgccccgatgaagttgacttgctgtgctcagatcctccattcaagagagctacagacacgggggtgctggtgagcaggagccgagaccatctggggtgggaccgaccaagagtttgaggtgtccagggggtgacgtgaagatgacctattgcagagggtcccttctcattcacgctctgaagtctgcacaggggcaggggctaccgtgctccatttcagtttggcctctgttgtacagccgagcagcagaactctatggtcactcccccgngtcanngacaatttgccacctccaccggcagncangctctgcctgaatattctcgcctgatcgtaggattgtggggagggatattctcattgatctctaaggaaaatattgttcgctttttaaaaacatgatctggtaccatttcattgatctctttaaggaagaaaaatcacatggttgtcatgagcatgtaccgacagagctaggagggccagctgttccgggttgcccagggctgtcttgtttttaaaatggaaagttcgatgtcctggaaaacccctcagtcctgggcaaaccaggtcacgctggatagaaggagttagacattcatatgatgtgccgatgtcttgccagttgtagagttttgtgtaaacctgtgtgtggcctgcgtgtccacatgggtgtgtaggatggcacctacacacatacctgaggtcacctcttggtccagtgagccagaatcctgggacttcatcatctttttttttttttttttgagatggaatctcactctgtcacccaggctggagggcagtggcgcaatcttggctcactgcaacctccgcctctggggctcaagcaattctcctgcctcagcctcccgagtagctgggattataggcgtgtgccaccacgccctgctgatttttgtattttttagtagagatggtgtttcactatattggccaggctggtcttgaactcctgacctcaagtgatctgcctgccttggcctcccgaaatgctggggttacaggcatgagctaccatgcccggcctcagaatcctgggacttctgctggagccaggggtcagaacagactcctctactgggactgcctggcagggaggacagacgctcaaggcggccccatgagaacacagccacctggaaaaatggtggaagggaagattctgccaacctcctccgactccctatctcagttacactggtccataatttcttttctttttcttaagtctgtttcattggtttctgttcctggaaaatggacacaattctgatgaattcatgtattctgcatccacgtgtcagcatctccagccttgtgacgcagtgcctggctcagaacaggcaatcaggccatggcatctgaatgaatgagagggtgtgccctggccgtatctcaggcagcagatgcattcagctgcaggtaacagacacgtagacaaacagtggcttaaaaaagagaggctttaaaagtattttgtttttctttcttcacgtagcaagaagtctggcatttggcattcccaggctgtggcgtgacagctttgtgaagttatcagggtctcagaccctgacatatttctgctctgctaccctcagcatgtagatttgatcttcacggctacaagaaacctgctgctactgcaggcatcttacacgagttccaggcaggaagagaaaggaaagggtgacagagacagaaagcaatgtccccagatacccttagttttccatctcataagccagaatgatgtcacgtggcatccctggatgcacaggaggctgagagatagtggcgtttgttagctggtctcctagccatcctgaatgccaagtttgttataaagaaacagaggcaaaatggcgatcaggcaggcaactgggtggtctctgccacgggccccttggccattctttgtaatgatggtctttgtcttggaccctattttggatatttgggcacctttgtggtacccttatgtgctggttttgctgttgtctgcccttcaggaatagcagctgagtcaagctgtccttggctgctccaatctggagtcagaggttggagatttccatggctccccatggctccttggggcctcctaagaaaatgttttaataaggaagtccaaggctgagacagacatgctccttcttagagacacatgggaacatgcctctgctcacagctggtagccacagatgtaaaccgtagcccatggaacggagacagtgaagaattgatggataaatgaataatgatgatggacagcagatgtataaaaggcataaaaggatagtgttagggctggaatgtcttccccccaattcatatgttgaacctttaatgcctaatacttcagaaagagactgtgtttgaagatatggtctttacagagggaataaagttaaaataaggtcattagggtgagccctaatccaaaggatgggtgtcctaatcagaggaggagattaggacccagacacacacacacacacagagccaggtgaggacacagggagaaaatggccacgtacaagccaagatgagaggactcaggaagaaccagccgactccacccttcaaaactgtgagaacatagatgtctgctgtttgagccaccctgtctgcaagcagtcagcaagcattcattgagtgcttgcagtattcaaggcaccacagatacaatgttgaataaggcaaagcacctgccctcaggtagcttgcagtcagggaggtaagggtagtgggcagagagacctggaaacagatattagacctgcactaagcatgtgtggttattgaacagtaaaaatgccaccacaaattgcgatatgatgtaagtaaaatgcgtactggctattgaagacttggcacagaaaaataatgtaaaatctcattagtaatggttttatattgattacgcattgaaataatactattttggacagattgggttaaataaaatattaaatttgaat

SEQ ID NO: 154373 - DNA, 1758 bp, Homo sapiens
agcaagaacgccagggacggggtctccgcgcctgcgcagtgaagctgggcgccttcggggcttgagcttctgagggtcgggtccagcgcgtgggctgctggatggcggaaccccaggcggagtcggagcccctgctgggcggggcccgcggcggtggcggcgactggccggcggggctgaccacttaccgcagcatccaagtcggccctggtgccgcggccaggtgggacctctgcattgatcaggctgtggtcttcatcgaagatgctattcagtaccgctccatcaaccaccgggtggatgccagctcgatgtggctttaccgacggtattactcgaacgtatgccaacggactttgagcttcaccatcttcttgatcctgtttttggcttttatcgagaccccatcctcactcaccagcacggcggacgtgcgctaccgcgctgccccctgggagccgccctgcggcctgaccgagagtgtcgaggtgctctgcctgctggtctttgcggccgacctctctgtgaagggttacctgttcgggtgggcccatttccagaaaaacctttggctgctgggctacctcgtggtgctggtggtgtctctggtggactggaccgtgtccctgagtctcgtgtgtcatgagcccctgcggatccgccggcttctccgtcccttcttcctgctgcagaactcctctatgatgaagaagaccttgaaatgcatccgctggtcgctgccggaaatggccagcgtcgggctgctgctggccatccacctgtgcctcttcaccatgttcggaatgctgctgttcgctggtgggaagcaggatgatgggcaggacagggagaggctgacctacttccagaacctgcctgagtctctgacttccctcctggtgctgctgaccacggcaacaaccccgatgtgatgattcctgcgtattccaagaaccgggcctatgccatcttcttcatagtcttcactgtgataggaagcctgtttctgatgaacctgctgacagccatcatctacagtcagttccggggctacctgatgaaatctctccagacctcgctgtttcggaggcggctgggaacccgggctgcctttgaagtcctatcctccatggtgggggagggaggagccttccctcaggcagttggggtgaagccccagaacttgctgcaggtgcttcagaaggtccagctggacagctcccacaaacaggccatgatggagaaggtgcgttcctacggcagtgttctgctctcagctgaggagtttcagaagctcttcaacgagcttgacagaagtgtggttaaagagcacccgccgaggcccgagtaccagtctccgtttctgcagagcgcccagttcctcttcggccactactactttgactacctggggaacctcatcgccctggcaaacctggtgtccatttgcgtgttcctggtgctggatgcagatgtgctgcctgctgagcgtgatgacttcatcctggggattctcaactgcgtcttcattgtgtactacctgttggagatgctgctcaaggtctttgccctgggcctgcgagggtacctgtcctaccccagcaacgtgtttgacgggctcctcaccgttgtcctgctgctgaaagaagtcctgacatctggaaccaacccgtggggtccaggaccaagctctgatttctccccaaaagccccttttggggagaatgtgttagagatgagctttataataattccttt

SEQ ID NO: 154374 - DNA, 233 bp, Homo sapiens
aattgagagaggctttctggtgataaaatttgaactgatttctggagaatgggtttaattccaatagggggagatggaccaaatttaattttgatgagggaaatgtcttgagcaaaatctagaaaaggaaaatatgcccattttaagttttaatgagtggtccagttggggtacagtgcaagaagagagttctagtgaaaaggtagttggtctgataggtgagggtcttgcag

SEQ ID NO: 154375 - DNA, 205 bp, Homo sapiens
accaccaggcccatcttctccagaatgaaacccccctgagggtcctgcccttggtgggccaccttcactctcatacagagaacagaggggctcagcttgttaaggaaacttcccttaacacctctcaccacattgcagattctcaaagagactgggaattgagcttatcacccctccccaagatgtagattctgtcccccaactc

SEQ ID NO: 154376 - DNA, 315 bp, Homo sapiens
cggtccccaagaagacactctggatatatctgagtcaagtgattagaggctttttccctccttcacatactgctctctgactgagatgtgatctgtgcagttaactttgctgcctcctttccactgttgggtatttttgtccttttcttttgtttctttttttttttttttttttgagatggagttttgctcttgttgcccaggctggagtgcagtggtgcgatcttggttcactgtaacctctgcctctgggttcaagcaattctcctgtgtcagcctcctgagtagctgggattacaggcgcccaccaccacg

SEQ ID NO: 154377 - DNA, 746 bp, Homo sapiens
tagtttcagcctcatttttcccggctcctatttaagatggagttgctctggttcacacacctctgacatgatcattgcccactgcggcttccacctcccgggttcaagagatcctcctgcctcaccctcccaaggtgctgggactacaggtgtgtgccaccagctcagctaatttttgtattttttgtagagatggtgtttttccatgttgcccaggctggtctcaaactcctgggctcaagcaatccttctgtctcagcctcccaaagtactgggattacaggcatgtcccaccatgcccagactaatatttacttttaatcagactaagatagggttactacttgagttgctatggctccagctgaaagaaagcccgtgcagtcatatcacgcgtaaacatttgctttatgctaaaaatatggtggacctggcattacagctattacaaatctcctaagatgtctcgggtagtgtattagttacttttcatactgctatgaagaaatactggaaactgggtaatttataaagaaaaagaggtttaatgtactcacagttccacaaggctggagaggcctcagaatcatggtggaaggcaaagaaggagcaaaaaggtatgtcttccatggcagcaggcaagagagcacgtgcagggaaactgccctttataaaaccatcagatttagtgagatgtattcactatcacgagaacagtatgggaaaaacctgcccccatgattcga

SEQ ID NO: 154378 - DNA, 507 bp, Homo sapiens
aattaattgcttatgatgtattttcaggtcagaatttgagttataaaggtcatagagatcatctaatataattatcatcattctcaagatgaggaaaagttttcttagaaacattatttggcatttgtttctacttggataaaatatagcatgcatattaaaactattttcctttgctgtgctatgcccaaatggaataacataacttagtgctaaagatgttttatgactagtttactcaaatttttattatctgtacctcttatttgatacaggtaaatttaacagattgggaagactaatatcatttggctattgattacttatagaaagttattctcaaagtcttttggaacttttacttcttatattagaaatcatattttcttataaatactgactttaatgctaatgtaatgatagttgtaggaatattacaaataacagtttagtactcatgagagaagtaattcgtctgtctttcactgattaacaaaatttaagggc

SEQ ID NO: 154379 - DNA, 474 bp, Homo sapiens
tgataaaaaataaatgaataatgaaggacaaaaagaagcttagtatgagtcatatacaggaaacaaaattcaaatattcaaatgtgataggaaagtgtggaagacaattctctaatcctattgaaatttaaaaacagggaacagtatttgtgaaaagaggaaattactcagagaaaacttcaggtagaaaactagtatacaccagggcttcaaagggtactagatgaaatttgaccaaaagagcaaaaaatactctaggtagaacatcaacatcccaataaaggcacagaaagatacttattaaagacaagtatagtaaattgcaaggttaaagagtttggattccttggtgtggtagctcacgcctgtaatcccagcactttgggaggccaaggtgggtggatcacttgagcccaggagtttgagtccagcatgggtaacatagcgagaccccatctttactaaaacaatttt

SEQ ID NO: 154380 - DNA, 302 bp, Homo sapiens
  misc_feature (31)..(31): n is a, c, g, or t
ggcaggcagtgatgctgaggtgatctagagnatccctgctcatttcttcaatatttaacctctctaaaggaaaaacagccaaaccattttaaaaacaaagatctttctcgcctcaaccctttccctcttctccccttcacaaaccttgttccatgccttgtcttccgatgaaccacaattctccactgaaccgaggtgagagtgatttgtgcaactatcactccactgaagttgaaacttcaatctttttaaagttcagaggctacttgtctcattgacacataatggggtagggtaccgac

SEQ ID NO: 154381 - DNA, 603 bp, Homo sapiens
gtggagcaggctgaaggtcaaagggggctccaggccatagcatgggccctgcctgaagcctggataggaagctgggattttctcttcaatacgcagtaagtttcttgccccgtggttgccttatctgtagctaggggcaaagacaataagagagctttctcggcggaggttgcagtgagctgagattgagccattgcactccagcctgggcaacaagaacaagacaccgtctcaaaaaaaaaaatttttttttttgggcagagcttggtaacacacgcctgtaatcccagcatttggggaggccagggcaggcagtccacctgaggtcaggagtccgagaccagccgggccaacttgttgaaaccccttctgtactaaaattacaaaatttagccatgcttggtgtggtgtgcctgtggtcacagctactcaggaagctgaggcaggagagtcgcttgaccctgggaggtggagtttgcagtgagtgagctgagattacgccattgctttccagccggggtaccagagtgagactccgtcttaaaaaacaattttttatgggggtggctttactcagcattattatttggaccttcagcctca

SEQ ID NO: 154382 - DNA, 323 bp, Homo sapiens
gtggagcaggctgaaggtcaaagggggctccaggccatagcatgggccctgcctgaagcctggataggaagctgggattttctcttcaatacgcagtaagtttcttgccccgtggttgccttatctgtagctaggggcaaagacaataagagagctttctcggcggaggttgcagtgagctcacaatgaacatacctattaaaacagctaaaatgaaagagactgtacacaccaaatgctggtgaagatgtgcaggaattagtaactttatatactgctgatgagaatgtaaaatggtacaaccattttggaaaataatgtgg

SEQ ID NO: 154383 - DNA, 277 bp, Homo sapiens
gcatcaactatgtgcaatttacaattaaatcactgtgctaagagctattgataatataaagatgtctaagagaatatttttggcctttcaatagccatttcatgtacttaaataatatattttagaagttgtcacaagttagccaagccacaagccaaattagggatggtgaagaaaatggaagatggtcaggatgcccactttttcttcttctttttctccagagctgaagtatgaacttcattatgtctgcagacaacagtggcactgccttgac

SEQ ID NO: 154384 - DNA, 455 bp, Homo sapiens
cccctccatcccggggaggcattataaaggtatttgtagaattcagatggttttgaatttaaaaaaagataataccaggggggctagttattaaacaagataggaaacaccaggtgctcagtaactatatcaagagatttaatttgtctaaggctgggcgtggtggctcatgcctgcaatctcagcactctgggaggccgaggtgggcagatcacgaggtcaagagatcaagaccatcctggccaacgtggtgaaaccccgtctccactaaaaatacaaaagttaggtgggcatggtggcacatgcctgtatcccggggaggaggaaaataaatttatggtttgcagaatgcagggcccagcgagggtgtaatttgtcaccttgataaaagaaactgtgcagcaactcgtgctttttctgacgtcagaaggacaacggaaataaaacctgagctc

SEQ ID NO: 154385 - DNA, 343 bp, Homo sapiens
agtcttcaggaatatttacaggactgtatagaattaggagccatcaaaggggatccctgaattctttctgtttttcttacaaataccagttttaaggtcaagatttactaccccatgcaacagtgtagccgcattttaaattttaaatttttgactgtttgtttaaaggtctcaggcaacctaaaaggctagatagaagtctctcatcctctaacgaaggatggattgtaaaatggaatactgctaagactctccctttgggtactaattctgcaaaaacctagaatctcagagacaagagacaagtatttggagtggatcattagatgtaatgacaaaagga

SEQ ID NO: 154386 - DNA, 235 bp, Homo sapiens
gtaagagtagaatgagggggtaagtgacttcctatacctctgtattatcttaaattttataatgggcacttaaaaaaaccaataaacaaaattatctatgttacacagcatcactttccaaacacaaatagttaacgtgataccttcatctacaaaagcaccattctttcccctttgtttactgggtgactttcttaaaaggtcccagagacttttttttttttctttttttttt

SEQ ID NO: 154387 - DNA, 493 bp, Homo sapiens
aggaccttaaagggaatcttatccaatgatattaggcctgccttaaaaagaattcagacatgatatgttgataccaatcatgttttccatactggtaatggtagaatttgtgttttaccatggacagctattattaaacttatagactatttttatattttaatattttttctttgtttccttttaggagttgttaaacaatcctgaaatttcccctacaatatgccatgaactaatcatattttctcaaagtcatttgacgtaatgattgattaaaggaaatatctccagtataattacacttgttcataacaaaaaagtatttgaaacttcaagaaaaaattagaaaaattaataatgaaatatgaacaaataaatgtatgaaatatataattaatccctaataaatgtgcatgaaattatagtcatagaattaagagtgatgtaatttttcaactaaagatgcattctgaattataatagaaaaaggttt

SEQ ID NO: 154388 - DNA, 725 bp, Homo sapiens
actttataacatcactgttgagagctcaggcacccttttctacaccaggtctacctagatggttatatgacctaagtccccagtccacatgctcaacatgaagacctaatcagaagactggaggctgatgagccacaacccttcccacctccccactgcttacccatgtattcccaatagggaagcagcctgatatgatgtttccatcatatcagagcacaggatttattgcctaatgccattgtcaccccttgctcaagtgtgtgacatgaacctcagttttctcacctacatctcctttgctgtttggctgtaaggactaaaagaatggacggaaattactgggcctattaaggcattcgatgactgatggctcttccatggtccaatggataatctcatgcctcctactcaagaagtgtctccaaaggtttctatgaattctcaagcctccaggaaactgattaatggttaattgagcaacttgttcagtgccatgtgataaattaatgaccaagtagaaatcaacccactcaaccccagaacatcaatcaaatgtttccctatgtttctagtcttactggcatctgagtcacatccaaatcccaggtgagctctctttgccaacaaaatgtgtttgtagatctttgattccaatctactacatgaatcagcaaagggagctgagaatataaagtgtctggcaggtgccctcattcctgaac

SEQ ID NO: 154389 - DNA, 437 bp, Homo sapiens
gtttgcctgtaggatttttatttgtttgcttgagtcggattctggaaacttttaaagcagagcagctgttttccacttttgcctcaggactcatcactcctatactctgccgattaatttatacatttatgttacctgcttaacctccatgaatattgcaatacttccctaacagccaatgatttctgaatatgcttagaaggtgttgccctggtgagaatggttatagccaaaagcggagaaaaaaattcttgggctcgaaatctttgaacattcatccagcatcccatcctttacctcactggcatggatgcagcaaccaggttccatcttggaagcagagactgggccctcatcagacacaggacctgccagcacctcgatcttgtacatccagcctcaagaactgtgagagataaatttctgttctttataag

SEQ ID NO: 154390 - DNA, 265 bp, Homo sapiens
ggcgaggctctgaggcttcatcacgatggccaagaaagggtttatgttgctctcactcattcattcagcaatcctggccactgggtactcaggagagagtaccctaatgagggaggcagattgtcaacaaaaactacaattactaggagccccaactgggagaagcacaggaggtcacaggagcccaggaaggtgactgaccaagcctgcagggtcacggaagcctcccagagggaggtagcagctgagacacaaagagtccctg

SEQ ID NO: 154391 - DNA, 668 bp, Homo sapiens
tgcaggggtgccccagggctcttctttctgttctacactccctgggagatcttatacaacctccaggtttaaacccatctatctatcgatgacgcccagatttatatctctagtctggacctctgccctaaactccaatttatatatccctctaaacaggcaacagctcttctcaaacctaacatgcacaaagcctgttccctgattttttcccacctgcttgccaacctgctcttcctgtgttagttctattccttgcttcactcaagcaaaacaccttagagtttctttgtctcccctttctctcacatcccacatccaacccatcagcagatatcttcagttctgccttcaaaagtatgtgaagtatatgatcggactacttcctttcaccttcacaccctcaccttggccatctctctcctgggttattccaggagcctcctacctgttcttcctgcttcctctttgctcttcttcaatctgttcacatcactcctctgcctaaaaccttctaaaggttccccatctcagaggaaaagctaaaattgctgtcatgtcccatggggctctacacatctgtcacagcagggcccaccctgatgctgtgctcccatctcctccctcagtccttgggtcacctttgtctagccacacctgcctccttg

SEQ ID NO: 154392 - DNA, 564 bp, Homo sapiens
aatactgctgtgacgagatcctagaaatcctatgtactatgcataaaggagagggctgtgggttgccagacttttttgctgtagcatcttaactccaaaggtcctgggtctggggcactcaccaggcattcggtcgtccagtgtgtgctggtgtccctgggtttgagttgtccttctctcctctcccttcacataccttttatgggtctctcccaggctcataggccaagagtagaaagctctgggcttctgagttgcagagtgagttggtgttaactgaagtcactttgtctagagtgggtgtgtcctctgcctctgttaaatggcatcccctgggactgaggccaagctgttgtgtgaggtactggctggcaaaagaccaatcctggccaatatggagaagctctccaattgagaggctccttttgttgatcccagctggcagggaaggggccattgacagataactcccctccatcatttattttgagtattttcatctgaggcacgaggaatgttaacgactttgaacccatttatttcaagtgtgttggaaagcagtcg

SEQ ID NO: 154393 - DNA, 542 bp, Homo sapiens
gggacaaattataaaatgggtagccaagtgggaagagatatatttatatctacaccgcatgtcatatagaagaataactttcaaacaggtcaaaatttaaatgtaaaaaagtattatataactggtatttattgttttttgctcaatggtaagtatattatgaacacagggccatgtcaagaaataagttctatacttctgccatttcatttttaatatttgcatagtacttcacttaacaaattatcataatttgtttaactgctgttgatagacattctaggatgtttacaattttttacttttatacacaaagcttaaatgactgcttatgactatttggggattagttaacagagcaacacaacaaatttctcaaaactgaattttggttctattagtgttctacagctgctgtaagaaattaccacaaatgtggttgcttaaaacaacaggaatgtattctctcacagctctggaggccagaagtccaacatcactaccactgtaccagaatcaaggtggaggtggggccacactca

SEQ ID NO: 154394 - DNA, 452 bp, Homo sapiens
gagtcttgctccgttgctcaggctggagtgaggggcacaatcttggctcactgcaacctttcgcctcccgggttcaagtgattctcctgcttcatcctccccagtagctggggttacaggcatgtgccaccatgcccagctaatttttgtatttctagtagagacatggtttctccatgttgtccaggctgatctcgaactcctgacctcatgggacttcagtctagctccaaatctagtgctcttgcagtcaattcatattttcttctgttactgaccatatgaaataattcctctatgaaatttatgtgcaatttttataaaagtctaaatgtattttatggctaaccctcaactatggagcatattaacattaaaatgagttcttgaaataagagttgattaacatgggaaaatatccatctctttcatcttgaacaaagtagttttgt

SEQ ID NO: 154395 - DNA, 116 bp, Homo sapiens
ctaccaacccattgatattatcattatttatatgcacaaagcttccagaacttcactttgccagactttctagctaaggaggtctcaagaagatgctaaaagaagcttccagtaag

SEQ ID NO: 154396 - DNA, 218 bp, Homo sapiens
tgtggcagtactggggaggcctcttagcaccagcacacagatccaagcaagaccccataaacaagaggctggggcaagaaaagctgaagtgtacacacggtaaggagacaaccctgtttttccaggccccctgggccttcagggcagttacttgacttcttatggagaaaatcacatctagaaacacttttccacccagacttcactcccccatacac

SEQ ID NO: 154397 - DNA, 334 bp, Homo sapiens
agtgagcacgagagtttgaggaggcagtgagctatgatcatgcccactgcactctaggctggacaacagagcaagactctgtctctccagaaaaaaggtctcaaattactaatctaagcttccacattaaggaaccagaaaaagagcaaaatcaaaccaaagtaagcaaaaacaacaaaaagaaagcaaaaatcaatgaaatagaagaaaaaatagaaaaaaaatcaaggaaactaaatgctgattcttcaaaacgattttttaaaaactgacatacctatataacaaactcacaaagaaaaggaacatataaacatataaattatcagtatca

SEQ ID NO: 154398 - DNA, 263 bp, Homo sapiens
gtaaagcccgagcctgactgtctgatctcccacggcacccaatcagctgggctcctctgagcaggaagcgatgtcagatttaagtgagttttgtaggatccctgggaaaagcagagacaggtggcaggcagtacagcctcagagttcaatagagcatgcccaaatctccatccaactaccctccagttatctggccacttgattccttatctagaaacacagtgaagagccaggcgcagtagctcacacctgtaatcccagca

SEQ ID NO: 154399 - DNA, 384 bp, Homo sapiens
ttggccatttactttctgtgtggccttagacaagttacctatttttctgaatctcctttcttgaacctttttgtaaattaaaaaaaaaaaaaaattaggctgggcgtggtggctcacgcatgtaatcccagtgctttgggaggctgaggtgggtggatcgcttgaggtcaggagttcaagaccagcctggccaacatggtgaaaccccatttccactaaaaatataaaaattagccaggcatggtggctcattcctgcaatcccagctacttgggaggctgaggcaggagaacccgggaggcagaagttgcagtgagctgagatcgcactactgcactccagcctgggcaacagagcgagactccatctcaattaaaagaaaaa

SEQ ID NO: 154400 - DNA, 269 bp, Homo sapiens
ctcgggtgatcctgttgccttggcctcccaaagtgctgggattacaggtgtgagccaccctgccagccagtgctgggatgaatataagcaaaaggtgtaacctgggggcagagaggaaggagcctcactaagcctgggggtagggtagtgataatgaggaggagcatgaggggtcagctgttgaacaatgaggaggggatattcaaggtggagaggacagcgtgcaccaacacatggctcttgtgatttagaaaggagcatcagcaaca

SEQ ID NO: 154401 - DNA, 215 bp, Homo sapiens
ggaaaatgcaagagacgtgaaggcctgttcttcctatccctagaggttgagattgcctggggagaaggaactagaatagggaatggccatagaatgaacccgcattggcagacacatgtgaacacaggccttggcatagagccactgggcctgggcagtctggaacatggactatggtgctcaggtcaggtggttgggccctgaccccacccact

SEQ ID NO: 154402 - DNA, 315 bp, Homo sapiens
atacatgtaattgttgcttaatctattccttgtttgctaagaaagcaggccaccccaggccctccttgccctgaccagtctgggttcttgccactgccagggaagttggtctttgaccattttcaaactgctgcttcctctctgcttccagctttgaaagccaacacatcctcctgtgaggggacaagacaagcagggatatgtgggccactggatctttgccagacttcccagctgcagccaagttcttagggttccgtcagcgctgcatccccaggagcctctgcctcagtgagtgtcctctggagcccccaa

SEQ ID NO: 154403 - DNA, 397 bp, Homo sapiens
atgcttacctagcatagatactctggcaggcattgctcaaagcaatttacatcaatggctttataagcctgtaagaatcattcccattttacagatttggaaactgaggcatagagagagaaaacagtgataacataaccactgcagttgcattttaggaatctgaaacatattaaaagatgtaataaattcttgcattatatgcaatatttgaaatagggcaaactgtctctattttaaccatttttccagaagagcctaatttcatagaggttctattttcttggcagggtgcggtggctcatgcctgtaatctcagcactttgggaggccaaggcgggtggatcacctaaggtcaggagttcgaggccagcctggccaacatggtgaaacccca

SEQ ID NO: 154404 - DNA, 170 bp, Homo sapiens
cattagggaagagaaagcaggtgacctctagataatactagagattggaggtgactgggtggagccacatgaatgattattagacacgtgggaacttcaagcagcaggtttgactgaagccacggtgggggcggtggaggaggagatagagaggatctcatctgttctct

SEQ ID NO: 154405 - DNA, 347 bp, Homo sapiens
ccaggtgcccagggagaaagtccagaagagggaggaatagtatatgccaaggaggaaagtgtggatggagtggggagacatgggagaggttgtgccatgtgtgagcgggcccttgaaggacagatgggaccctgtgaggcagagaaggatggaaggacattgcaggtccaagggcattatgtggtctgaggacagctggcatggtggttggttgttgtctcaagagggacaaggtgggaaaaggaggctgaaatggcaggtggggcactgggaaaagacccctgagtgtctgcttagcgccctcttgcctatagaataaagttgtttgtgggttttgattggggagg

SEQ ID NO: 154406 - DNA, 274 bp, Homo sapiens
ttctttcttctcaatgatctttaaattgatcttgaaacttttctactgccgcttggtcagcaaacactatttctcctattatcttgacatttttgaagccaaatatctttctaaaattatcgaaccatcctttgctggcattattctccagctttagatctttcacctttcttttgttttaagttgttatataatgaatttgctttttctggaatcatattggattctatatgcttttcttatagcaatcctgcattcacataaaagatgcatt

SEQ ID NO: 154407 - DNA, 123 bp, Homo sapiens
agaactaagatggatcttctgacttgcttccctggcagcctatccagtgttctttctactagattggccactgtaataaaaataacatcctaacgtaaccatttcctttattagatcttttgg

SEQ ID NO: 154408 - DNA, 310 bp, Homo sapiens
cctggcttataatgtcattcctaaagatgacagagctggtgagataggtcacacttcgaggagaacaaagtagtagtttcaactggtctgtggtgcgacccagacattagcccacatgtaacactccccaggtgattccaatgggcagccagggttaacactgccctgtctggtaacatccgccacatagataaaaccttgcctgttctcatttaaaaagctcatcacttcctactcccaagacttgttcaaaatcccattagtcccagcatcctccataggatgaaggggggcggaggagctggggtcc

SEQ ID NO: 154409 - DNA, 362 bp, Homo sapiens
  misc_feature (74)..(74): n is a, c, g, or t
caccggtttactggacttctggcatacctggaccttctggcatacctggaccttctggcatacctggaccttcngtatgtgtcctgctttgtgccagtactggagatatggtgaacaagtaggccgagtttagagtttaacaggctaggcagccaacggcatggagcaggaaacatacagaagggttcgggcttggttttctggaagtcgtgagtattcagaagaaacctgaaagattcatgcgggtttagacagacggttgctagacagcatgcgtgactaggaagaatgagacaagagcagtcgatttcccaggaactgaacctcagtgaggtcagatcatggaatagaaggtccaggta

SEQ ID NO: 154410 - DNA, 315 bp, Homo sapiens
atctctctgaaaaacccatcaaaatactttcctgcctcagcaagaatgacttaaatataatttaacttgttacccttattatgtaaccattttaactttctgaaatgtaacttaagcataatctaatcaatcccctaaataaccagtgtgtgtggagacagacagacatgggccaacaacattttggtcaacaatggactgcatatatcatgagggttccataacactgtaatagtgtatttacagtattactatatttttccatctttagatacacacctatttgccactgtatgataactgcctacagtattc

SEQ ID NO: 154411 - DNA, 514 bp, Homo sapiens
ggtccattcatgtaacagtatttacatggtattaattgttcctaatgctgcataggagtgtgtaaagtgaatgacccacattgtactcccatgatggacatattgttcctacccactatcagccaacactaagacacttgaatttaaacattctcttacgtgctttctaaggtgagaatttatgtgggagtgggattgctagacagaggtccattttgacttagtcacttacatttgttcatttgactgagtactgtcagatggcataacagaatgtctgccccgggccacactgccaccagctgtgcacaggattcttccccaacatccctaccagtagttgaccttatccatttttctattttcttgccagtctaggtataaaagatatcttgttgttataattttcatttcaggggggttactaagaaatttgagtattagtttaaatgcttggtatttattttggttttcctttttgtagaatcctattcatgtcctttgcctatttttc

SEQ ID NO: 154412 - DNA, 418 bp, Homo sapiens
cttcctgatccaccctcctcggcctcccaaagtgctgggattacaggcgtgagccactgtgtccggccaaaaccacgtttttttagagcagttttaggtttatggaaaaatcgagcagacagaatagagttcccatatctccgtcctccctgcacacagtttccactattattgacaccttgcattagtgtggtacacatgtgataattgatgagccaatattgatacactagtattaactaaagttcatagtttacattcagattcatcctttctacagttctgtgggttttgacaaatgcgtaatgtcatgtctccaacattacagtaacatgcagagtaccttcactacactaaaaatccattttgctttacctatttattcctcctcaccccctccctcgcccccagttcctgg

SEQ ID NO: 154413 - DNA, 439 bp, Homo sapiens
ggctctcaaggaccaccaggtagggaaacaattcttggagaatctcttatgtgaacacagtagagagaaagatcctgtaccctgaactagtactgaaaaaagaaagattagctgtccttcattatttgcgctgtagggtatacaggcaacaaaacccagtgagaacatttaataaaacattgtcactttcatatccccaaatttcttccttgccctttatcacttcccagctgtctccagattttattttgtatccacttgagctatgaggtcagagttaagccttcaggaatgtgtctctctataggcagaaacctgactcttcctgaaaaaacccttagtagaccttgggaaaactgcagttgctatcacatgtacagagagagcttttgcagtcactggactttaaatgttctttttgttggactgccaaaaggtt

SEQ ID NO: 154414 - DNA, 421 bp, Homo sapiens
aagcaagcaaacaaacaaacaaaataaccagaaataagtttaaaattcaacatgcgttttaaagatacggaaatcataaaagctgagcaaaaggtcaataggcttttctttgaagcagggaaggggttgaatcagatttgctctttggagccctgcctggagttagggtaggcacaaatggggagggactgaggctggggcccttcaaacgtggttgcaattgtccagtctagagaagacacagcctggactgatgcagtcgaggtggggtagagatgaagaccagatgcagtttgggagacagtttcgtgatctcattttcttgatttgtttgtacatgcctcttaattgtttccattcccgcccttctcatcccacctctcatcccatctttggtccaccaccgccatcgggaacatcc

SEQ ID NO: 154415 - DNA, 236 bp, Homo sapiens
gggtgcagggaatagaaacatatagattagtttaagctggaatcagcgagacaggaatgaatgattgaatgaagttaaacaaggatttatcggaaggatatggaatacgtaatagaagccaaggcttgaaaaccagatgggcattaggagagactggaactggcaaatggagaactactgggagccaagggacttagcgtattttattgcatctaaggcagcagtgatcgtaaaag

SEQ ID NO: 154416 - DNA, 349 bp, Homo sapiens
cctgaacttcagaaggtgctcacgggcacccctgaaagagaaaccttatgctgccttaagacgtctcagtttctgcttataatgaagtagcatcgggaaagaggacaggtcattagccttggcccctttgtttggttttaacctgtgtttttgcattctgagctggttttcttcactggcagcaggccctccggtgtagaaggttctgccctcctctttgaaggcaggcctgaacagtgtgtgcgtggtggggctgttgattcactctggctcacgtcttccttaccccacattctgttgaaacccacattccaggagggccccaagcccctcccgcagctctaggcac

SEQ ID NO: 154417 - DNA, 458 bp, Homo sapiens
tgggtggaacagagcaaaatggtgagagatttcattatgctactcagaatggcatgcaatttcaaacttatgtttatttcaggaattttccgtttaatatgtttggacctcggatgtccatgggtaactgaaactggaaagcagaactgtgaatgggggtactgtgttaagaaaaccgatgggtttccttttagttgcctttatgtaccttcttcttcccattctgattctatgcttgcatggcatatttggcttcatgtattgcattctatagggcaaacatgccactgactgatccactttgcttttttcgattctcagagtaaataattgtgcatactgattttattgtttagtctctgaggttgataggtttgagcctgaccctgagtgatggctctgtgctgggtatatagaaaagatcaggctcagcttaccaggcagaagcctaaatccct

SEQ ID NO: 154418 - DNA, 476 bp, Homo sapiens
tgggtggaacagagcaaaatggtgagagatttcattatgctactcagaatggcatgcaatttcaaacttatgtttatttcaggaattttccgtttaatatgtttggacctcggatgtccatgggtaactgaaactggaaagcagaactgtgaatgggggtactgtgttaagaaaaccgatgggtttccttttagttgcctttatgtaccttcttcttcccattctgattctatgcttgcatggcatatttggcttcatgtattgcattctatagggcaaacatgccactgactgatccactttgcttttttcgattctcagagtaaataattgtgcatactgattttattgtttagtctctgaggttgataggtttgagcctgaccctgagtgatggctctgtgctgggtatatagaaaagatcaggctcagagactaaacaataaaatcagtatgcccaatatgggggtaccgag

SEQ ID NO: 154419 - DNA, 270 bp, Homo sapiens
aaatatcacgagtatgccccaaaccacagaagttcattaagaagaataaaaaggtgatctagatgaagaataaatcaaccaactaagcatgaaacaagtttcttcagaatggaagttctttctgactgccatgatgaaactgtgaatcaagagagattgacaaaatataactgccaggattaactatgctgtttttacctggatgggagaagggcaggcaaatctcccagaggtaattatttctcacaatgaactgagatttatcagaat

SEQ ID NO: 154420 - DNA, 400 bp, Homo sapiens
tgtgttgttactgactatgccaaacaaggatgaactgggtttgggaaggtaaaaagagctattgaaaaggaaggccatagaaatcaactcatctcgggacatttaatctacactggaacttttttcactgagccacagtgagattgcaagatgatggctatgaaagtgatttagaatagaacaaactttatgagcattaaagcgggctaattgtgaaacacttttttcagtaagcatttaattttccaggcctctatttgcctctttgaggaataccaagatgaaataataagctaacttcatggccttaaagagcgtttattctccgggtgaatatattattgcaaagttacctctcctcacccttcactctactgccatctgcattccacccaccact

SEQ ID NO: 154421 - DNA, 179 bp, Homo sapiens
ttgggattacaggcttgagccacaacgcccggccctgactgcatttcttatgaacttcattttgtatggagaacatccctccatcccacatagaagatttatagtatgaaacattctacactagctgacaaatggcatggagccctactcccatatttgtgataagcaggaagtcagca

SEQ ID NO: 154422 - DNA, 573 bp, Homo sapiens
aaggatttaatggtcaaagcttgtgtgaattattatcatgaattaaactaatgaaaggatgaagatattgttaacagaagttctgaaatgctaaccttgccatttctgtcatgagatgagaaatcaatgtccaaataacatgtgcagttaaagctttaacaggaaataagtgccacagaatctacagaaagaggtttttcctatctctcaacaaaaaatatatgaatggaggtaaggtggagaaaggggacaatagtaaaaatcatgccccaaatggaaatgaaattagcaccctgagaatgaattgagaagagtaaaaattaacgttcagccatttgtagaatattgtgagcccataggtgtgtatatatataaaatgtgtatatatacatatatataacgtgtgtatatatatgtgtgtgtgtacatatgtatagtgtgtatataaaacacatatatgggtgtatatacatatataatgtatgggtgtatatacatacataatgtatgggtgtttatacatacacatatataatgtgtgtgtgtgtgtgtgtgtgtgtgtgtgtgtgtgtg

SEQ ID NO: 154423 - DNA, 472 bp, Homo sapiens
ctgtagatgagggtgttttgagcctgggactgaaggtgccacaagcagtgtctctttcctagtctgtcttcactttccactccctataccagcctgatgtctcggctctctccttcacaactgtatggtcacctgtcctcagaaaactgagtgctttggcacaggggcaccttatgagaaggggtggttaggccagaggaacctccactaactctcccactagttttggaaatatacctgagaagcacacaagaatttagggagggcagagtctggttatggcttggagatggagatctttgatgtttcaggcaatgggtgattggtaacagaggtgcgggaaggggattatggctgatgtggtagggtgatagggagaggccaaggtggccgtatctatccagtctgtgtggcctcaagcttgcagatgggtggggagagattgtaaatgctgcaatctttttgaggcaca

SEQ ID NO: 154424 - DNA, 383 bp, Homo sapiens
gttcaagcaattctcctgcctcagcctcccgagtagctgggattacaggcacatgccaccatgcccagctaatttttgtattttaagtaaagacaggggtttctccatgttggccaggctgatctctcaaactcctgacctcaagtaatccacctgccttggcctcccaaagtgctgggattacaggcatgagccaccatgcctggccaaaagatatgtttacttaacaagagggagtaggctggcttaaaaacattggtgatagtacaggtggtattaggatgtggcaggaaacgtgggggcggagctctgggaatgtaagaagcttagaaaggacccacctgacccattcatgccccagtctatgcaggaccctttgctgc

SEQ ID NO: 154425 - DNA, 644 bp, Homo sapiens
tctcatgaaacacagggccataaccaggagaaagaattctgaaaaaaaacaaaaaggtatctcaatgcctccaaatattacttggattaagttatagggataaaatagaccctcctacattttcagttttttttttgagactgagtctcactctgtcgcccaggctggaggttgcagtgagctgagatcgtgccacagcactccagccggggtgacaaagtgagatccatctcacaaaaaagggaaaacctttttcagtattctcatgctaggggtacctcacgggagacggtgtgcaagaaagaaaatttttcagctatgtgttttattggacatggaccaacggatcattgggctcaaatctgaagcaagtgaaccagaagacaggatgtgggccactaacagggaaccagggatataactgggttccaataggacaccgtctcgacatcatcattaaattagatcattaacgagggatgaccgaaggatatacggggtccgaatactgttacaataacgcaacaagggccatgggcaggtccaccacctgggaccaagtggacacccactgattgagccgccacggcgccaacttcatttctcagtccaagatccaaagcctggaagaaattccaaacatg

SEQ ID NO: 154426 - DNA, 176 bp, Homo sapiens
taggctctggaaatagtgcggtgattaaaacagacctctgaccttggggagttacaatcagagaagaaagatattatacacctaattgcaaaaattaagttatcacaagcatacaatattttatgaagaaaatgtacaggatgccaaattcttttttttttttttttttttttaag

SEQ ID NO: 154427 - DNA, 718 bp, Homo sapiens
cgcatttccggcctttgtagtttatcattctttgggctgcggttgtcaaggattcagagcagatgtgatctgcgctaggtggcatctcctctcacggatgcctcggtgagcttcggagtcgggctaccgctgaggggcttcggaagggccagtctgtgcactgcgacctggactgggtgtggggatttggcggcagggtcttcttggccagagatgggccgggcaggtgaagggcagaggaggttgctccgcagcctggaagggctttgttaaccaaaagtcagcgtcgttgcccctacccctttcccccaccctatgtctgttcctgagctcttcaacctctctgccctgtactgatggcactctgaactctccgtatctgcatcttaggattcaaatagattcggatatgaagaaatgtttgtattttccgatgtcttattctctactgtggacttattttaaagaatgagcagggatagttttaaactatgccacagcctttcttagtctaactcacatagtataaaggctcttgctgctatcgaattttttaaaagaataaatagcatctactatgtgccagcccagcactgttctaagcactttacaaatattatctgcttctcataactctatgagatagacactattattatgtagactacaccccacctctctgtcccgcccctttttaaaattaacatacaagaagaaa

SEQ ID NO: 154428 - DNA, 669 bp, Homo sapiens
cgcatttccggcctttgtagtttatcattctttgggctgcggttgtcaaggattcagagcagatgtgatctgcgctaggtggcatctcctctcacggatgcctcggtcctgagccatgctcatgaacaggaagagtttgtaaaggagaaggcaactccaggagcagctcaggagtcatcaaatgaccaattccaaaccttggaagagcaacttgggtataatttgcgagaggtgtgcccagttcaagagattgatggcaaggctgggacttggaatgtggagttagccccaaagagggagatttctcaggaagtgaaatctcttatacaagttcttggaaaacagaatggtaatattactcagattcctgagtatggagatacctgtgaccgtgagggcagattggaaaagcaaagggtgagctcttcagtggagagaccctatatctgtagtgaatgtggaaaaagcttcacccagaattccatccttatcgagcaccagagaacacacacaggtgagaagccttatgaatgtgatgagtgtgggcgggccttcagccagaggtcaggcctattccagcaccagagactccacactggggagaagcgctaccagtgcagtgtttgtggcaaagccttcagccagaatgccgggcttttccatcacctc

SEQ ID NO: 154429 - DNA, 451 bp, Homo sapiens
ctatcaagacctaactaaatattttgcagacataggaaaatctatcctaaaattcatatggaatctcaagggacccaaaggtccctcgccaaagcaatcttgaaaagttagaacaaagttgaaagagtcacactttaagtcaaaacttactacaaagccacagtaatcaaaacagtgtggtgctgacagaatgacaggcatatggacccatgaaatacagtagagatcccagaaataaacactttcgtatgctcaaataattttagacaaaggtgccaaaaccattcaatgaggaatggacaagcttttcaacacatggtgctggaaaactggtctccacatgcaaaagaatgaagttgggcccttaaaccatacacaaaaaattaacccaaaacaaatcaaagacctaaatgtaagacctaaaactataaaactcttagaaaaaaacagg

SEQ ID NO: 154430 - DNA, 561 bp, Homo sapiens
gagactgcctggacgggaagtggttgtgaaggtacgaatgcttcatttccacctgaaagaccccaacttgaaaatcaacaaggaacaatatgataagcagaatatttacagatatggggagtacataaccaaaagatcggctaaaagaattgagcaggaaatagggagaggtgggctggagggccactgtatttcacaaaggcttgagaacccctgactctttagaccacaggcatcccaatgtcgataaaggaaaaatacatttaaaactataaccaaggctggcgtggtggctcatgctggtaatcccagcactttgggaggccaaggtggacagatcacctgaggtcaggggtttgagaccagcctgaccaacgtggtgaaaccatctctactaaaaatacaaaattagctgggtgtggtggtgcatgcctgtaatcccagctacttgggaggctgaggcgggagagtcacttgaacctgagggggaggttgcagcaagcttagattgcaccattgcactccagcctgggaaacaagagtgaaattccctctcaaaaa

SEQ ID NO: 154431 - DNA, 551 bp, Homo sapiens
  misc_feature (60)..(60): n is a, c, g, or t
gtgtcgaaagattctggcgggtgcggtggctcacgcctgtaatcccagcacttcgggagngcgaggcgggtgaatcacttgaggtcaggagttcgagaccaacctggccaacatggcaaaaccctgtgtctactaaaaatacaaaaattaaccaggtgtggtggtgcatactggtagtcccagctacttgggaggctgaggcacaagaatcgcttgaacccgggaggcagaggttgcagtgagccaagatcgcgccactgcactccaggccgtctcataaataaataaataaccaatccagtttcaggtatttctttacagcctgtgagaagggactgacgcacctgtattgcacaagccctgcctccctcctccctcccgcaatatctgttcttctccccagtgtacagtggaggtcactgtgactcagggaggccacagacactgcccaaggccagagagctaagaaagtggtgggatgggaattgaaaacatcgatctcagcaccgtgctccccaccttgcccccgacaatgctactgattctgaata

SEQ ID NO: 154432 - DNA, 491 bp, Homo sapiens
ctatctcatcctgtgactaagaacgcctaacctcctgggaatgtagccccataggtctcagctttgttttatcaagtccctatttatgatggagtcactgtggtttgaacacttctgacacagtggctcccaaacctggcaaatcagcaaaatttccttaaaatccatctgtctatcaatctatctatctatctatctatctatctatctatctatctatctatgagacagagtcttgctatgtcgcttaggctggagtgcagtggcgtgatcatagctcactgcagccttgaactcctgggctcaagccatcctctcacctcagcctccctggtagctgggactacaggtacacaccaccatgtacagctaatttttaatttgtttgtagagatggggtctcagtactctctattttcccagactgattttgaacccctggcctcaagggatcctcctcccttggcttccctgggtgcagaggttacagg

SEQ ID NO: 154433 - DNA, 615 bp, Homo sapiens
tatgttaccaaaaaaactcagtaaaaaatgctttcttaagaaggaaataggaaaggaaagtctttacaagggcaactgatcatcttgtggattaccaaatactgcagatttcaggtcagaaaacggagtcatggagaataaaaagaaaaaactaacacacaattgagcaaataattcataatttagagaatgtatctactcattaaaaatgtgaagtgtaaatgtataacagttatgtgacctgggaattttgaatacaaaattatgtaagcaactttattattttttaatagaaaaatacttgcaaatattgaaacaataaaacctgttgctgaaaaatctagaaaacaacacacgaacaacaaacgaaaaaacacaaaatataggtgggccgcgcacaaggcccagtagaaaagagttttcgtgaaaccacgctgtggggccgacggcggccccagcatcggtcaaagccgaccgcgggccacagcgggtgtccccagggaaaagccgccgggcacgtcaactaagggggcgggattacgccacgaattaacacgcgcgggggaaacacaacgggtgggaaccaacacgaagggagtcggagaaacgaggaac

SEQ ID NO: 154434 - DNA, 681 bp, Homo sapiens
  misc_feature (681)..(681): n is a, c, g, or t
atgcctgaaactcatccaaatttgatgaatactataaatctacaaattcaagaagaataaacacagagtaaaccataccaaggtacaacataatcaattgctgaaaacaaaattaatgagaaaatcttaagtgcaaggagacatgggggaagacatattaaataaaaaggaatatggataagagttatcactgactccttaatagaaacaatacaagccatctttgaaatgccaaagggggaaaaaaacccctgttcacatagcatctatattaagtgacaatctctttcacaaatgaagcaaaataaagatattttctgcctaacaaaagcaaaaaaaaaaaaaaaaaaaaaaaaaaaaaaaaaaaaaaaaaaaaaatgtggggtggcggcgcgcgccgctcgggcgccctaagaaaaaagtctttcataaaccgcatctcgggtggggggggcggcgcgcccacaggtaaggatagtaaggagcacacaggcgcaacacagcggggtccagaaaggaaagcccggggggcacagacaaccgcggggggggctcccaccaaaaaaaaaacgacccggcggggaccacgcgcgctgtgtaggaacacaccccacaggggggctctgagggggaccacggggcgcttctacacaggggcgcccagggagggctgattaaacn

SEQ ID NO: 154435 - DNA, 233 bp, Homo sapiens
acctgccattacttcagtggagcacctaggaaatgaattaggtttggagatcattttgaggcacctttgaaaacaaggggagaatagaaagtgggcatttgtaaattagtcatttctacaaatgataactgaaaccctaagaaaggaattagagaaatatgtgaccactgagatgctggtggcaaagaagtattaggatgaagatgcaggagggaaaggatgataaattaaga

SEQ ID NO: 154436 - DNA, 215 bp, Homo sapiens
tgggattcgagcctctggtccacagcagggtttctcagtctcagtgctgttgacacttggggccaggtgcttcttgtgatgttcagcagcatccctggcctctacccactgatggcacttgccgccaccacccttgtgacaaccccagacgaggaccatatgcacatccacattgagaacccctggcaggagggagggaagggggttgaggctgg

SEQ ID NO: 154437 - DNA, 509 bp, Homo sapiens
tcctgaccacaggaacctgagaatgtgaatacagttggaaacagcattgttatcacagatataattagttaagagaaggttgtagtggaagtagggtagacccttaatccaatatatgcccttttaagaggaggagaagggacgcagagatacagagggagaacacgcatgatgacaggggcagatactggaggaatgtgcctataagccaaacaaaactaaggattgctgctgacaccggaaactaaaagaaaggtatgcctgttccaatactgttctctgacatcaactgggtgtcctaaaattcaactcaatgctgacactaattacctagacttaatacagacccaacaaggaaagaatatttcacaaaactgccccatttcagacgtatatacagctggcctttgaacaacacaggctggaactgtgcaggtccacttatacacagactttttccaataaaagttacaccaaatatgcctgcctgtcctgcctcctcttccacc

SEQ ID NO: 154438 - DNA, 467 bp, Homo sapiens
aggctggtgctagcagcttgtatgctcagggaatgaaatatgcagaaatagtatcacaggtcattcttactttgagaaagtgagaagaaaaggagcctaactctgtgaacatcataaaggcctaatttataactgaaacattatcactttgcaaacgaaagcattatttaaaacttgtttataaaaaatttagcataagtcctcgaaaatacttggagaattactcaaaagatttttttttttttttttgagacagagtctctgtcacccaggctagagtgcagtgacatgatctcagctcactgtaacctctgcctcccaggttcaagcgattcttgtgcctcagccttccaagtagctgggactacaggcacctgccaccatgcctggctaatttttttttttttttttgagacagagtctcactgtgtttctgttgcccaggctggaatgcagtgacatgatct

SEQ ID NO: 154439 - DNA, 331 bp, Homo sapiens
ctcccacagtgctaagattataagcatgagccactgtgccaggccctaggatttttaaaataaacaaatttattcatgtcttcagcatccaggtaactgatctagaaagatttagagtcagaatattcttcttcaattataaaatgattactgaataaattatcaactacagaaggaacttgagacacaatttttcttttctttttttttgcagagacaagtgagcatttatttttgtgcctttcttcctatgtatatttcaagcctttttcaaggccccaggaatctccggattcaattatgtccccgggcttggtcgactgctgcagga

SEQ ID NO: 154440 - DNA, 592 bp, Homo sapiens
aaaggagggagaaagggggacccaaatttgtccaaatgagacagcatttgggcatgaaagagactagagttagaataaggaattaaagcatttcatgaaggagagtcgggggtaggacaccctgatgggcatcctctgctcagctgaaagtgcactgaaatgtacatgtgataggaacattaccaaaaggatgccatggtacagcccttgaggagcaccatgtgaagacgcagaatgcattagagctaacaggaagctactgggggccaaggagtgaccacctggaagcccactctcttctgcctctacgcacgtgagagacagtgaagagtgaagcatacgttgatgcagtgaagcattctgttctgcacagcacttgttccaggagaaactccagaggcatcagacttagacgtgattctggaaggaagaaaaagctttctactagtaactgagctaagataaggatgttgggggtctagtaaggagagatcatcagtgaaactctcagggaagagagcctggtaaaggaaggggaatatgtctagaagctcaggcaagacaaggtgacaaaacatagctgaaacacctg

SEQ ID NO: 154441 - DNA, 467 bp, Homo sapiens
atgagaaggtagaagcaatgaatataaactgcctttcttcaaaggaaaacaaggtgtatagtgcctaacatgtatacgaaattacaggctatatgttttaagtgataagggatagttgggtggtttgtagacttagcaaaagagctagtagggaaatgaaatattgacatggggacttggggagcaagaacaagaagaatatctttttttccttatttttttttttgaaggaaaaatatttttgttcttcttggagaccgagtttcgctcttgttgcccaggctggagtgcaatggcacgatctcggctcacagcaacctctgcctcccgggttcaagcgagtctcctgccccagctacttgggagtctgaggcaggagaattgcatgaacccaggaggcggaggttgcagtgagctaagatcgcgctactgtactccagtctgggtgacagagcaagaatgtctca

SEQ ID NO: 154442 - DNA, 216 bp, Homo sapiens
ggaagaggtgaggagcaacagaggcaccaaagtgggactatacaaggtatatctagaatgtgaggaatcctggtttgacttgtttgaacagggaaacaatattgacaaagcaaggcaaggccctgttgtggaggtggtgtgacagatgggcagagtcaagagcccatctctaccactgcctagctgcatgatcctggtgacttactgaacctttcc

SEQ ID NO: 154443 - DNA, 401 bp, Homo sapiens
cagatgtttgttacgatgatgctttatatacatgttcatctccagctgacatgggagacgaaaaccctacttttatttttttttaggttccacgaagaagttgtaagttgccattctctaatttttaacatacatactaacagtatatttggtacacaacaccccacacgttatttggctctggtgtcatctcacagaccaccttacatgactatttttattgcgcaaatcacaatttcaatgtttttgtggcacccattctgctttgattcacaccatttccttaaagctactcagcaaacagtcaaatgaccttccagtgactgcgcaaaatatagaatgcttcaaaaatttgtgtggccgccttatgcaagggccagctccttgggaggctgaggcag

SEQ ID NO: 154444 - DNA, 162 bp, Homo sapiens
aagtggtgggattataggtgtgagccaccacacgtggccacagtttgggcttttgaaaaaagttaggtggaggaagagaggtatgagtactctagttttcactgcagtatcccatttgtgtgtgtctgtctcttgagggaaagatagactactattctaaca

SEQ ID NO: 154445 - DNA, 559 bp, Homo sapiens
caggtccctcccctgagatgatcaacagcctcagtgtctctcccacccagcgccttgcttttcctggctccatatgctgagggaaccaccaaatgcttctgccactcctttcatcttcctcttcaccaccaccctctcccagccaagcttccttccacatcctgctgagcactccaccagaatgtcttcattctccaccacacgtgagacctggttctggttccagctctgctgccagtcagatctggtcaaatcaaagtctgtttcctcatttgtaaaatgggagtgggggaatgggcccagatgatctctcaagtcgtttatatttcccagacccagtaactcatcagaacctgaacaagattcagccaggcagagccatctgcccttcttcccttcctatctactatctactgtctgtctacacatgtaccaagatgtggttctataatgctcagatgtcctgtggtgttatctcttcaggctgaccctacattaggcactggtcttaaactatctccggagactctctttaaggaaagggatcaccatgtgtcta

SEQ ID NO: 154446 - DNA, 419 bp, Homo sapiens
tcccttctctgcatgttttagtcctactttcctaacacccaagaaaaccagacgagaggctcgccaagttaatctctgcttctgggctgaaaaagatcccaggaaatataataggtcaatggtattattcccttttttaaaaaacagcaaaatgcttaggtaactggccaagctctcaacatggaatatatcagaatcctccttggagactgactcataaaacacatatgcagaacttggtggaattgtttcatccattgaattttatgcatagcacaacccaactccaattcttattactataactcctcccaaataggtaaatatttattccttggcatcttgcctcatcacacagaaaactttgatcaagcttctatgataggctattagaatgacatcagaaaataaagtctaat

SEQ ID NO: 154447 - DNA, 143 bp, Homo sapiens
tgtagggggcacaagagtacaaacaagccatttggaggctctttcaagcacttaggcaaaagatgatgaaccaaacaaaagcaatggaagtggtgagaagcagtcagattcttgttgtattttgaaggtagggggacggtgca

SEQ ID NO: 154448 - DNA, 174 bp, Homo sapiens
acatggttcctggcctcaaagagaatctggtaaaaattaatatagttttatgtcatctggtgaattacaacctggtagaaaaaaaatcccatgatttcccctttacgtggagatggcatctgagattttcacttcaattctcaggaaccacccttggtctatcctgtgtgtgtg

SEQ ID NO: 154449 - DNA, 165 bp, Homo sapiens
actggtcccctgaagatgtccctccctgggcctgtactatcttcatatttgctcactagtcacaacacttaccaagtatacattcttcagtttaccactatgcacctcttcatttgaccttcaccattccttttaccatttaatggttaaacctgtgtgccatgt

SEQ ID NO: 154450 - DNA, 364 bp, Homo sapiens
cgatatttgtggttctggcctgttagctctgctagctgtctttcatctctcttggaccactgagtttgtaatccagtgtacactcaataagcccccaggagacttgctaggatgtaagccagcagttggtgaggagaggtgaactcatcctacccttccccacctcttgttccctccacattgtcctctgggactttgcccagtctagtttaaagggactctagagatccgattcttccactgttccctcaagaaattggagcagatgattagtcagtatctttaataaaagcatctcattatgtttaattcactcagcagataccaaaaccacctctgtgccagaccaccagttggggtgcac

SEQ ID NO: 154451 - DNA, 360 bp, Homo sapiens
aaggatggtatgaggagagggctgtgagacccagtatctagttccttgtaattctatgggaaaaagaaagcctctgaaatactttccagataggaaaacagtttgctttgtttctgtttttgtcatttaaaagatatactttcaaatctgtatccaaatttgttacgtaagtcaataattgtaaatttcactgcaatcatatgtttcctaaaagagttgccttgaacttatggaactgaaccccattttgctaatcacttactccttgcagtctatttcttatacaaatcaatatccttagagtatacatttttacacctactatttagttctgtcatgccgacagaatggctaatggct

SEQ ID NO: 154452 - DNA, 316 bp, Homo sapiens
gttgagtgcaggcccaaaggggcaagtggaatcagattccagctcttaaggcaggctcctttctgttccctgtcttctccgtctttctcttccgttggtggatgggcctccagggtcaaggagtaattgagaataagccaattttctgaatagctcaggaaagaaaaacactcaaatatcaccataaagaaaagcatctagtagaaagctagtcaacaactgtttattctgcagtgatgattttccaaacatcatttttctttggagtagttgaactcatgtccccaagacatctttgaatttgtcaatcccagca

SEQ ID NO: 154453 - DNA, 383 bp, Homo sapiens
gaaccccaacatccaaaggcagccaagccgccagagtgagcggccccggcctcagcctgtggtactgcgggggccatcggctgagatgcagggctacatgatgcgggacctcaacagctctatggacatggctcgcctcccctccccaaccaaggaaaagccacccccaccaccgcctggtggtggtaaagacctgttctatgtaagccgtccacccctggcccgttcctcaccagcatactgcacgagcagctcggacatcacagagccagagcagaagatgctgagtgtcaacaagagtgtgtccatgctggacttacagggtgatgggcctggtggccgcctcaacagcagcagtgtttcgaacctggcggccgtagggg

SEQ ID NO: 154454 - DNA, 341 bp, Homo sapiens
ctactccaccacattggccatcatcttgtccttccttaaacaagccacttttcttttaccttttctcccatcagggcttttgtatctgctgctctttctaccaggaatgcccttcccttagacctccccaaggctcccccttcccttcactcagggctctgctcagaaaggccttctctgacagctgacggaaaaaactccccgtctgtccatgccaagcaacacacacccaattcaggactctttcccctttgcaaccttcactgttctcagtacttcggagtctctgaaattgttttctaggtttttaatgcctctcagtcctatgaggatgtaacctc

SEQ ID NO: 154455 - DNA, 702 bp, Homo sapiens
ccggtcactaagtgttataataaagagatgctgagtgcatgaggcccaagtgggctgcatcacatttcccagagaaacgctgctcacaccattaccccatttcacagatgaggtaatcgaggctcagagaggagtccatagctagctaataagaggtggagacagaattgaaacccaggtctctgactccagggctgtgtgcttcctctctccaagcacacagcactgggagagtcttgtctccaagaaggaatgatattcgagatatgtaacttaaatttttggtagtatttgatgtctgcatagtttttctgtatgtaatattgtaaagccttaaaagaattaatggcactgtttttgtgtagctgggttacttaagatttactttgcgatcagtttagaaagtttaattacaggcttacctctgagttatgtttgacttgctgatttttgagaattaaactagtatggaggtacgattacctattccactgcttctaaatttagactgtttcgtgactggtttagaaaacaaaattgggcatgttttagatgaatgctttcagactcctacaaatgaattaatgagtggtcttattaccatattgtaatacttttttttttttttttttgagacagagtctcactctgtcgcctaggctggagtgcaatggcgcgatctcagctcagtgcaacccctgt

SEQ ID NO: 154456 - DNA, 509 bp, Homo sapiens
acaggcgtgacgccgtcttgtcactcttccatcaacattatccattgttagatgaaggaatgatattcgagatatgtaacttaaatttttggtagtatttgatgtctgcatagtttttctgtatgtaatattgtaaagccttaaaagaattaatggcactgtttttgtgtagctgggttacttaagatttactttgcgatcagtttagaaagtttaattacaggcttacctctgagttatgtttgacttgctgatttttgagaattaaactagtatggaggtacgattacctattccactgcttctaaatttagactgtttcgtgactggtttagaaaacaaaattgggcatgttttagatgaatgctttcagactcctacaaatgaattaatgagtggtcttattaccatattgtaatacttttttttttttttttttgagacagagtctcactctgtcgcctaggctggagtgcaatggcgcgatctcagctcagtgcaacccctgt

SEQ ID NO: 154457 - DNA, 986 bp, Homo sapiens
  misc_feature (359)..(359): n is a, c, g, or t
taagaccaagcgagtcctccctcccaattggaaatatgaatcatctacagcctctgccctggtcgcataaatttgtctgtgtactcaagcaataaaatgattgtttaactaaaataaaacaaaaacaaaaacaaaaaaaaaaaaaaaaaaacaaaataaaaacaacagaaaaaaaacaaaaacaaacaaaaaaacaagaatatgtggcggcgcgcgcgcacgagcggcacccaaagatagagttgttacaacaacactgtatggtgggaggaggaggcgagcccacagtgaggagcagaagcaaacgaggctggccaacgacggtttctaccagagaggaagaccctcgtggcacacgncaaaaggtgcgtgggggattcctcccaccaaacaaaaaacagaccccgggggaacacacgaggggttgcttgtaaacaaacccaacaaagaggaggttaaggaagccaacactggggagcacctaaaacaacgggagtcctacacaagacggcggcaagcaataaaaaaaatatacccccgcggtggtggaggggtagcaaagacaacgcaacgacacgaaagacagaggacaagctaacacgaccacaccaacaagccacagaacaaacgacaaccagcaaggaaaacacgaggcgagaaggagcaacagagacggtgagagaacagcaagagacataccaaagccaagaagagaaggataaccgcaagaagaacatgaaggcacggacatacaagacacgcaaaaaagaaaccagccagatagaacaagcaacaaaagaggaacggaacagagaaacacgagacaacatagaagacaacaacaaacgacaaacaacacgaaaaaagcacagcacaagagaaaccaagctgcccacacagacaacacaacagcgcaagcaagcaagaacgaccactacgtagacgaccaagaacaaaacaagcgataggaccagcagcagacaacc

SEQ ID NO: 154458 - DNA, 392 bp, Homo sapiens
aatttgtgtatgtgagcatgtgcagtggcatgtgtgtgactgtgtgcatgtatgtgtgtgggagtgtgactatgcatgcacatttgtaagtgtgagtgtgtgtatgccctggtatgtgtgtgattgtgtatgtgtgggagtgtgactatgcatgcacacttgtatgtgtgagtgtgtatgtgtactggtgtgtgtgactatgtatgcacatttgtatgtgtgagtgtgtatgtgccctggcatgtgtgtgactgtgtgggagtgtgactatgcatgcacatttgtatgtgtggctgtatgaacatgcgcattggcatgtgtgactgtgtgtatgcagaagtgtcactgtgtgggtgcacagtggtataccagaagatatttctaacgttttc

SEQ ID NO: 154459 - DNA, 383 bp, Homo sapiens
agggtcctcaggagacagacgagggcgtgtggggaggcaggggacagtggccaccctcaggagacgcggcgcccctgaattagtgtcaaggagggctggcagagggttggggcagtgccaggactcactgaccaggagagcacagcatgttctgagacctgaggtgcttgtggcttccacgtgacgctcatgtggggagggccatcttctgtgtcaagatgaggcatttggacaagcccccagaccacaacctggcaccatcgtctgtcctcacccagcctgtggtgccagccatgctgaaatggctccaggagttcccactccagcctggtgtccaggggctgacttggagccagctgtctgcccacatggcttggggcaag

SEQ ID NO: 154460 - DNA, 199 bp, Homo sapiens
acactgtgtcactgaatcaaactctcatagcagtaaagaaaaaggaaatgacttttcccaaccaccctgggatttaattctcttcttctgggcctggtttaggacgaggaagctaaggaatcaaaggaatgatagaggagttcagtggttcctgaaaccaggtgggaggctggtcgacgcggccgcgaatttagtagta

SEQ ID NO: 154461 - DNA, 452 bp, Homo sapiens
tgtctcagcctcctgagtagctgggattacaggcatgtgccaccatgcctggctaatttttgtatttttagtcaagacagggttttatcatattggccaagatggtctcgaactcctgacctcaggttatcagcccacttctgcctcccaaagtactgagattacaggtggctcacgcccagccttttttttttctttattatcattattattattatttttagagacacagtcttgctctgcaagtgcagggccgtgatcacagctcactgcagccccaaactcgttggctcaggcaagcctcccacccaaacctccctagtagctgggactgcaggtgcatgtcaccacacccagctatggttctcaatttttattctagcctaacacactggaaagatacagtacacctccatcagtggcagtgacttgattcagcagtggttttcaac

SEQ ID NO: 154462 - DNA, 283 bp, Homo sapiens
caggtccaatgattccccgtcgccacctgcatgactgacacttccagggtcttgtcccacaaatctctggctccctggcccctgacccttcactctggggagccccactgccccccaggaatgccaggacttcctggctctccctggctcacatccctgtccctccatctccctacccccgtagcctttcctgggatcacaagctcctcttcccagcccagctctggccgtgccaccggacttgccctgctcttttctttgcttcttcagtttctctacattg

SEQ ID NO: 154463 - DNA, 458 bp, Homo sapiens
taagcccaggagtttgaagctgcagtgtgccatgatcatgccactgcactccagcctgggtgacagagtgagaccctgtctcttaaaaagaaaacaacaacacactgtaagcagaggcctctggagaaagactgaagacagcctgatggaggggaagcaggtgctagaagcaagggagatttctggaagagccttttttgtctctctgagctttcatttgcttgtcctcttaccttgtccccatagaatttaaggcatactcacaatgcaacagcataaaataaatcaaataggtactatgtgtgaagaaatggagaaaaggaaaaatcagtgtagaaaaataagaaaaagcaagagtgaggttggtgcctacagttcacagcatgtgataaggactgagcatttattctattatttggtcataaaaatgcaggctgtaagggcctacacacaccagc

SEQ ID NO: 154464 - DNA, 291 bp, Homo sapiens
gagggttccctgaggtcagaacccttcaccctacttgggcctttcaaagtggggattacaggggaggtattcagcacattcagggatgcctggacctctgtggatcttgtcactttgtaacgcagccaaatgacaggacctcagtgagcctgaggacttctacccaggcagctccctgtggagctggtgcttccatcagcatggtgccttatacctgataggtatcagtaagaatgttttgggtttttttgttttgtttttgtttttgttttgacacggagtctcgctctg

SEQ ID NO: 154465 - DNA, 559 bp, Homo sapiens
tgccatgtgggaatccactgctatcattcactacacattcacctgtattatgatcagaacctaaattaaattagtggttgtggaaaagaaaaaattgaagagatgcaacaggattcaaccagggattaggagagatggaggtcctggtgatgctgaatccctggttccatatattccttgtacccaactacactttcatataccttctaatagtttatttttacacaacgttatttttagatgggctttatcacatggaaaaaaaatacccttacttattcaatcaagaaaatgcttacttatgctgggtgcagtggctcacacctgtaatcccagtactttgggagactgagggggaggatcgatggagcctaggaagttgaggctgcggtgagccgtgatcatgccactgcattccagcctgtgtgatggagagagaacctgtctcaaaaaaaataaagatgtgcgtaggatgaatgcacaaataagtgagctttgtttccccatccacacctgtaaatggcgtttctttaaccctttaaaggttaggttgaccggt

SEQ ID NO: 154466 - DNA, 582 bp, Homo sapiens
caaccagccccagctaccccagccagcctcagctggagctccgaaagccaagaagtgcccagtgctttgcacctgagtctgtctttgcctggctggctagcatacccctccctgcatagcagcctgtgctgtctttctgtggcctacacaggagggcctaaggggtctagctggaactccctgcccagctggaactccctcaccctccctgtgtatctgctcagtgagatggctctgcttccagcatagaactcacctggttcacaccacgcctcacacttggtcacactgccactcgtgttcagtcccactgccccacctcttcaagcacactgcacccatgatcttccctttcacagctccgtccacatgtgcaagtgcatggtgcctccctaaatggggacagaactggctggtctgtccaggtccctgcagaccaaccagctgctgccagggccagcagggccttggagcagccatgcacaccctgacccagagcatcatggtgaattgcctgagagctccgggagaactttggtttctctttatttgaaactattgtctgtccactcattccgcctt

SEQ ID NO: 154467 - DNA, 557 bp, Homo sapiens
cgctgggattacaggcatgagccaccgcacccagctggtcagcttctttactataacctacctgttttattagcagggtttttgtgtcctgcattttgtgctgacttcctatttcattctgtgattaagactgccttaacttactgggaatgtagcccagtaggtcttagccttattttaccaaacccctactgaagatggagttgctctggttcaaacgcctctgacactatgatacagagaaaaggtagaaaataggaaattctgctcttaagaaattcatatagtttgaaaaaactaatttcagtggagtgtaaagttataatacgagcacttgtttctgcagttatacccttctttgttgatcctttgcctcccagccatccgctgtgccattttctctgcctcttcacaacaaaacttatccagagtattgtctcagtgtctttgctttcttacatcctattccctccttggcatactccaatctgtcttctgtcttctttactctgctaaaatcgccagggtctccagtgattgatgttaccatatccagt

SEQ ID NO: 154468 - DNA, 422 bp, Homo sapiens
catgtgggcatcactgctcacatgaataaaggtggactctaattctacccaattaatcttaaaatgtattatttggagaaccaagtctttctcctagctaagtacatgaaactttaagtacttttggggtttttgtttttttttttttcttgagacagggtctcactctgttgcccaggttggagtgcagtggcacgatctcagcccactgcaacctccatctcctgggttcaagtgattctcctgcctcagcctccctagtagctgggattacaggcacgcaccacagcacctggctaatttttgtatttttagtagaggtggggtttcactatattggccaggctggtctcaaattcctgacctcaagtgatccacccacctcagcctcccaaagtgctgggattacaggtgtgagccac

SEQ ID NO: 154469 - DNA, 319 bp, Homo sapiens
actctgtctcaaaaaagaaagaaaaagagaaaggacaccaaatctgtttttatcactataggacacagtgaacacagcacgttgattatttgagaataattgtttacatgtcatttcccactacgagactctgaatatcttgaggactagaataccatttccttggcacctagtacggtggaaaataaagtcatgaatcctagccaggcatggtggtacacacctataatcccagctacttgggaggctgaggtgggaggatcacttgagcccaggagttcgagaccagcctcagtaacatagtgagaccccatctcca

SEQ ID NO: 154470 - DNA, 377 bp, Homo sapiens
gtaattccagcactgtgggaggctgaggcaggcggatcacgaagtcaggagattgaaaccatcctggccaacatggtgaaacactgtctctactaaaaatacaaaaattagctgggtgtggtgctgcgtccctgtaatcccagctactcaggaggctgaggcaggagaatcacttgaacccgggaggcagagattgcaatgagttgagttggcgccattgcactccagtctggcgacagagcaagactccatctcaaaaaaagaaaaagctgttaccaaaagctataattttaggttttagggcagtaagcaagaaaaggcaagaccaagagtccgctagggtgggcctccaacctacaatcttagaagaaatgtca

SEQ ID NO: 154471 - DNA, 392 bp, Homo sapiens
ctcatgcggctctcccatgtgaatattccatgccacctgaagtcctggcgccacccgccgggcgagggccggcgtgccctcacctcctcgccactcttctcctccagagacctcgctcggcccggagtgggcagactcggagcctcccgcgccggagaccgcgagccgctcggccgaggaggcgcggcggggcgggggcggggcggaggggccggcccgcagcccccaatgccgggagcccgcgctggagacccagggagcccagctcggggccgcggcacggagaacgaaccatccgtggcctggagacgtatcccgccgagcggccagaactttccccatttagcgatccggaaaggaagccaacactcccacccagagaggcctcggcc

SEQ ID NO: 154472 - DNA, 862 bp, Homo sapiens
ccgcgcaatgcgcttcttctgcctgcagcagagaaaaggaaagaaaactccgcaggggctccgttggcttctccacgagtgacaaccatgttttcccagatagaagaccggagccctgctcctttgcgatccgccgagggctgcagagagcatcctcatccatttgggcacccctgcccaggaagagcccggccatccctttccggactggatccttaagaggtgaattttcttccgtggattccgatttgctccgtctgaccagcctaggcaatccagcatcgcgtggtaccagtgccgctgggcacactggcttcacgccggctccgcctcaccagcaagcgcattcccaggtggtcaggctcaggatggaccatgagctttcaaaaaggaaaaaggtggaaatcctcaactatgctgccatctgaataagtgtttctttgtagatgcacagagtcaaggaaaattacatccctgcattatgtaatgtaccaacaacgcacttacccactgttttaatctaggttattcttgaaagcagagcctgagacaaaggtagacacattctatttatgagtctaacacccaggagcaggaatgagagataggggagtgaactggggaaaagggaaactaagtccgagcaaaaccagatactgctcttatcaagtggtccacccctattaatggctacataatgcagaactttctcaggattcttcttaaactttatctcagaactgtctgcctcagggagaaaggagaagtatttctccatcagcagccacctcctgtgtgttgagggctgctcctttggggcattaacccacttgctccaccaccccaaccctctgggctgcaa

SEQ ID NO: 154473 - DNA, 698 bp, Homo sapiens
ccgcgcaatgcgcttcttctgcctgcagcagagaaaaggaaagaaaactccgcaggggctccgttggcttctccacgagtgacaaccatgttttcccagatagaagaccggagccctgctcctttgcgatccgccgagggctgcagagagcatcctcatccatttgggcacccctgcccaggaagagcccggccatccctttccggactggatccttaagaggtgaattttcttccgtggattccgatttgctccgtctgaccagcctaggcaatccagcatcgcgtggtaccagtgccgctgggcacactggcttcacgccggctccgcctcaccagcaagcgcattcccagaggagaaaatgagacactgagtgggactcagggattgctccaggccacacagtcagcaggaggcaaagcccagattcaaatgcagattactcagctccacaatccacatcctcacaggaggctgcactccttgcccaagcgtcagacaggagcaaagagaaagaaggcaaccagctggctactttcttcccttcttggatgcctccaacagggtgagaaggactaaacaaatgaccaagtgtcatcccattttggacatacttaaaacaccccatggaatttttattctgactttcttctgcctgtgtggcatttatgtttaaataaaagagaattcaactcgta

SEQ ID NO: 154474 - DNA, 758 bp, Homo sapiens
ccgcgcaatgcgcttcttctgcctgcagcagagaaaaggaaagaaaactccgcaggggctccgttggcttctccacgagtgacaaccatgttttcccagatagaagaccggagccctgctcctttgcgatccgccgagggctgcagagagcatcctcatccatttgggcacccctgcccaggaagagcccggccatccctttccggactggatccttaagaggtgaattttcttccgtggattccgatttgctccgtctgaccagcctaggcaatccagcatcgcgtggtaccagtgccgctgggcacactggcttcacgccggctccgcctcaccagcaagcgcattcccagataaaacactaactcagagaagaaatttaactgcaaatttggttaatgaccatggattcctaatgagaagaaaagctagacactgagagtttagaataaactcaagaatcttaaaaattttcccatggaactgcctttgcacctctataaaaaattaattgaccatatgaaccgcctgaagtctgcatcatgacttgatggttacccaggggtttatgtgtgtccaactgaacaccgtggttctgggattgaggatccgcacaaacacaggcaggagtttggagggaagaagggggcacagcaggagtgtatctcaagcccacctcaaaggcagcagagcattccaagttgctgaaaacctgtgcaaatggggcctctaaaacaaacattgtactgtgagctctc

SEQ ID NO: 154475 - DNA, 881 bp, Homo sapiens
ccgcgcaatgcgcttcttctgcctgcagcagagaaaaggaaagaaaactccgcaggggctccgttggcttctccacgagtgacaaccatgttttcccagatagaagaccggagccctgctcctttgcgatccgccgagggctgcagagagcatcctcatccatttgggcacccctgcccaggaagagcccggccatccctttccggactggatccttaagaggtgaattttcttccgtggattccgatttgctccgtctgaccagcctaggcaatccagcatcgcgtggtaccagtgccgctgggcacactggcttcacgccggctccgcctcaccagcaagcgcattcccagataaaacactaactcagagaagaaatttaactgcaaatttggttaatgaccatggattcctaatgagaagaaaagctagacactgagagtttagaataaactcaagaatcttaaaaattttcccatggaactgcctttgcacctctataaaaaattaattgaccatatgcttatttcaccaactagaacttccaataaaacattgaatagaagtgatgagagtggatatatttgccttgttcctgattttagatgataaacattttgtctttcactttagatatgatgttagttctaggggctttttgaagatgagcattattatgttgcaaaggttccatcctccttctagtttgtgaggaaatttttatcttaaatggacattgaattttatcaaatgccttccctgcgtctattgatatgaccacatggtttttcttaagtctattagtatggtgaattacactgaagatttttgaatggtgaaccagacttgcattcccccaaataaactctacttacttatga

SEQ ID NO: 154476 - DNA, 243 bp, Homo sapiens
acgcagagcaagaaatacctggggagaaccctagtgcccggacccctttgaacacaagggaagatagtctcccctcagccagccctccagggctccttcattttccacagctgcccaagggcagcaggctcccccggacaagggaccatgtgtgttcagtggggcccacagcgaccatcaggacccagcttagggcacagaggtgttctgaggaccgtcagtggatctgtaccagtggctcta

SEQ ID NO: 154477 - DNA, 519 bp, Homo sapiens
aaagggagcgagcatttagactttggtggccccgccaagttgcattccagaaaggcttcaccattttcactgctggcaaacagcagccggagcttttgagtggctgttccatgccaggcctgtgccggactctggggaccttggcaggagtcagcctggggctggctgcttcctaattctcagtcctcgagtcctacctccgatctcaagaaaaggtgaggatttcagagaggccataaaaaggagaagcaagagatgattgtgggtggctgaaggcggcctggcacatcccaggtgatgggagagctggctgcatccgatggtcccaccgcagggagcgtgaccaggaggtggagtgtattggactgggaaccgcacgtgtgggctcccatcactgtgtgccatgttggggtgcagttgaggggtcaaataatagtaccgccctcatgggacttgtttgggaggattcagtgagagagcagagagcacacagtcagaacttaaggatccgggttgtca

SEQ ID NO: 154478 - DNA, 491 bp, Homo sapiens
atgccaacctttggaaaaaaggtaggtcaaggaagaaatcagaacaaaccctgtgaccattccagcctccttgcatcttgggcttgggtttggaaactgaccagcaagctggagctgccaccacagagaaacatcaaagcaaaagggttccaggaccagagattaggtaactagctacaggccagaggaatgcttccctctctagatcaacaagcccctcctttcactctgaaaaaaagtaagtacctgagggtccgtccttgcaaagcctccgctcttcatcgccatccctgaacaccgtgttccttcctccttgtgctccttttgccttttcatgcatccggtgtctgtcatcaggctgccaccggtatcgaagtcaggacagttcactgcgtaagaagtcaagcatcatgggatgttggctgtggcgtctggtcattgtgccagcctcaccacagacatgtgaccactgtcccaaggagggccgtatg

SEQ ID NO: 154479 - DNA, 237 bp, Homo sapiens
aaagacaaagaaacaaacaaaaaaaaccccacattctaaagaagcatttattatggggctgtttattatggaggctgatagcgcttcactcttactaactgccaggatagagatttggtaggcctagagaaaagaaaggaaaatcctaaaaaagaaaaaatttcccttgtgttttctgacattggaaaaagatttttttttaatatattgaatgattattgttacacattgaatggg

SEQ ID NO: 154480 - DNA, 357 bp, Homo sapiens
aagagtgttttgtattactctggaatatatctctacattcgtatcaaggtctttcgcttcacctgaaactccttaaccttaaatcttttctgcttctccaaatcatgttgtctggatatttaacctgtgcactaattttctcatcagagagataatacttgctttaaatcacagaatctttaatacagttagttataaagatgagcccatcagataaaatacagcttttctttaggacagtttatttttggaagccttcctgatttcccaactagaaaggactttacttcatagtatttagtgccttctcaaacataatttgctcaagatcagggactgaattatttaaatttttct

SEQ ID NO: 154481 - DNA, 526 bp, Homo sapiens
cagaagaagaaagctagagtaagggtggaggctgaaacttatgaggaaggtttatgaagaacagtcattctgccagttgtattttccaatcattggtgccaccaatatatcccatcccatatactcttctcacactatggagctgacactccttcctcgactgtggttggagtggaagtgatgccatgggacttccaaggctaaattgtaaccagtgaaacagcttcctctggaaatgcacacccctgggacccagtcaccatgctgtgaggaagccatgcagccacaggacaggccatgtgggagtgttctggccaacagccccagctgaagccccagccaacagcagtgtcaagtgccagccacatgagtgaatgaggttcagacaactcctggcccaggctttgggccgccccagctgaccaaaatggagtggagcaagatgagccctccccactaagcctcaccgaaattgccaatttgtgaataaaataaaagttgggcttgtttttaagccccttgaaat

SEQ ID NO: 154482 - DNA, 156 bp, Homo sapiens
gctgtcctgattcgaggctggggcatggctggggtgacctcgaaagcacactgctccattggagaattggcccagaaaccagtcctggccctccccccgcctttcctgttcgcctcagctaaatagatcagaaggaaaaagtctgtttgattttaa

SEQ ID NO: 154483 - DNA, 223 bp, Homo sapiens
aaatgtgggagtgcggaatggggtgggtgagaagcaaaagagagcagcagatactttgactcaccttgttgggtagaaggaagaaaaaagaacagatgtgaggacactgagcttttcaaggaataagtctgaggaatgataattaagtttttatcattttttgggtggtggcagggggatttttattattattattattatcttgcctggttggcttcaggtc

SEQ ID NO: 154484 - DNA, 328 bp, Homo sapiens
aaattggagaggtgcccctctcaccctactatgcattagaaaagcaaaaagtgttcctttacagaccagtccacatttgcattgcatgtgagcatgtattaatgcaatttgcctctgtggtcagatatgtagcttttttcctatgtttctgttccattattattgtttgaaattccataagtactaaaaaaaaattcttttccatctctaaatgtggtttgcatcgttgttccctttactcctcgatgcgaattctttaaaaacttttttttaatctcatagaacatcaacccttctgtactcgacaaagacaagtttaaacagattc

SEQ ID NO: 154485 - DNA, 355 bp, Homo sapiens
ctctatgaggatcccccttgaatttgaactgaatggaggaaatttctaagcaggttcagagaaaggatatcaagctgtgtttggagaaaggggtgggaattctaaacaatatctgtggaagcaggacatctagaaccacagatgtattcagaaaaatgctagatctcagtactactctagaataccagcagttttctgttgatggtatgggaagggtgatatcttccgttggtgggctttgcctttgacattctctgtgacatatctacactgcattttaaacgtcaatattattgtgaattgtaagttaaaataaaatgttatctcattcagttatttatacatttaacttcca

SEQ ID NO: 154486 - DNA, 338 bp, Homo sapiens
agaaaaaagccgggcaaagcagaaggattcgacccatgcttatgtgataaatttggtgccagctagttgagctgaggaatctgagagattagaagttgttggagaatctgtggtttcagctaaagcagcagagaatatggccaaggagtccatttgggtctaaagtagagaagaggttggtgcagagaagctctgtgggctgagtccaggagactgtttggactttgggtgataaagaagagagaagataccatctgaagctgggttggtatattttgggttcagagcaaagaggacctgtttctctaggatgaattgaggtaattctgctgcgatct

SEQ ID NO: 154487 - DNA, 878 bp, Homo sapiens
aggtacaaactaatccttagctatcaaaagcccaagtggaagaggcaggctgttgaaagcttcacaagaccattgttaagaggcgaatgtcccatgtgagtggaggaggacccatagatctgtctgacacagactccctacaggcatggatcaacatgactggcttcctttgtgcccttgggggagtgtgcctccagcagagaagtaattctggcctgccaacctatagcccacccgtgggtccggtcagtgaacataagggttccatgatttcagtgatgtcctcagagggaaacgcagatacacctgtcagcaaatatatggatcagctcttgtcgttaatggtgtgtaaccttgagaaagtgggacttcaaataccgaccaatgataaggacctggtgggtctagaattgagtcctgctctttatctgatgctatttaacaaattgaagaagacccatcagcaagttttttgactcctaaggacaggttttattgactgataccaatactcaatttgtagagcaaaccctagatataatgaagaacttgctagataatcatactgaaggcagccctgaacatctagagcaagctagcattgaaacaatgatgttaaatctggtcaggtacgtttgtgtgcttgggaatatggtccatgcaattcaaataaaaacgaaactgtgtcagttggttgaagtaacgatggcaaggagagatgacctctcattttgccgagagatgacctctcattttgccaagagataaaatttagatttccctaagctttgtgcctgtggcaagcctccctttttctaaaactctgctgtacttgagctaagaatttgattctgtttccaatctgatagcataactaa

SEQ ID NO: 154488 - DNA, 582 bp, Homo sapiens
aagtgaactttcctcattatcatgctaaagtcagcaccctgggggggaactacagcttcattaccataacacgtgacctacctgctgacatagtgactcactgcatttgcaccactgggacccctcctctacatgtgatgtcacaccctctcccctctccatcaccccataaaacctccctgtcactttccctagaggcaacaatgctctaaagaatactccaagtattctccttatttgtgacaagtagtaaaactcctactgaccaaaacctgcattctcttgaagagttgtttattactcaccaggcaactaatcctggttttcaagtttttggcgggtaacaaatggttcaggtatgctgcatatcctactgtcacagattgaagtttttctcaatctttttggattaacagcactttagcattaaaataaattactcatatacctctatgggcacataaatctgaaggtataccctttccattaaagcttaaaaatgccaagaattctaaattttaagtctcttcctactttttatagaattccagagctaaaacattaagcattcatgcaatccag

SEQ ID NO: 154489 - DNA, 532 bp, Homo sapiens
gagtatctaattgtagttttgttgttatttttcaagagacaggatcttgctctgtcacccaggccagtatgcagacacagtcatagctcagtgcagcctcgaactcctggtctcaagaaatcctcccacatcagcctctcctgtagctgggactacgggtacatgccaccttgctcagctaatgtttattttttcgtagagacggggtctcatgatgttacccgggtttctaactcctaaccttaaggaatcctcccaccttggcctcccaaagtgttgagattacaggcatgagccactatgaccggccttaatgccttaattagttttgatccgcattttttttaatgatcagtgatattgagaatatttttatgtgcttattggctattcatatatcttctttggagaaatgtgcaaattctttggccatttttcaattgagatgtctttatttttgagttggagtattctttattttggacaaaagtctctcagataaatggtttgaaaatattttatctcattctgt

SEQ ID NO: 154490 - DNA, 465 bp, Homo sapiens
atctcctgccttccaattccagacatgataccctgtcagtcagttgccctgcaagactcaacaaaagggtttcctccctgtaaatgtttttatgtctccactcaggaaagaacatcctctccctcacttctctacattgtattctatatggaccacctcagtgatagctccgtgagccctacagagaaagtcagctacagtgaataaataaggcttgggtaactattagggacttttaagacaaaatatgcatttgacaatgaattaattaacattatgtaacacttgattcaattgcattgttttgcatgtagcatatatcaacctccctgtattgcagtgagtcattccagatgtagggaacacatgtactcatcccatccttgaatcccacgttcttccataataagtgtttattagtagatgtgtgttacatgaataaattaataaattggtgaatgaatg

SEQ ID NO: 154491 - DNA, 474 bp, Homo sapiens
ttagatgtgagttaattgctgaccatgtggatttagaatctgttttaaactgggtgtatttagaagacagtgggtcttcattggttgtggttttagtatctaatgaaaccagttttagtttttagaccagtatagctatcttgagaattaactttggagtctatgtggatacctggggctgggctttgattctgtcatcttcagaagtagtgtcactcttccaggtagggcacatgatctgtttgtgagcctgatttttcatttgggggaaatttttcttttcctttgcagaagagagttggtttatatcctgagaaaagtagttgcccaaataattaacaaatatggatactgctgattcttctttcacttctttttttatttaggctaattttccccagcatcctttgccatgtggctactttaccagaacaaaggcaaattcctttgcctcattcttgcatcatttgagtt

SEQ ID NO: 154492 - DNA, 293 bp, Homo sapiens
ttagatgtgagttaattgctgaccatgtggatttagaatctgttttaaactgggtgtatttagaagacagtgggtcttcattggttgtggttttagtatctaatgaaaccagttttagtttttagaccagtatagctatcttgagaattaactttggagtctatgtggatacctggggctgggctttgattctgtcatcttcagaagtagtgtcactcttccaggtagggcacatgatctgtttgtgagcctgatttttcatttggggggcaggcctcagaagggatggggtg

SEQ ID NO: 154493 - DNA, 331 bp, Homo sapiens
tgcaacctatgtgaatatcacatacacgtttctgtgtcttactagaaactatgatttcacatccatgccttcggttacagcccagcatcccaggggtcactcttgctggtctgtatttgtatctcctttctctggctgtgggagccattcccatcatcctcaacacacacacgaggtcaatcttggtgtgtgatgatctccctgacaacactggtggccttcttggctgcgccgtgcctagtgaccctgtcagtgggtctccctggccctgcagaatggtgactcacccttaaagatttttatgctaggtagcaatgcctaggaactgttt

SEQ ID NO: 154494 - DNA, 266 bp, Homo sapiens
acacttcagaacccaagaagtttggacaagggatactaaacaggtacagagttttatgaagcacattttaaaatccatgaaattggaactttaaaactggtaagtcacaatttaattggtagccctgttcttcccttcctgttgttttttgaaatggagtgtcttgctgtcacccaggctagagtacagcggtgcaatcttggctcactgcaacctccacctcccaggttcaagcaattttcctgcctcagcttctgagtagctag

SEQ ID NO: 154495 - DNA, 727 bp, Homo sapiens
  misc_feature (1)..(3): n is a, c, g, or t
  misc_feature (719)..(719): n is a, c, g, or t
nnncagatccagagaacactgcacatgtagaaatgggcttggcctgggtcagggcattgagattggttacataatcttttcaaggattggtgaatgagttggagtatgtgtagaaacctacaaagatgacagtttaatctcatgtcataatttttagacaaataatgtattttaaaactgggtgcagttcctaaagctgttctaaaagtcaatgcaactgaatttggaatgtaagcataggacaacagatgggaaataagtacatgacctctgtgggataaagtgagagttatcaaagaatgtcagtgtttataacaaggaacaagcttgttttggagaattactagatattatggaaaatttttttcttttctacatttggttaactatagctgaactatagcagatcatatgacttggcaaaaatagaaaacttgataaaaatcttctaggccccacaatgtcaacatgaacaaacttctgaaaagtaaaagtagaccgtgttttctcagtatgtgttatcaaatatatgttgaacatataatttttgcccctcagccaggttgtaatattttcctttagtttatctctttaataattgtttacgttaatccattttattttgaaaaaataatgagctagaggatacaaagatgtaaatgaatctaaaagagagaattaaactggcataaagataaatataattcaagcaagatacnttattccc

SEQ ID NO: 154496 - DNA, 1359 bp, Homo sapiens
gcagacctttgttctctgaccacttgataatgtcaggacgcggcaaaggaggtaagggcctggggaaagggggtgccaagcgccaccgcaaggtgctgcgcgacaacatccagggtatcaccaagccagccattcggcgccttgctcgccgcggcggcgtgaagcgcatttctggcctcatctatgaggagacccgcggagtgttgaaggtgttcctggagaacgtgatccgggacgccgtgacctacacggagcacgccaagcgcaagacggtcaccgccatggacgtggtctacgcgctcaagcgccagggccgcaccctctatggcttcggcggctaaatggcattttgaagcccagtcattctctaaaaaggccctttttagggcccctaagctttcaacaaaagagttgaaatgactgcaaactgagtctcttaatagggccattgtcagtgagttctgtcatcctattttacaagattaactcgacgccgaaaatgggctgatgactacaggtgaccttgggccgagatttttccaaggccagaagagcctctgctggccagtaacttctggcggctgcctggaaattgcctgcagccggtttaccgctcggattagtttagaaagccaaggggtctgcggtccaaataggggcgggctagataattaacttccctctggaccttcaaatacgtctcaggagataatgagtttgatgggctccactaaatgctagaacctccaggaaaacttcgtggtggctggtttaagaggacttggcgggcacagagctctgcatgggggggagggggacagaccatgcttttactactgtagaacagtagggcagtcttaagagtcttagtaataatattcctttatatgtttgccttttaaatactggaatatatcaagtatacaaaatgcgctggtgaccacaccacttattcaagtgcatctaaaatccttatgtccctttctcagtagcacagccctccctttttcctatctagaattaactaatattctaggataaactgatattctaaatttgtttactgttcccacgcgttttaactttagatgcacatacccctaatctattttaatcgtcatgaatttttacatttgctcttgaaatatatccgtgttgaaatgtgcagttctaggttatttttaccattaatctagttttctaatgtgtcagtaaatactttattcatttctctgttgattttttttcctcattacaaaacagcactgtatacagctgtgcattttctggttacatggaagtggaattatttggtaaatgtgcatattcaacatgaataaaaatgaacaatttgctttc

SEQ ID NO: 154497 - DNA, 353 bp, Homo sapiens
caaagtatgttcatttaaaacattttaaattttggtcccttgaaaagggttatacttttgtttctggaaaattaactcaggaggaacatttcattccctagtgaggctggataaatgacacacagttgaaatgtcttatctccgaagtacttaaggtgccaccaagcaccttaaatgacaaagcagaaaatgtcagagaatgacagttaagaagaactaggccgggtgcggtggctctcgcctgtaatcccagcactttgggaggccaacacgggtggatcacgaggtcaggagatggagaccatcctggctaatacagtgaaaccctgtttctactaaaaatacaaaaaatt

SEQ ID NO: 154498 - DNA, 79 bp, Homo sapiens
catccccattacaccctcgggaaagaggagccagccccctttcaagccttagcttccggctccaagcggaccccctccc

SEQ ID NO: 154499 - DNA, 516 bp, Homo sapiens
ctttatacaatactcaatgagagcagaacatgccacccaagcccttggtggagcgccccgtaaaaggaacctacctatttgaggttgagaagaggctaagggagaggtctccctgaggagaccgactttgacaccccaagacagcagggaagggggagcttaagaagaaacaatgctggcatgacattcctattgccttgtcagggacaccgccagagatgaactgggataaagcaggagaggagacagagagtgtcagaccacattccaccaagcattgctgtgattcaacctggggaagctgattggaaaaaaaagaaagaaaagttttgctgtgaagcaaccctgtctgccaaaaactgaaaatgaagaaaagatgtattccccaccctctaccgccaagtaccatgaaagcccactacacttcactccactctaccacagcacccttcagcagataactagccccactccaagtaaataataatcagaaaggaattaacttgggaactttgc

SEQ ID NO: 154500 - DNA, 524 bp, Homo sapiens
tttgtaaacttatcattcagcacctgacacttggtaagtattcaaaaaacagtagtgcttattattatttcatgaaataatgcctaaggtggtgtcccttcttggaaacacaggcccatgaaaattcatccacagtggcaaaaatacactaatttatatccactaagcaataagatataataaagggaaccctaagcggaggtttgaaatggatgatctgtgtattcaaatactccgtatcatcctaaaatgaaggtggcatttacaacagctgtgcccatgcaatcctgcgaatgaatttgctacatgatatatcctaaagctgttgttaacccaagtttagcatccatgataacatacccatgcttctataagcaggaggaacctagagttgattttagggaaatgaaataaaagtgaaggggggtgacactcggggcagggcagaacaaatgcactgcatcctggagatgagctggaggggaaggggcccaaggagaggtgtgagatgggatatgagaaag

SEQ ID NO: 154501 - DNA, 239 bp, Homo sapiens
accggtatagggcactatgtgtactgttgatgagcactccctacccacactcctttgctgctctccctctctcctccactctcctggcactgacatgggctagtctgctctctctcattggcacagcaaaatctatttgattcgtgccaccacctcttttacctcattctttcagtggcaggcaggtacccaggatgtaacagaggatggcagagaagagtgaaattctacacctgtgg

SEQ ID NO: 154502 - DNA, 434 bp, Homo sapiens
gtctgccgcgatctagaggatcccgacgtagcccactgctcaaaacaggagctcttgtttatgtgggctatgcctatcaatgtttaccttagtagtcagtaaaactgggatttttttttcaaaggaacaccattatgaatagatgatgctaacattggtgtatccaccactcagcttcagaaatcaaactttactgatatccttgaatccccatatgtgtccttccctgaatgcattcctttgtcccccagaagtacagactatccaggattcagtgtttatcattcccatgtctttctttatgggttttctaaatttagaatatccccagagacagtttaaaatttttaagccaatgcagccataacacagtatgtgtattattttggaacttttattgacttggttcatccacccctccaggtgccattggt

SEQ ID NO: 154503 - DNA, 416 bp, Homo sapiens
tgaaggattctggttgtggtacagggatctgtaaatggggtggttgatctctaacccccaccccccaccccagctctgcaattctatgcttctagactctctggaagggaacaccaccaggaactgtggctgtcccactgccagaggatacctcacctatgccaggtgtcaccaattacctatttccagctgtagggcctaggaccttggccaacattggctccttccaccaggtaacagggccagttaggctgtacaagggatccatcttccactggagatgcctccagtgcctccaggttcactgatcattggctgcagtgtgtgctctacttagccaactcccccttgccatagcctctttccgtctccctgctgtgtgctgttccctttcagtgctgactcttgtccccttg

SEQ ID NO: 154504 - DNA, 433 bp, Homo sapiens
agtggcggaataaaaccaacttagtacactgaaccagcattttaaaaaagaaataagtaaaaaagtatcagaatgaattgcacaaagagtaaacagtgtttttaaaacttctttttcatacatataatgtatggactgggtttcaaggtttaaaaaaaagtacatgttactatgtttcacaaaatttgaaaaacaccatcctagagcaataagtctttttcttttcttttttgagacagggtctcgctctgtctcccaggctggaaagcagtggcacaatcacagttcactgcagcgtccacctcctgggcccaagcaatcttcccacctcagactcccaagcagctgagactataggtatatgcctggctaatttttaaattttttgtggagacaaggtctcacttggtttcccaggctggtcgtgaactct

SEQ ID NO: 154505 - DNA, 428 bp, Homo sapiens
gtgtattttacactggagcccacccaggctcagtccttcattacatctctctcagagagatggtctctgaccacccaggacaaagcaggtttttctgtgagtccctgtcagaacactctcctttttccctccattgtacatccccacattttggaattagtagtttacttattcgtgtgtttttctgctctcctgactagcccatgagctccctgagggtaaggaccaatgtgtttaattcaccactgcagccccattgcccagcacaggatctgacatgtacagatgggcaggggcaacgttgaaagaatgaagagcatttttgtagacctaagaacaaaaagatcagctgtcacctgcaatcaggacactttactcttccccctgcatgcatcactcatcttcccagttgtgtatcaaaagctgcc

SEQ ID NO: 154506 - DNA, 160 bp, Homo sapiens
cccacataataatatctgtagccaccttgtggggccctgcttctgcagacctgtaaatgtcttctctttcctttcatattttgggcatcagatggggaaaattatgcttctggctcaaggaatatccgtattaaccactgttaaagcaattgctgggcca

SEQ ID NO: 154507 - DNA, 364 bp, Homo sapiens
ttgcatcaagaaaaaagttgcaaattaatgagaatatatgtgtatatctctaagattcatcagcacccaaaataccagagcaagccagacgtcatagggaagccctgagcagaatctacaaaaaaggattgaataatttgattattcagagaaagcatatttctaggggatggatctaagagtagcttgatcatgaaaatggtgggaaaaatatagcggcaagagggtcactaggtggaagtaatatgtctagtttttttgagaaccacacttgagctaaacctttaaaatccaatcaaagaatgaaaatgaatagattagtgtgaggaggtaaacgtatcatttgaaaatagccttggacttg

SEQ ID NO: 154508 - DNA, 455 bp, Homo sapiens
actgaactaggtcaggcaagagaaattcattcagctgcacttcagtttgtgctggattaggcttttcagttctcactttcttccttcccgctgttctctgtctccctcatcttctgcagtgttctgcgagtgtcttagagggcgatgtaagttttacaaagctttttgaaattagaatgttctaagtttggaatagtagattcattaattttccaaaggctaactactaaggaaaagtgtgaggtttttttcttatcaccatcatctgattaaccaacaaagattaagtgggcaatttaacatgtcgtgatatctgccataactatcagttttcctgagttatttaaaaagaaaaacaaaacatctcatttgtctggtacgtccaagaatgaattaatagtttatatcagtaaattttctggattatcaaagcttactacagtatgtgtcaaaac

SEQ ID NO: 154509 - DNA, 107 bp, Homo sapiens
ctccgtctcaaaaaatttaataacagcattggaggctgtgtcaccacttacacctggcatcctataataacacacacccacttgcctgttaactcacaacttttaag

SEQ ID NO: 154510 - DNA, 465 bp, Homo sapiens
tgagaagggaaggaattccagaatagagcaacagactaagttatgacctgggtgggggttagcatgactggtgggaaagacagagaagagagcacaatgtatggagtaaggtggccttattttgaagtcaaggaggacaggattggtgagagaggataggccagatcatggaggaacaaaaaacttaggaaggcctagcacagtggctcatgcctgtaatcccagcactttgggaggccaaggtgggcagattacttgaggtcaggagttcgagacgagcctggccaacatggtgaaactctgcctctattaagaattagctgggcctggtggtaggtgtccgtaatcccagctacttgggaggctgaggcaggagaattgcctgaacccaggaggcagatgctacagtgagccaagatcacaccactatactccagcctgggcggcagagtgagacttcgtctc

SEQ ID NO: 154511 - DNA, 572 bp, Homo sapiens
gtgactagaggatcccctgcagcagatcatttcatattgctccgtggagtgtggcgagtcagcatcaatactttgcccttcctcctgtccccagctgtatcagtttgagtctgctggtgagtatgttcactgcttctcatggtccttctgcaaagtgctgcccagccctgctggccgctttgtgtctagttcacgactggctcatgggaacaaccttcccgagttcttgcttgttcaaaacggcctggacccttcaccatgaaggtcggtttggctgaagatgccagtcttaactccacttccttcccccagtgctttttagggccctaccgggcactgtctggagggtgggtgtgtgtgcagaagtctggcgatgtctgagttctcgatctcatcagtgactcactgtcattgccgtgtcttggtgttggccgttacagggcattttcgccaatactccgggtgcttgttgaacgtgttgctggacttcagggaagttgtctgtttgaaacgtgtgtttggttctgtttggttttctgcttctgggctgcagtgtggcgtgaggtggcttt

SEQ ID NO: 154512 - DNA, 508 bp, Homo sapiens
aagttgcagtgagctgagattgcaccattgcactccagcctgggagacagcaagactccgtctcaaaataaataaaataaaataaaataaaatactctttcccagacttaaccttctttcttttggtaccttaccttgccaaaagagggttttgttgttgttgttgttgttgtagttgaactagacggtcctactgaaatgttgggcatctctctcagatgtgtcgcgtctgaattggtgctcaattctgtaccgcataactcctcttccagttttctctaacatggatggtggactcaggggaactgtactctgtcggtttccagatagtagtggggaacgagatgctgtgcgaagatggctgtcctgttgaccatccaagagtgtcttctacgcccaagatggatggcttctggaaatgtacagcctcatctgtagtaaccatcaaacggtgaagcatcctggtgaagttgagtggactggggaacactcagcattcctcgcaaca

SEQ ID NO: 154513 - DNA, 452 bp, Homo sapiens
ggatacaaaagcagcaaggacagagcatgaacacaggaggcacaaagttctagcacatttgaagacacgcctaaactcttgccattagaaccttcaacatttttccccttttcccaaaatcgtccctttgcttactacatattgtcagtaccgccttcaaccaaaagcatagttaatggatttgatatcaacgctctcaagtcttaatacaccgtgttacctgtgacttcgactgacatatcctttccaggggatcagatgggaagggtgcctgacaggaacactggagaatttcagtcctgatttgaaatgaatgatttaagccaactgatgccgaaacgtggtgtgttcagaggacccgctggaggaatgcagcgttgtgcctctccccatttatcatggtgtttacaaatcctgttagaagttgaaagtaaattatcatcctgctctta

SEQ ID NO: 154514 - DNA, 381 bp, Homo sapiens
attcagaactatgaaaacccaggagcttctcctgcctctcactttagcttttttaggccctttttattctagtcactggaggctaagagtccaaaacaaggcccccatgttcatgctcccctgtctgggcaaccagcatcaggcctttgggatagcatcttagctcctttccttcctgcaggtacccattcttttttattcaatacccaaacaaaactatacacttcatcacagtcttctaacttcaggagaataagattattcagaactctgccaaacgccaaaagatcacagcattccctacctagccctcgcttccccactaaagcctctaggatgtggccccacctcagctctcatttcttctagcctcaccactgg

SEQ ID NO: 154515 - DNA, 412 bp, Homo sapiens
gcactcatccctcatctgtcactcccagacctcctcttctctcagcgtccacactctggtggatcctgaagcctgggagtcattctgcattgccctccttctctcatggcctccctcttccgcctacaggtgatgagtaacacacaccttctcaacatcttggttccccttctccatcctgaagccccgccaggtgttgcccgccctaccctcatcatgtcctggtttctcagtcttgtcctgggtttttcctatccagcctccaagcagtttccggagagtgcttctacgacaatggaaatctgacactatactcctcagcttcaaatagaccgcggctaacactccctatagaggaggaagtcctcttcgcagagccttcaagcctccaggagcctgcaggccccagccc

SEQ ID NO: 154516 - DNA, 279 bp, Homo sapiens
ggggtgggatcagtgaccatagttctcagggggcagtgatgaaacagggctttgtgtctattcaggaatagtatccagaagctcacttatttttgctttccaaataagtaaatatcagaaaggatagctgaggtcagtctagaaaattagaatttgcttgggggaaaaatatgttctggaaaagataaacagtagcttgcagtttcactgttggaacatttgttacaaggtcctggtattgatcttttatcacccaatttccactgggagccatgatgt

SEQ ID NO: 154517 - DNA, 551 bp, Homo sapiens
ttcgagctcggcaccccagtttaccagggaatgcatttaaaataatgagaagaaaaaataaacatacttttaaaaacatcaaacgatggtgttttctccagaaaggagcaaaaagatcaaggtattagagactgtgaggcagttctgttctgactttgggatggactttgggtttattctaacatgacccctgcttttctaattatagccagttgtgctcaaacagacaggaggtggaggagttcgttttaaatctatcttcggtttcagtagacatacctcctgaaaatccctaaaatttcaagaggagattttcttttcttttcttttcttttttctttccttttttttttcctcaagcaattgctgttttttgagctccaagggctgacagctgttctagttttgcttggggactttttcacaatgtggattaatcaatgttatgaactgggtccgtggggttttgcgaatgtaattggtttcagatgacactttgctagtcaatctgtgaaacagccgaatgttgacacagctgaacaattccagct

SEQ ID NO: 154518 - DNA, 609 bp, Homo sapiens
tactttcagtctgtgtgctgacttttcaggtatagtgagtttcctgtagagagcatataagtggatgatattttttaatccatagagtctatatattttataaagtgtggaatttagtccacttatatttaaggttattgatatgttggtatgtgaggttctgtacctgtcatactgttgttttttgattttgtgtattcctatttctttccttttctcttattgctatggtgatttggcagttatctgtagtggtaccatttgagtcctttcctatttgtatgttttcttataattgagttttataccttgatgtgtttttatgatgacaaatattgttctttcattttcagatttagaactcccttgagcaattctggtaggattcatctagtggtgatgaattccctcagtgtttgcttatctggggaagactttatttctcctgcatttatgaaggaaaattgaactggatatagcattctgggctgacaggtgttttctttcattactttggttatatcgtcttattctaacctttcctgcaaggtttctgctgagcagtctgttcgtctactgggatttcttttattgataacgagacacttt

SEQ ID NO: 154519 - DNA, 190 bp, Homo sapiens
agaaatgagataacacagaagaacagcagcatcaacataacatatgcacagttaactgtgtgctggcaaagagagaaaggtgagggagtgtagaggcagtttaaatggtacagatatttctttctgcttgcactcagtatgtgcgctgtgaggctgaagatgagatgggaaacaagaatctgccatgctc

SEQ ID NO: 154520 - DNA, 470 bp, Homo sapiens
agtactttcctgatggatggatgcttctctcaaattatttcttcactgacttgagctatgaacttttttctctatctttattcccctccttttaagttagattagtagatttgcatgccaccgttactgagaaatcttatcagttagataattaataatttcaaatgctgctttttagatactgacatataagagacctgaaatacattgtttggaggtgtgtggctttttttacttttaaattttatttatttatttatttacttttcttgaattctgtctataggcctacaaatactctttatttttaagctgtctacaaaaaatattctcttggatcagctcaacctatttcttcaatattttgctaatatcatagtagaccccctctagtaaacagcttttatttttgatctggtcatcctaatatatctactgtcatttcaaatgattctttttttttttttcct

SEQ ID NO: 154521 - DNA, 259 bp, Homo sapiens
cacatttagagaccgtgtaattgaaatggagagaaaatcttccaggactctcatggagagctgatgttttcatgaggattcctgatccaatattgaccagaagttaactgcatggactgaactaacagacaattgaaataatcttttatgactctttgtttaaaacatttgctgattttgtttttcagagtcaagaaaccttttttatcttttaagctatttacagcttttaacatttgagtaaagtatatatatatat

SEQ ID NO: 154522 - DNA, 527 bp, Homo sapiens
atgcctgcagtaatgtttcatgaatgaatgaactcacaaagagcagccactcaaatacatgtcatcatcatcaccactaacattagcatttaggtaatgcttattcctatgtctatgtgttaaacactttacatgtattaccttatttaatccacaaacatgataaaagtgctattaacccgatgataaagattatgatataggtgctactattaaccctatttgcaaatgagggtaccaagtgctaggagagtaaataactttcccaaggtcacagaggtattatagtaagggcagaggcaggatcaaatccaggtctgcgcagtttcaaggcccatgcacttaagcactacagatgtctttttggagactgctatagtcttatttactagtcacgcatgaataactgtaaccctcaccctacatgctaccatctttgtcacaaagaaagttcctcccccagagtatacacctggatggacccgaaatcttttccctcttgaccagaagaactaaaaacaagcttg

SEQ ID NO: 154523 - DNA, 545 bp, Homo sapiens
taagaggccatggggctggggagcagtgaatgggagaggaggtgagtggaatgacagtcactggggactttcagggtcttgaggggcaaagagcagactttaaattttgctctgactttgattttacccttaatatgtgaatgcttcccttccaagacaatattcagaggcttctcactagtgtagggtgagtgaagcccttcagacagtaagggagtctcttcacacactgctcagacactgcactgtgtgtccacggccactgccagcagtggctggggctctgccgtcttcagctgcaggagggatgtccttccatccttcctgcctcctgagagaagtagggttccgaacccagaacttgctacataggtaaataccggttgaacaacagcctcccttggaacctggaagagcaacatgtttgcaagccagggaccatcactacttgagcagagtgtagatgtcatccgtacctctggcccacattaacatcatttactcaaggttcctaagcccttggttgttcagtattccagccctcc

SEQ ID NO: 154524 - DNA, 116 bp, Homo sapiens
acctcaaagtgttagcttccagtaccgctactactgatggtgtttgactctgccttcattcctgaaatgcttctccattgactgggtgtggtggcttatgcctatgacacttatca

SEQ ID NO: 154525 - DNA, 604 bp, Homo sapiens
gcatgttgccatttctggttagcatctgtccccaaaacgattccccccctccaaaactaccttttattattttttccaccagattttctctccaaaactatcatgtagccacacaagcaggaagagaaagagatccctgagatcctccatcaaggctggaaaattggttataaccaatttgctaactccactctgttggaagtggctgagtagaggagaactggggaaagattggtgcacggggtgagcaggacctgcctcctgcatgggatgtggggaattgcacttgccattgttggagcccaggccaaccctcctcatcttacagatgaggaaactgaggtcttgagaggggaaatgacttctgtgagctcacttagttggccaatactaaattagagctagaaccctatttcctactcctagcactttttccacactgggtcagggaaatagggtccaccatatacattcttatcttgactgcaatgctaccacctccaccaccaactcctcaaaggaagcaccatcctgactatagctgtgcccatttttctgtctgtcaaaagcctgttgatgtaattgaataccagcaatgcagtac

SEQ ID NO: 154526 - DNA, 380 bp, Homo sapiens
cataattaatagatctgggagacatgttaatgggatgggtattaagtccaacaattggtttaattaagagcaactaacctagctgggatagagagatctcacggtgacttcatatgggaggggatgccctggtgtgacaggaagccaactggggccaccagtatgtccacccccacccaccatctatcagtgggtttctcggcctccacgtggtgtctggggaagactggggcttcatttaagtgggttgagagaagcagaggttcaggggctcatctccgcaggacctgtcctgaggcaccgttggcactccagcctttgactctagttagaataggtgggcttctggccgggcgcggtggctcacgcctgtaatccca

SEQ ID NO: 154527 - DNA, 199 bp, Homo sapiens
cagtggtagcttgaagctataaaatagggattgaggctacagtctagaaataaaacactaaaaacaatacattggtaataaagataatttaggattcttaggtttgtgggctatgcactattttgtatgacatcatttttcagagaacagtatttgactgggtgtgtgtgtgtgtgtgtgtgtgtgtgagcagcgtggg

SEQ ID NO: 154528 - DNA, 320 bp, Homo sapiens
cagttctctccaactcagcttcctgcccatctttccttcaggcccatccccttctgcccctccatgtggggctgggctgggagttccctgagccccgacatgcacagctctgaccaatctctgcggcccctctgtcccccgagcaccagggatccagctggcaccatggggaaaggaatcatggagggagttccgtgccctctgagcagacgcccagccccttggcttctgcctgcgggagggcatctgtgctgtggtttgtctccaccccagagctgtgggtgcagggcagggtctcctggggccccagctgaattgct

SEQ ID NO: 154529 - DNA, 163 bp, Homo sapiens
acagtatgaggtagaccgaaaacagccacctgcagcaactgctgccaagtcaatttcttcactgttgaaagtaagtgctcagtctccaaacacacaaattcaactaaaagcaaataatggctgggcacagtggctcacgcctgtaatcccagcactttgggag

SEQ ID NO: 154530 - DNA, 303 bp, Homo sapiens
taactgtcttttggctctgccttcacatggcttggcattgtataagcaagggtctttgggactcccagggaaccccgttctgacttcctttcaggatgtgctatgtgctgagggctctctgatggggacctcaaacctgaggggctcttcccctcaatgtcatcatcctcagcatagtcctcaggcaagtgaggctctgggtgaagatcagcagaggtgatgagaagcaatgagaagatgttttccagaagctccaggcacagagagtcaggaatactgcacagatactgttgacacctggcc

SEQ ID NO: 154531 - DNA, 301 bp, Homo sapiens
agtacttttccaaattctgttttccccctaatttaatgacacagatttattacttagcagacatatctataaaacaaacatggggttcatttattaatcagtagaaggatgtgctattgggctttggctgttagttacatttaaaaaccacaaagattaaggcaatgaaaaaatacactgtattttatttgtgttaatgtcaaagcacactgatgaattgagtttctcaggctgtacaactgaggaaaaccttatgtgggatgaggggctcttgctgagattagccttgctgagatgagat

SEQ ID NO: 154532 - DNA, 393 bp, Homo sapiens
gagtgatctgaggatcccctcggatgcaagtgtcgtgacagaaacagagaagatggacacagtggttcacacaaaaaatgacaacttcactacaagtgatttagcagtgataagaattaacattgaataggaaatattggggttaagcagtgcaggactcagtctgttgggccacatagatcaaacccaatacctatgctcattgacatctcttcctttacctgcggttccttaatcattactcatcatcattattcatagaatcactcattcattcactcggtatttactgaggtcctactatgtgccaagctttatatcaagtactcctgcaaatctcaattttcctttcttctgtcttaatttatcctagcttttcttaccaaagtaaaa

SEQ ID NO: 154533 - DNA, 182 bp, Homo sapiens
tggacttctgtcccaagttttttttccagctaccccttactactagatggagccctttgggatcccaactcaatgtagggggtttatcagagatcctttcttgatagatttttttttcttactgtctagccctatagtgctgccaaacctctgctcaactattccttgaatcacgttcctag

SEQ ID NO: 154534 - DNA, 517 bp, Homo sapiens
gaggggtttgtggttagatgggaggaaggactgcctaagacaggggcatctcctcctctggcagtgttggcacagaagtgggagcagcagtggggaaaggggcctgggaagcatggaattataaaaagtgctttgggctaccttggtagggagtggggatagatggggcctagtctttttaaccctgacttctctctgtcagacgatgctcagtgaatctctgttgcttccctgccttctcagccctgatccctctctcgtcccagctcccccagcatgaggcgggggtggggggggcggtgtaggagatcagccagggagctggttgccaggcgacagttgcctaagcaaccccatcctctccatctccatgtgctcagggctgctccttagaagactttagagtctcaccctctgcaccaaccaacctgagggtggggagggttgaggactgggataccaggggtggttggagggtaggtggtgtccaaatcttcaggggcagttgggagagcaa

SEQ ID NO: 154535 - DNA, 383 bp, Homo sapiens
ctaaaagcttattcccatagaataagaagttaacacagggcaatggcctggctaagttttttgcatttttagtaaagacaaggtctcactgtgttgcctggactggactggttttgaactgctgggctcaagtgatcctcctgccttgacttcccatagtgctgggattacaggtgggagacaccgtaccctgccacacaccagcagtctgttttaacaagccataataggtgactcggatacacatgcatgattgagaaaccctaatccatggaaaagggcctaagtgacaactattaatagatactgcagaatttctccttatacactggtatttcttttgcagaaaattgcaaccagcttaattggccagtagagggcag

SEQ ID NO: 154536 - DNA, 131 bp, Homo sapiens
cgacgaaagaggacagccatgtttctccagccccacattgcacttatgattcgacgtcgaaagaatttattttaaatttcccagataacctgagctctgtggtttctgttgctatggaagtggggaagagg

SEQ ID NO: 154537 - DNA, 562 bp, Homo sapiens
ccccttctctcctgggttcccatggaaacttatatttggtgacgcagctgcaaagtcatgaggcatgagccaggctggggccagcaaggaaaattttgtcctggtctcttgcccctttgactgcctctcccactagttggttctgtttctggctgcaggcgcagccatgcccttctgcccgggggttttagggtgaaacctataaatgaaatcactggcgagggcctacagtggcctcttccctaacctaactccgatgtgccaaaggtttcctgtgttggacccagggtggggatctcttcacggggtttctcacacctgagcccccagccaccacagaggtgcagcttgaagtgcatccagccaactggctggcctcctgggatgctccgcatccccatcctgccattcctctccctgccttggagtagcagctcaggaagcagcaggggctttgagagaacaggctcgcctgcccttcctctacgtttcactccactctgctggaggagccaaagccactgccccatccgagccccagaatgcaagtgtgaggcctgca

SEQ ID NO: 154538 - DNA, 316 bp, Homo sapiens
tttgccgtgatcagttctgctgtgaaagaatgctcactctagctgcaaccatgtagaggcaggcatagggaggtggaggttacaattgaagctgaaagacaggaggatcgctcgaacccaactggctggcctcctgggatgctccgcatccccatcctgccattcctctccctgccttggagtagcagctcaggaagcagcaggggctttgagagaacaggctcgcctgcccttcctctacgtttcactccactctgctggaggagccaaagccactgccccatccgagccccagaatgcaagtgtgaggcctgca

SEQ ID NO: 154539 - DNA, 221 bp, Homo sapiens
gtcactaataccaattgtttctacttggcactgcagacttgttttttgagggggagggcagcttgtgtaaagttaaaaaaaacaaaacaaaacaaaataccagaactcttaggttattctatacccctctgtttatagctattaagttcgccaggaaattatacacttgaactcctttcttccacaggcatgattaatgtacctccagaatatgtgccagg

SEQ ID NO: 154540 - DNA, 496 bp, Homo sapiens
gactttactgctaataggggttgagaatggagggacataggttatccagaccctgaagcccgaactccctaaccacctcaaaacactgtcaggatcaggagaaatgcagattacacggaacaatatctggggcagaaaaacaatgaggcatcagtttttccccctttatcagtggttccccattctggctgcaacacattcgctgaggttgccttaaaaaatcacgttgcatggatccaagcccaaaccaattaaagataattttaggaatacgggactcagtgatcagtatttctttaagttcccagtgtaataggcagccagagttgagaaccattgcctgacattaaagattcacaaaatgtggtccatgaatcagactttaatagatctgttccaagttttcatgaatgagtatttagtaaagatgtggtgcatggcttttcctaattctcaaagggatcctctaatgccaaaaaaaaaaacacaaacaagg

SEQ ID NO: 154541 - DNA, 225 bp, Homo sapiens
ttaagtgtcaagttcaccacctggctttcaaagtcaagaggataatgaaaattattatgccttgcatttacatactgttctgcaatttataaaatgctttcacagcaaccagttcattattccttgtacttgccattctggatgaagacaaatcagcagagagctgtgaaccttgtgtggattattgaatcttccaggatggctttgaatgtatcacaatatggc

SEQ ID NO: 154542 - DNA, 370 bp, Homo sapiens
tcagcatagctaatgcaagaagagagtaactctgggaactatgaagagtaattaacatggtggtcccattctctgaaatagtctctcttctcacctctcctagtcaagcacatatattggtcctaaatattgttttctctttgaaaacttctcaagttctcttcaggaaggaccagtagcacatatccaagcatcaccattttaggacatgagccatcaatctgtgattatttgtttgcaggaagcacgagatttcagactccaggcactttgaagtggaggatcctgagttttgcattcccattatcaaagacagtaacaattggttattaggttctcaaacatgtttattgagtcaatgaatgcgtaa

SEQ ID NO: 154543 - DNA, 99 bp, Homo sapiens
agaggtgaagagaacaggctttggcgttagcctggatttggacaccatttctgctcttccctagctgtatcaacttgatcaatttgcttaatcacattt

SEQ ID NO: 154544 - DNA, 604 bp, Homo sapiens
aagagttcgagaccagcctggccaacacggtgaccccttgtctctactaaaaatacaaaaagtaactgggcgtggtggtgggtgcctgtaatcccagctactcaggaggctgaggcgggagaatcgcttgaacccaggaggcagaggttgcagtgagctgagatcctgccattgcactccagcctgggcaacagagcaaaaaaactctgtctcaaaaaaaaggtattatcttggcagggacagcagttcctatttcttaattgaagaaatccagatttcttctcattccaagagtctgtcaggtaactttcactgttgatgttgctatttccatgccaatcaataatcctgatcatacctgtatcccttaaggaaatcaaataactgaaaatgaagatctgtggggcagataaattcaggaatatttcttcgtttatagaggattcacctcatgaatttgaaatatggcttggcttataaaaagttgatctgcctggagcttgtagctaacacctctgtcgggccaaacaataaatgcttacactgagaaagccaggtttgggatttcaaattaatgtgcccttaacataaactgcagagcccc

SEQ ID NO: 154545 - DNA, 285 bp, Homo sapiens
tctggggactccaaaaggggcctgactgcacctggctttgtgaagtcacttttctagctggccttgaggctgggcagggtttctgacaggcagaggtggagcaggggggatgaactctgagcagagaagctggaaatgaggggtaagtttgaccaccagacatattgtggaggactagtgtcaggggaagagtatggtgcttggttcagtgatgagagatttgatcagggcactggcatggactgagccatggtcctggcagattcatttggcggcatgctgaag

SEQ ID NO: 154546 - DNA, 316 bp, Homo sapiens
aaaagaatgcaacagtttgtctcttatctacctatgacctggaagctccatccttgcttgagttgtcctgcctttctggacaaaatcaatgtacatcttacatttattgactgatgtctcatgtctccctaaaatgtataaaaccaagttgtgccctgaccaccttgggcacacgttgtcaggacctcctgagggtgtgtgatggacacgtgtcctcaaccttggcaaaacaaactttctaaattaactgagacctatctcagatattcggggttcacacttcctattccattccaatactggtggactagctgta

SEQ ID NO: 154547 - DNA, 395 bp, Homo sapiens
tccggggcgtgggggagcagggcgaccctcgcggggacgccggcactgccaggcggggcgcagggcacagggtctccatggagcagcctgaggggtgcccactgagcgggtccaggtcccagcggcgggatgccctggctgcccgaagagcccacgggtgaggggaacatcgccccccgtcgacggggaggtctctgctcacgggcgcccccggcccgccacccggggccgcagagctcgggctccctcttcgctctcctcacgcggccctcccggcggccggactcctgggtccctgtgagtcccggcggggtcggccgcccttctgccgccgcgtccccttcgcaaccccggcgggagaccctctcgagtcgcccgaagcgcagaggcagggg

SEQ ID NO: 154548 - DNA, 535 bp, Homo sapiens
gggatacacgtgcagtatgtgcaggtttgtttcataggtatacatgtgccatggtggtttgctgcacctgtcaacctgtaatttaggttttaagctccgcgtgcattaggtatttgtcctaatgctctccctccccttgccctccaccgcccgacagggcccagtgtgtgatgttcccctccctgtgtccatgtgttctcattgttcaactcccacttatgactgagaacatgcagtgtttggttttctgttcctgtgttagttggctgagaatgatggtttccagcttcatccatgtccctgcaaatggcatgaacttattcttttctatggctgcatagagggttttcaaaatgcagattttctggtcattacaaagtatattggctcatagtcagggatactttaccacaaatttgctgtttcttttttttattcatttattaacaactctgggaataaatcagtggccctgtccatctcagagctgaaaggtagagtctttcatgttcttaatggtatgattttttttgtt

SEQ ID NO: 154549 - DNA, 295 bp, Homo sapiens
ttggagcgagtttaggagcaggcagaagtttttggggtcttctccctcatttcagccagaacatctacacttttatctgtttcatatagtgggctgaagatgtcctgcacaaaagtcttcaaaccattggacgaactgcatttctgtttttgaactggctctttcagagccaacacttggtcctgtaagcacttaatcagatcctgatgacacgcacgcaactcactttttatttcctgcttttatttttccagtgcctggaattttttcacgtattcaattttggtcttttggt

SEQ ID NO: 154550 - DNA, 313 bp, Homo sapiens
aaccacgccggccactgtttaggggcctcctgggggtcgtttcccttgccccctcgggttggggagctcctctaggccaaggaagcggccccctaaaaccgcttccgggactgcagcttctctccccacactctcaaggagcagagccttctcgggccacaattctccgcgacccaaaaataactacacagatgtgaggaaaagggccaaagcctacagcacaaggtggttctcagttaaagccttatcgcttacggccaggaagctcgaaacctaacccagcgccagccttttatagccggtccctcgagcc

SEQ ID NO: 154551 - DNA, 427 bp, Homo sapiens
tgaatgaataaacatcttctgagaaccaaggaactatgttcttatactgacataactttagcttcaaatatagatggaccatgcatgggttttattaattaaaagaaataaagagatattccgttttactctttgaaactagccgctggcatcagactgttcttttgatgaatggtgaagggagaatcaactaacaaccacctctgaagtgggatgcgatgataccttgcttaaagattaagaaggcacaagtccaaacagccttctgcaaacacattttctccaattctacaaaactgtcttctttgttactgttactgtccaaagactgtgcaccccatccttcaaaatcctattttggctaggcacagtggcttgtgggaggctaaggtgagagaatcatttgagctcagaagttcaagaccag

SEQ ID NO: 154552 - DNA, 186 bp, Homo sapiens
gaccttcaaggttaagcagtgcaaggagactttccacgcgggcaggggtggtcagcctcattgcctatctgccttcgtggagttccactttactgtggggttctcgggctccactcctctggttcctcgagggcagtccccggggctgctgctctgtgggatgctgtggcccgtgtggggttcatg

SEQ ID NO: 154553 - DNA, 465 bp, Homo sapiens
gtaattttagtagagacagggtttcaccatgttggccaggctagcctctaactcctgaccccaggtaatccacctacctcagcctcccaaagtgctgggattacaggtttgagccacagtgcccagcctatgattatttctttaggatgcttttctgtaaatggaattgccaagtcaaagtggatgcacatttacaattttgaaattgccaaactttgccagggtgtatgagaattcccatttcctcatggcctcataggtgctgtatggatgattctttttcatctttcagtctgaggagagaatttcatctccagcttgtttcagttgtatctctgcttattgatgatttgtatttcatttttttgtaaattgcctacctttcttttagagtgttcacctttctcttaatgaattgtgaaagctctttatattttaaataaaatacccctttatgttataaat

SEQ ID NO: 154554 - DNA, 121 bp, Homo sapiens
cctggatctagaaacatggaacgcaatgacgaccttgacaagacgtgtctcagtggcacagtggggaagggattctgattagagtgagtggaagagagaaggtgtggaaacagggaacaca

SEQ ID NO: 154555 - DNA, 435 bp, Homo sapiens
  misc_feature (17)..(17): n is a, c, g, or t
  misc_feature (96)..(96): n is a, c, g, or t
tagaggatccccgacgntctctctgtgggggctctgtggggagaagcagtgtgagggcctctgaagagccaggaagctggccctggttctgcaggnatgtggcgacactatagtctagctgcagggttgagaagcagggagggcctctgactgcagaggcaggaagtccaaggttgagtctccacagatctccagctgtttgagtgcaggcttctctcctcaccagaccctgggctccctgaggtcagaaattagtccccatgcctggcacatagcagacaggcaggcagtgcccattcactcttgtcctgcccctcttgtcccaatcccaccatgtcttgctgatactgcacagggcattagccttgagcgggtccgcttctctccagcccgtggccactcacttcctccccacagagagagcgtcgggtaccg

SEQ ID NO: 154556 - DNA, 536 bp, Homo sapiens
atttctgtctgaaatttttttctattcctgtgatcattcttctgttgttatgtattgttcatctgctgttttcttacattctttgtatttcccacgctacacagatgtgttttatacactcattatttcatcagtttatacatcatttaattaattggtaccataataatagtggtgcagttgtataaataggtttgggaacaaacccaactgacccatggtaagcataggaacagaaatgcctggtgactgaaggagtagctggcctgtgacgtggagagaagtcagtatgatagatctggggattagggagtagagatggatgagtcatttaggtggaggctaattgagcttctgcagttcagtatggtgtctcgacatattctcccaatttggtggagattttactgtatttagcagatattaaaataaggtttttaaaaacccattatcagcaaaattagataatttcctcggtttatgaccatttcctaattttttgatgatgtttctaatttttttaaaaatatttttta

SEQ ID NO: 154557 - DNA, 496 bp, Homo sapiens
gctataaggacagatattctgaggcaggatgggttagaggtagagtgctatgggctaaattatgtgttccccacccaccaactcatatgttgaatccttaacccccaatgtgagacagtacctacaaagaggtaattaaggctaaatgaggtcataagcatagggccctgatacaatagaactggtgtccttataagagataccagtgcatagcctctcccttgcactctcttccttcctctctccctcactccttgccatgtgaggacacaaagagaaggtggctggctgtaagccaggaagaaagccctccccagaaagcaaataagttggaaccatgaacttgaattttttagcctccagaaatagggaaaataaatttctgttgtttaagtcatatagaatatggtgtgttgttacacaacttgagcaaactaaaataacatacagttagtactctatgactgcagaatgacgtcggtaccgagctcgatcc

SEQ ID NO: 154558 - DNA, 365 bp, Homo sapiens
aggctggctctgggtggcgtggagataagaatggcatgtagtgaggacacaaagagaaggtggctggctgtaagccaggaagaaagccctccccagaaagcaaataagttggaaccatgaacttgaattttttagcctccagaaatagggaaaataaatttctgttgtttaagtcatatagaatatggtgtgttgttacacaacttgagcaaactaaaataacatacagttagtactctatgactgcagtggatttggtatttaaggatgaggggtgatatcctttggctttcaaattgctaaattctaccactgattttttttttttttttgatatgttgtcccactctgttgcccaggctgga

SEQ ID NO: 154559 - DNA, 453 bp, Homo sapiens
gctgaggcactctagaggatctaggctcattcagatctaatctcatttcatttatactgattcttctggtaaaatagtagtttcattcacctataattttctttaagaaacagagggcaccaactttggaagcgtgtttgcttgatcaaactatgtggaaggtgtgggatgaagaggggaaactatttcctggaagcgaatctggcaccgggaggagtaacgcttctctcctgtactcccttggagttacctactcagtgcctggcatccctcgtcagggcttcattccgtgcctgcttctgactcaaagcaagcagccaggaaggggtgcgaggggatagtccagatttgacagtattgaccccagggctgaggagcattagcgaattccataatgagtttcatccggcagttcttggcttacaaaggtcactgcaatgcaagacccaaggg

SEQ ID NO: 154560 - DNA, 345 bp, Homo sapiens
tctatgattcccctttgtcttctctatttctctgttggtatctgattgtttgtattatattcagaacttgcattatgggtaattaaagtcctttggaatgtgctttaagtttttgaggcttttctttacccttctagtgtattggagcagaaatgcttatactgcagcatggtgttaaggaaagtgcgcacactgttttttgtttacggtattccacggaagttaagtgctcacactttgaacttcctaactgcctacttcctcagtttacttttgcattttacttatcattgggccatatatatatatatgtgtgtgtgtgtgtgtgtgtgtgtgtgtgtgtgt

SEQ ID NO: 154561 - DNA, 260 bp, Homo sapiens
tttatgtttgataagtacattattcataattattgatacaaattaaccctaaaccaaagcttgtatcacattaaaagtgcaaaattagctgcagatgaatatcctgacccaattatgcaaacactctggtaaatctgtgtagactaaaggctctgagaagaaagttgaacttcagaggggtagaggggaggagtatttcagaaaagggatttataaaggaatgaaaatatttggaagacattggtaaaaaggagatactt

SEQ ID NO: 154562 - DNA, 768 bp, Homo sapiens
ttgtctaggtaaagcaaatttttccatgaaagaaagcttggacagaaaatacgcttggtaaatcagtcttctaaaagctgctggagatctctaagggacgtacccagggcctgcaatattatgggtcaatacttcatgaaacagaaggtactcttgatgcaaggatggtaagggatagaaactgtttattgaatgagaaataagctcccactctaggatgagatgcatcattgaggagcagccccctggttttggtgacagaactcctactgaaggacagtgccctgaggatgctgtggtgagatgatgtcttgctgaattgcccaggctggagtgcaatggctgttcatacgtacgatcatcatagtgcactacagcctggaacttctggtctcaaatgatcctcccacatcagtctcttgagtagctgggactacaggaaatgtatctgtatcagaaatcatccagaaaaaaaattgctggcagtcaatgtaactgagcagcaagaatatggtttgcatcatctaggcattgaggagaataataaatgaagtcctcagaattctttttaaaagttagagcatagttgtatgatgtagaagctaactgtacagactttgtagagaacctatccagttcatttaccttgtttggggatcacgagaggatgttgacttccgcgataaatggtaccagggcctttcaccaatggaaaaaaatttctaaaataggcctttaattctcacctttgcgcagactaacaaacgg

SEQ ID NO: 154563 - DNA, 490 bp, Homo sapiens
ggcaagatcaaactatgaaagccagtctgaaggataactaacatatttagactttcagaacctggttccttgggttcaagagctgagtagaaagcttttgttaagtcaaaagatgtcctgttttgatattacctgccacctattggtaatatgcaattgcccttgacgaagaaataactttctgaatttctgatattttaactccatccattataaatatataattttgatttatcttagctacttaaaaggaggccctggttgagaggacttctgaaagttactcccataatttcctattactgtctaatacaaactctctgcctagccaccatctcttgggcgcccccaaacatgccatacttgttcctaattcccaacttttgctcttgttcttctttctagtgagctctttgttctctgccattctaaatctgagtctaatcccagctcttccacaaagacttctttagtttttcaggcccacacc

SEQ ID NO: 154564 - DNA, 468 bp, Homo sapiens
ctgggcagtggtggaaagtaagaggccagatgggaacagaacaagcttttcttgttcatcttctatgtgtcagacatggtgctagttgccattacatataatccactcagtgagcaaatgttctgtccctaccacatgccaagaaagggtctgggaatgaagccgtgtacaaaaccaagtccctgttctcatggggcttacgtgtgagtgagggtgaaaagttgaaaagcaaataactatgcaatggcagatagcatggaggaaaacaaagcagggtaagaggaaatatggcggcatttcagaaaggccagttaggaaagggctccccaagagggtggtgtttgagcagagagtagggttaagtcatggagagtggggctgtttgactttagagtccacactctgggcactaacatgaagggaaagtgcataacagatggctccaccttcgaaagctgtggtctttca

SEQ ID NO: 154565 - DNA, 487 bp, Homo sapiens
tgtccacattcaaggtaggaaaaggagtgaaataacagtactagctacctttgcccctcttctcagaggagcaaatctttcttggaaacccagcagaattctacatgaacctcctcagccaaactgtgtaattttgtcatccttagctgcaagatgctgtgacatatttaactgggcacactgtcacagaaaacaaaactaggattttgtccgggcactgtggcttacacctatagtcccagcattttgaggcactaaggaaggaggatcacttgagcatgggggttctagactgcagtgagctatgatcatgccactgcattccaaacttggggacaaagagagaccctgtctctacaaaaagtttaaaacatacattaaatgggtgtcgtagcatgcacctgtagtcccagcaactcagaaggctgaggctggtggaggatcgcttgagcctaggagtttaaggctgcagtgagctatgttcatg

SEQ ID NO: 154566 - DNA, 292 bp, Homo sapiens
tctttggactttggttcttagagtaatggaaaactcattggagggttttaagcaagagggtttgtgattaaatttgtgttttgaaaagatatttctagctatattgtaaacatgttcacagcagggggtaggatggaagcggggaatcagtgggaacagttaggatgcttttgcatttgtccagttgagagatgatagtggcttggcctaggatgatggtggcagaggaagaaaggggacagattgaggagttacttggaagccggagcccgcagaacttgattatggatag

SEQ ID NO: 154567 - DNA, 517 bp, Homo sapiens
agatagggggtgagcatagggtctctaacactacatgcaaatctttcaagggcaactcaagtcctggctagggaaagtggaaatggggtaaatccaaagactggcaagaaaatattaaaatgttacagttaaggctcactcacactgattaaaaataaacaaaactctaagtgttcaaactgaacacagcattcattatctgtaaccacataaacttaaactcccgaaaggaataaacagacagagggtatttttagtaatacttaaataagttcatacagacaacccagcctaatatattgcaagatctaaagtacctttggaatcattaagaagcaaattacattcgttgagttttactgttaattatatttcttgtactttgaatattggtatctcacataaagaatcaggtcttaacatgtggcctgcctgacatacacctcaagaaaagggctccacaatcaactagtttaggaaatgatgcacactctaaaaaccacttggagactcacag

SEQ ID NO: 154568 - DNA, 478 bp, Homo sapiens
acccactgtgctctcaccccatgttagcccacctagcctcgtactcaaggacagagtgctgatcttccagcttcttcatgtatcctttctacaaatactgagcctgcatgttgatggctgcactgtcttaggctctgggaacaaaagagtgaacaaaagtcagcacaggttccgccctttgggagtttacatggagtcctgagtcctgcatcttttttttttttttttttttttttttttgaggtggagtctttctctgttgcccaggctggagtgcagtggtgcgatctcagctcactataacctctgcctcccaagttcaagcaattctcctgcctcagcctctcagcctctggagccgttgggactacagtgcactaccatgcccaactaatttttgtagtcttagcagagatggggtttcgctatgttggccaggctggtccctaactcctgacctcaggtgatctgcccacct

SEQ ID NO: 154569 - DNA, 344 bp, Homo sapiens
caccctcaccctgcactttcattgtcactgtcattggccattccaacattgtgcttgcatcctgtggaaagtcacatttggggtcaagtggatggtgttgtttctactgtttggttaaaagtgtcagggtgtatttggccttcaagggaggataaggcaggggttggattcaggtgcacccaactcttgtttttttcattttgagacagagtcttgctctgtcgactaggttggagagtgcaatggtgtgatctcagttcagtgtaacaaccacctcccaggctcaagcgattctcctgcctcagcctcctgagtatctgggattacagggattacaccacgat

SEQ ID NO: 154570 - DNA, 242 bp, Homo sapiens
agtgcagctatgagaaggactcaggctgccaacaggaagctaaaaacatcccaccaccaagtgacaactttgcagaaaacctgttgcagcccacgcttggccccacttctaagaagctgacacaggagacagctcgaaatgtgaatcaagatttaaggcggggaacaattatgcatacaataaacacctgggaataacctaagtttccaaccacaaagaattggctactagattcaccaatc

SEQ ID NO: 154571 - DNA, 491 bp, Homo sapiens
ttcagagcgacctggctgtttgtcagtttccagcggtgtgaccttgagtgggttccttaccttcccctagcctcagtttcttcacctgtaaaatggggagaatggtatttgctagaatgaggatgagaggagtgtgtggtatttcagtaaatggtgtcatgcttatattcaacaagtacatttcacgtttactgtgtgttagggcgctggactaattcattgctttacatacattctctcatttaattctcccgcattactattaaccacattttacggaggggcaaactgaggcgcagggttgtaaaggtcacacagatagaaagtggtggagcttggattttacctccctctctcagcctgtgtctcagccacagatctctagagtgtcttgctgtgacagctcacagtttatttctcctttttttttttttttttttggacgggtctcactcggtcccctagggtggagtgcacgggggtgatctcag

SEQ ID NO: 154572 - DNA, 219 bp, Homo sapiens
ggggctgaattctcagaaatgctcggggaagtgactgggtgaggggtacagccattcgcagtgtggggctctcggctgtggggttcttcttaaaagcaagtgtcagccgggtgtggtggctcacacctgtaatcccaacactttgggaggtggaggcgggcagatcacttgaggccaggagttcaaggctggctgacatggtgaaaccccatctctgtt

SEQ ID NO: 154573 - DNA, 570 bp, Homo sapiens
acctctctgctcccagattccaactgttaggtaacaagcgacagcgactgtgtctttgttgctcctcattacaggccaagcacctaagagaggggctgcacatagtaggcctcaataaacattcaccagacgggccaggcatggtggcatgtgcctgtggtcccagctacttggaaggctaaggtgggaggatcagttgaggccaggagtttgatatcagcctagacaacagagtgagacctaatctctacaaaaaattaaataaattagctgggtgtggtggcgcatgcctgtagtctcagttacttgggaggctgaggtgggaggatagcttgagcccaggaagttgagcctgcagtgagccatgagcatgccactgcacttcaacctgggcaagagattgagaccccatctcaaaaataaaaaaaagaaagagaaaaaaatggatggctgattatgaccattggtatgaggaacagtagagagtccaaggtagagagtaccaatgcagagagaggctgaattaagacggaagtttatgtagaaggtgagaaggaaaacttctgatga

SEQ ID NO: 154574 - DNA, 512 bp, Homo sapiens
tccatgagagtcaacaggggaaagtttggctaatgttttctatcactaaagacttaaaaaataactggaaacattcccataggctttgtttgtttgtttttaagaggcttgtttctcgtttttccatgcaaattaaaattcctagtgtggcttctataaatttgaacttttgaaaactttcccttagcatttggctcaaagtgtagctggcacttccgtgtgacaacagagaaatttcagttctgcttttcttcagagctgcgtgttatgggttagataagtaaacttggctttctctgttctaacgacagtgtgtccagggaagctggaagaagaatggctccagggttcctgtcgatgccagatttcaccagcgctaccctgcttttatcagttttccatatagagctttcataaaggttttctttttctgttttttaaattgtggtaaaatacatataacataaaatttaccatccgtgacactaactgcatttaccatgttgtgatgc

SEQ ID NO: 154575 - DNA, 530 bp, Homo sapiens
aatacccaatgaaaatgtaattttttaaaaattatggccaattggtagttttttaaaaatctgttatgccttgtcatgataaggataggtgaaaaggaactttcataaactattgctaagtatatgggtgaaaccttttagactatttgggtctacctaataaattaaaatgttcagtcttttctaattttagcaccgtatttctacagatacactggcatatctgtggagaggggcacttctgcttgtcacctgatatcccttactactactaatatttttataagcattattacctttaaaatcatgttaaagggtaaatgatgtgcaacagactcagtttccccttctctgactcctgtttagtttacatctcttttctctctctcatttgggggctcaatacccttaagattatagagaaattgcagtaggtaatgttggctggaaatgctaacttgtaagaaacttgggtggaaatggtttaagccatcagcctaaacgatcagtgaaaatgtcagacattctcc

SEQ ID NO: 154576 - DNA, 387 bp, Homo sapiens
tcccatagtgaagatgactcttcacgacctgaacttctttatcatctgaaccagtttttctgggccacaatatttactgagatgctaatgatgatgctgctgtagtccctctctagaccaaagtactactggttaggttagcaggcaggtaatgcttccacagccactcgtttcagctttcattctaatcagttctcaaacattttaacatctgaatttgttgatggccctgtccttaaagaaattatttttgctcacggttaggcaatatcgtctaagtcattttacttctgtctatgccttctttcatctctccccaccaacctcctagagcctaaaagaaggcattttccatgtttcttcttaatacacacatttttctcctcc

SEQ ID NO: 154577 - DNA, 480 bp, Homo sapiens
gatctcactgcttccttgtctatagaacctcttgaataaggcccagcttttcctcagctctttatccagagcccctggcagagtcattgggagtgatgcttaagagaggaagggaagaggaaggaaggagcaaaggacaaaggcaggcagatgggtttccagtgggtttccgattcactggtctgtccatgtcctttgaaaagctgtgtcttttctttaacttcaattctgtgtcagggccttccgagccttctgagttttccccaaccttatcttagagtaggttaaatgaagtggcttcattttcatatgacacagttgcacaaattcactaactaaaaaatggaatggaggctcacaggccataaaggtgttgtgaagttattgcaagatacttaacagaagaaagactctagtcatctgttccttatatttatccttttttgtctaagtcacatcaaaactctttgtcacattctt

SEQ ID NO: 154578 - DNA, 331 bp, Homo sapiens
cttctactactcccttgcttgcttactccacttcagtcatatgggaattcactttatttccactttaggagcaccagacttgctgtttctctgcctgaaaagcactttccacagatatctgcttgatcccttctctcattgcacttcttcacttgaggttctgttcacatattacctcttcagtatggcctttgccgaacatccaatatgaagtattccacactcttatgtttctctttcctcctgctttgcacttcatagcacttaacttatttaatatcatattacatgttaacttactctctattcttattagaatgtaaacattcat

SEQ ID NO: 154579 - DNA, 507 bp, Homo sapiens
agggaaatccattctaattgcaatctgcctcaatctgcatttactggggactatatgaatacatttacccacctttccacaagtcacctctttgaacacttaacaagctgcattacaacatcttggatttactcagttttctgccccactaaaatgcaaccatcatcaaaggaagaactatacctagttactatggctattctattaagatttggattgacaaatcttcgagtgcctaggttagctctaatccttatgatgaccctccagattggtattattacttttccccagttttaatggtatggaaataaactaagaggaattgacttcaccatgctatcaaaactactaaatagtaaaacccaggatagaatctagatctgattcctatacttatgttttaccttcctaattaacctcttttagatatacaatccaatttgtcagttttccttaatatgtgtagcaccccaaacagaatccaatattcaacaaacaatccaa

SEQ ID NO: 154580 - DNA, 760 bp, Homo sapiens
caaaaagcatcattaatgaggcagatgactctgaaagaaacatttaaaaaagccatccagaggaatgcttcttcctctctacaggacccacttcttggtccctcaactgcttctgatgcttcttctcacctaaaaataaaataaaatacagtgtacagtaaccttttagtcaaaacagcatcatacttggaaactgaaagcctactgttatttgttattgttgcttaacagctgatacaggtattctggtgacactactgtgctggcttacttaacctgaatacactatttttttcgttgtattactggtatgtcattttttttactgttaagtacttatgtgtgaataagtgtaaaaaaatgattgcttatcggtaacatataaattcagaatcaggaatgatggtgatgcccaacaatcacagatcgtccacatgggtggcggagatgttaacacctttgctttctgatggttcagtgtatccacactttgtttcatgccaaaattatttaaaatattgtatgaaattaccttcaggctatgtgtataaagtatatatgaaacataaatgaactttatgtttaaactgggatcttatcctcaagctatctcattgtgtatgtgtaaatatttcaaactaaaaaaaaaaaaaatctgaaacacttctggtcccaagcatttcagacaagggatattcaacctgccctgcagtcttgattactataactgtataataaatcttgaaatcaggtagcctga

SEQ ID NO: 154581 - DNA, 533 bp, Homo sapiens
ccatcaattagaactattggcttcggtaacataatagccctaggaaacccacttgggaaactccctggactcccaataaaggttttggcccaggattctctctctctcctctctgggatcagtaagtaataaaaatacttctgctatttcatgtgtcttgctgtgctgctctgtgtctcacctgaccaatgcattcaaacctattttcctgggcagggctagaatctatagccactctcaagagagagaccttaggaccaaattagaattgacatttgcaaaagagccaggaataccaggaggtggggaatcactgggggtcatcttagaggctacctcccccaagcactattaaaagaataaactaggctgggcgtggtggctcacacctgtaatcccagcactttgggaggccaagacgggtggatcacctgaggtcacgagttcaagtccagcctggctaacacggcaaaaccccatctctactaacaatacaaaaattagccgggcatggtggcgcaagcctgtaatcc

SEQ ID NO: 154582 - DNA, 314 bp, Homo sapiens
cacggaactgttgagtcctgtgtgaaacttagtccaacagatcttgaatagtcacagatcaccttaagagtttgtccctgcatcaagctttctatggatggctcagcataaatccatctctgctatgaaaaacaactcaagaaaaacaacagaaggtcaagtaccatgactttgacttaaaaatggtacagacatacatacatatgtcatgatgagctgagatcctataaatgccctgggctttataacccaccctcacactgtcctctggagccacttgagtgagctgtgacctgcagagggggtgtccggcc

SEQ ID NO: 154583 - DNA, 345 bp, Homo sapiens
acagaggatgcagagaaccccatttcacttcaagtctgtattcaactcatagctgatttttctaagagactaaacctggttcatccataaatcctgatgtcagaagtacattaggccacagttgtgtgaattaccttagtctggaaacctaagccatcatcacatgggtcatggaattctttctttctttgcttaaagatgacaccagaaacaccactactcttagggtacaaacgtcccaagtgagacaaagaaagatatttctaacaaccttctaggtaaagctatcctcttgcctaaaactttggatcatttttggaatttttttttttttttttttttttt

SEQ ID NO: 154584 - DNA, 1243 bp, Homo sapiens
gctatttagttcctgcttatttaccctcatggtgggagagaccctggtgggatttggggtgaaagctggctgtggttcttgcaggagcctcatgacacctgagggaggtgtgatcaggcaagactgggcctctacactgagagccgactagggcaggtctcagaagcagagactgaaggaagttgggtggatgagtggatctggggagcaggggccaagcctgagggctgggcagagccttccaaaggtcaacacaatccttgctattgtcttttgagggccctgatctattttaagtaaaatgctctaactgcgcatgtcatctggaaggaaaccacaaaaaactcaatctgagacttgtcaccaatgtgctgcctgagtcaaagggtttccctggctcacctccatagatggcgagggtagaaggcaagacctgtcctgggtggtctaggcagaaggcccaggtttagggcatggcaggtgggtggtcagggaggtgaggtgggatcctggtgctgatgcaggggcagttgccgagggcttggcctcagaacaaggcaggagtccagccatgaggatgactcttgctgagtcactgagctgggcgaggcattcagaccccctgactgggcccagctggggcggcagatggtggagaggcctcagctgtggggggtgttggggagattatccactgatgaaccaaatggaggctgttcccagagcctgcttccaaccttgcacggccttctagagttcaaatctttcctgggggggcctcagagccctgtccatacctccgctcacagccccagcccttcctcttctcccatctggtttcctggccaggtttcggccctgcggagaaccctccaagggagcagtggaaaaagcttcacttggcagtaaagcccctacttgctgttccatccctgcagctggggtgaaataagccactgaccagtaaacaactgaggcttaaaccagcatgccagctcaggtggggagcccccagcactggttatattccctagattcctcactggataggaaagttgggcctcaggcactcttccctcctctgcagtcaaacagtgcagatgaagagccaggctctgttcccagtgctttatgtgctaacttggttgataatgttatccattctcattttgtagatgaggaaacaggcacagggtggtcaagggacttgttcaaatcactgatcccataagggtgagagcca

SEQ ID NO: 154585 - DNA, 494 bp, Homo sapiens
gcctgtaatctcagctacatgggaagctgaggcagaagactcacttgaacccaggaggtggagggtgctgtgagccaagatcacgccattgcactccagcctaggtgacaagagcgagactccatctcaaaaaaaaaaaaaaaaaaaaaaagggaaagctgagacctgaagaacataaataacttatcctagattacttaaaggataatctataccacatacccagatctgtgatttcaaaatccatataactaggtttgaagctaagtttcttattaagattaccctcaacttactattttcgcttttcaaataaaactttttggctgggcactctggctcatgcctgtaatcccagcaatttgggaggatgaggtgggcaaatcacttgaggtcaggagttcaagaacagcctggccaacatggcaaaacctcatctttactaaatacaaaattagccaggcgtggttgcgcacgtttgtaatcccagctac

SEQ ID NO: 154586 - DNA, 434 bp, Homo sapiens
accatagtaccactcactatgaatctgagcaaatctttaataagttttctgttttctcatttataaaatgataataacagtacctacctttatataatggttttgtgaggattaaagaagacaaattatgtagcatacttagaaataatgcctagcacaccatccatgctgtatattttagctgctatcgtcatcatcattgtcatcatcatgggtttcagtttatgtggattgacaggattcattcactcactccataataatagacagcttgtgtggtgggagctggggacgtagcagtcaacaggacttgcagacgtccaagtctaggggcataaagcaagatggcaacagacgctataagggaaagactcccagcactttgggaggctgaggtgggaggatcacttgaggccaggagttcgagaccagcc

SEQ ID NO: 154587 - DNA, 402 bp, Homo sapiens
agtctttctttccactcgtgacatcaaggttatgagtcctacaatcactttagttgatggagttctccacaatgtgttgcagggcctggtggttaggactatgttcctatattagcctctctgcgtggcatgcttactaaaatgtgcaccagtggctctgacctctttgatcacatgacgaaagggaaggggagagagagggaaggctctgtgattatctgattcccatggaagttttccttgttttgttgctggagcactacaaggcaaatgctactcacttctttcaagaaatcccagctgcagaggagttgctgaccacaacaggggctgttgccaaaacactctactggagtgctgctgtggcctagaaatagctgcaaataatgagaagttctcaga

SEQ ID NO: 154588 - DNA, 173 bp, Homo sapiens
gctaatttttgtatttttagtagagacagggtttcaccatgttggccaggctggtcccgaactcttgacctcaagtgatctgcccacccccgcctcccaaagtgctgggattacagatgtgaaccaccttgtcccgtcctgtctaacccactttcaacatttaaaaacctcca

SEQ ID NO: 154589 - DNA, 666 bp, Homo sapiens
tatgtaaaaaggtcttaatgtcatttttgggtatacatacatgtagaaagccctcctgatataaaatccagtagctatttgacagactacccattaatttattactggaacttaaaaataattactgtacttttaaaagaacaagaaattggtcaggtggggtcgtcacgcctgtagtcctagcactttgggaggacgaggcggatggattgtcagagctcagaagatcgagaccagcctgggcaacacggtgaaaccccgtctctactaaaatacaaaaaattagctgcatgtgttggagtgcacctgtagtcccagctactcgggaagctgaggcacgagaattgcttgaaccaagaatcacttgaacctgggagggggaaattgccgtgagctgaaatcatgcccctgcactctagcctcggcatcagagccacactctgtctcaccaaaaaaaaaaaaaaaagcaagaaatgtaaaaaggtgttttaataggacagattataggattcagtgagataatggagaagttttaggaaaaattgtctgatagtcctttctttctattgacatggcccctgtataagaatgctatgtaaatttgtgaaaagtttaatattttctctatttttacgggtagtagtaggcgcgagcgggatcctctag

SEQ ID NO: 154590 - DNA, 582 bp, Homo sapiens
  misc_feature (30)..(30): n is a, c, g, or t
cacattgtatcccccactggagccaaacangaggatgcttgagcccgattcaagcccgattgatctacatagccagacctgggcccggtgccatggctcactcctattatccccgccctttggaaggcccagacggctggagaacttgaggttaggagttcgtgacccgcctggcccacgtggggaaaccccctctccacttaaaataccaaaatcagccgggcgtgttggcacgcgcctgccatccccgctatttgggaagccgaggaaagagaatcacttgaacctgggagggggaaattgccgtgagctgaaatcatgcccctgcactctagcctcggcatcagagccacactctgtctcaccaaaaaaaaaaaaaaaagcaagaaatgtaaaaaggtgttttaataggacagattataggattcagtgagataatggagaagttttaggaaaaattgtctgatagtcctttctttctattgacatggcccctgtataagaatgctatgtaaatttgtgaaaagtttaatattttctctatttttacgggtagtagtaggcgcgagcgggatcctctag

SEQ ID NO: 154591 - DNA, 660 bp, Homo sapiens
agggccatgatttgtactgattttgttcactgttctatccccagtggttagattagggtcaaccacatagtaagtgcttggtaaatatttgttgaatgaatgaaatggctgggacactgagtttcaccctctgcttggaattcttttacttatatgattgttaccactataccacgttggccagggatgctctgttccccctttaatgaacaaggacaaaaacatcttctcttgattctttcttagcataactgagataggctggagagttcaaggaagtgttttgagtactaagaacaatagagaaaccagcatagagaatgcaacaagtattacaacagtctggcttaacagtgtttcactcttggagctgccatatctagcttgttctcatattttgcaggccccatcctaatctacccacttaggagaaatctaattccagcttcataggactagtcctgaccttgccttgatgccctgcatgtggcaccatctcataatctgttactaaggagctcccttttgtacatcatgacagctgccaacaaggccaagagaacccagcaaggctcattttctagtttgagtgttgtgttagtctgcatgggctaccataacaaaataccatagaatgagtggcttaaaaagcaaacattt

SEQ ID NO: 154592 - DNA, 242 bp, Homo sapiens
gggttagggatggggtctggtgccgtggcgcttgggtgaagggcaaggccaaagctgtgcagacagggctccttgctgctgctctgctgcctgggccaaacagacacagggactgggaacctcctagcaggttcttggtggctctgctgccctcacctaagtggctgaattttgtgtggattccatgctggagagcagggccgggggccttgctggcagtgacagccccacagtgacgacag

SEQ ID NO: 154593 - DNA, 657 bp, Homo sapiens
tgcctttctgcacactacttaatctttcttatatacctaatattataaagggacataaacaaagactcagaacaatggaatatgcctattataggagggtacagttcatacttgtttaaaaataaatgtggaggctgggtgcagtggctcacacttataatcccagcactttgggaggccgaggtgggcggatcacgaggtcaggaggttgagaccatcttgacaatgtggtgaaaccccatctccactaaaaatacaaaaattaaccaggcgtggtggcacatgcctgtaatcccagctactcgagaggctgaggcaggagaatcgcttgaatccgggaggtggaggttgcagtgagctgagatggcaccactgctctcccgcctggtgacagagcaagactccatctcaacaaaaattaaaataaaaataaaaatacacgtgggggttttgttctggttatttctcatgcttaaatacagttgtagtaccaaaaaaaggtggagtgacatggaatttccaggtaggcatcaaagaggattaaactagctttccaggataaagaggaaatatagtagaataaggctactaattggagctaaattggcaatataggcaaattgaaggccctgaggggcaaatggaggatgtgacatg

SEQ ID NO: 154594 - DNA, 451 bp, Homo sapiens
tatgaagcatctgagtcactccgagcaggttatggacgaataaacgggccaatgccctgtttttgttgtacccagattttttcctgcgtgttcttgtctctgtagtcctggataccatcaggtgcttgatgaaaatcaaatacaatatgagctctgtcagatataataagcgtttttgcccagccttctagtccttttcctttctgaacatttttctctgtcttcttcaagcagtctaggaagctgtgctttaggatgtcagggtgagttttaaacactggcccttggttcattgtcattcttcctatttcgtccatctttggtaattcccttgtttgcctggatgaaccatctaaaatgattaagtcatatccatgaaaccagggtaagcctgacacaaaacacttgctcatgaagggagcatgtgtcctgaggataaaggttgagaatc

SEQ ID NO: 154595 - DNA, 796 bp, Homo sapiens
acttgcactggttccccattgcctttatcagtgcattcacacactttcctctttgggcctcttttcctcttagtattagctccttcttattaactctggtaggcagaatactagcccctcaaagatgtccacagcctgaacaccagaagctgtgaatatgttagcttgcatagcaaatgggaattaaggttgttaattacctggtgttgaaatagattatcctggaatcgctttaaccagggaggcagaggttgcagtgagctgagcagctccactgcactccagcctgggcgacagggcgagattccatcttaaaaaaaaaacattatcctggattgttccagtgggctgattgtaatcatagggcctccaaaactgcaaaagagagtcaagagtgacaagtaactatgaagaatgattagagagatacaacattgttggctttgaatatagaggaagggagcctccagcattgtgggtgacctccagaagctggaactggtaaggaaacattcccctgaagcctctctaatgctctgatgacaccttgattttatcctcatgtgatcaatgttggacttctgaccaacagaactgtgaaataatctgtgtcttaagtttgtgataacttgttataacaccaataataatgtacggtatacccttcaagacattctttattccatgtgagcattctcctaaaattatgccctttcatgtctgcagtgctcttgcctatgcttcaacctgaaatattctatccttttgtaaaccaaaaataaaattataaacccca

SEQ ID NO: 154596 - DNA, 740 bp, Homo sapiens
acccctggctaattttttttgtatttttagtagagacaaggtttcaccatgttggtcaggctggtctcgaactcatgacctcaggtgatccacctgcctcagcctcccacagtgctgggattacaggcgtgagccacagctcccagcctagcaattcttctagaacaggtctgctgacaatgtagtgtcttgttttttccattatctgagaatgtctttatttcactttcaatacttaaagatatttttgctaaatgtagaattataggttgaaagttcttttttttagcattaaaaaaaaatgttgttccacttccttttggcctccattgtttctgatgagaaatctatagtcattcaaatcattgcttccctataaataatgtattatgtttctctggctacttccaagagtttttcattgtctttactttccaacagtttggctatgaggtttctggatgtggaattctatgggcttttcctgtttagggtttgctgaacttcttgacttttgccaaattttgaaagttttcagccattattccttcagatatttttttctgcatcactgtctttctctttctccttctgattatccagtgacacaaatgttagactttttgatacagcactccaagtctctgaggctctgttcattgatttttctgattcctctctctctctctctctctctctctctccccgtttctccctcccttcctctctctctgtgcgtg

SEQ ID NO: 154597 - DNA, 319 bp, Homo sapiens
agcatctgctaagacattccatccagccaatggttggtgggctcgatgctccctcagaaggtaaattctgtgctgtgcattccctgggttaggagtgactgtcctgggcatcagggagggcttccaggaaggaggtggccccagagccatggggaagcctcctggggccaggactgggtggggaaagcattataggagtggtataaaggaagtgtaattcttcttcttcttttttttttttttttgagatggagtttcactctgtcgcccaggctggagtgcaatggcgtgatctcagctcaccgcaaccttcgcctca

SEQ ID NO: 154598 - DNA, 697 bp, Homo sapiens
tactcctaatccccatccttgagacctccccttctttccccaacttctcatacctaatagttctcttgttggacctagccttccaaggactttaattcagttgtaaacatgacttgttcattatatgacatgttcaattacaattcgattgtatccccttccctcctgattgtcagttgcctagtcatttctaataccaactcttagggaacgctcagctctatctatctttggagaaactcattcctttctctgccagttggtttctgtagtatctccaatgacttgcagagatttccttagtcctctctacagttaattcctagttctaggctcctccaacattttcgtttgcttctctaatctctggattcctccagcatttttctttgcttctgtagttcttggttttggggtgggggggtcagttgggttgctttgtcactttgtgagtggagggtaggtgtctttcccttaattcatgacttccagaagcatggtggccagaaagccttgtcagaactttgaaatgttatagacgtgctcactatggcacattttgtcaggaatgctagaccatgaccacaacacatttactgttagagaactggggttaatctgctaatcaacatttccctagtaactggcagcaatgccacaagatctgtttaccctaccaggactcgcttggaacctg

SEQ ID NO: 154599 - DNA, 558 bp, Homo sapiens
tagcaggaacaccaatttggaagtctaacacgtcccaagaaagtcctgggaagttttcaactttgttacagttgaaacctaatagtgacttctaagaaaatttgtgggctctgcctgctttatttactctggtatccatatattccaatataactgatgtatatagacacctgtagtatgtttctgcctaaaatgtttatttcttgataagaaccagactcacatgttgggatattttatgcaaggggatagtggctaaggtgataatggtctaggctttggtcgtccaacttgaaaccacagaagacaaaatcaaacagggttcaagatggaaaagtaacattagggatcctgcctgtctgataattctggtatagactctgttcagtgtaataaagccacatgatcaccgcatatgctctactaacatgcatgccagttagaaacaagcatggatgggctgttgcctgctagcttttagagggctttataagatcaacttgctttggttgacacttttatttttacttgtattccagaagtgttattgagaaaaac

SEQ ID NO: 154600 - DNA, 137 bp, Homo sapiens
gagagaagtctgaatacccaaaaagacagaaagctgtgactatcagtttgaaggatatggcctaggacttgttatgagtctgcttgctagtaaaggtatgttcataatgtgtattgcagaagtgcgtgttggatcca

SEQ ID NO: 154601 - DNA, 136 bp, Homo sapiens
taagtatgagataccataagggaggatcaggaaagggaaaacaggatttttaaaaatattggaacagggaataaatagcagagaggaacatccttttttttttttttaaacagaatctaaccaggtacccattata

SEQ ID NO: 154602 - DNA, 268 bp, Homo sapiens
gctgagaaactctaatatacagcaatagtttgaggttaaagacagacccttgatattttaagatagttctctcattttcagcacatatatgacatatttacattctgatgtgttttattatcagcctcactagaaggcagctctgtgaaggcaggagttttgtctctttcgttcacagccatttctcctgcaccagagttgtggtagatactcagtaaatactgactgagggggccaggtgtggtggctcacacctgtaatctcagca

SEQ ID NO: 154603 - DNA, 137 bp, Homo sapiens
ccaccttcatctacccctactaacacacatcattaactgaggggcctgctggcttttgcctctgtggaaccacaacccttcactgggcctatgactctgtgcaactctctgtttccacacaacacccattgtcctcg

SEQ ID NO: 154604 - DNA, 480 bp, Homo sapiens
ctttggtctccaatgtttacttaacttcctgccttaagctcatggcagccttgaccctatgtgggacatgatttctaatgttttctccctatcctttcaagggtaatcgggataaaaggagaacacctgtgccatttagacccagtaatctcggggcgggagtggttacttggggcagtggcgggggccagtcagacaccaggaaggaaggacaagaaaaaaaaaacctgtgacacatgcatagaaattactcagggatccttcaaagcaacacagaaatacatataaagtaatcctctttaaaaagaatcgtaaccctggttctaaactgaagacttattctgaaatattctgatgtcatagtctcaaaaactgaaactcttgtaattggaaaatgtaattatctagagcttttgtggcttctgtacatatctctctgttgctaaacagagaataatataattaataaatggtaaaagg

SEQ ID NO: 154605 - DNA, 361 bp, Homo sapiens
  misc_feature (301)..(301): n is a, c, g, or t
tcgggagcccttaaccccgggagcccttaaccctcctctctgggcatttgcctgtgtttgctgaatggttctcatagttggacacggaagttgctcccagttttttcactattaatattagtattagtattaatgctgcagttgatgcctccttgtctattgtaaccatttctcgattgggtgtttttcccctggaactttttcctttacgattgtaatttgggtccggcgtggtggctcacacctgtaatcccaaaactttgggaggtctggcaggtcgggagttcgagactgaacctgngaggcagagatgacagtgagccgagattgcgccagcgccactgcacttcagtctggtcaa

SEQ ID NO: 154606 - DNA, 325 bp, Homo sapiens
gtggaggggtgggggactatagactgcaggccaaatctagccttgcccatcattttgcgaccatctaaggctgctctcacgcttcaatggcagagttaagcacctgtgacacagaccagctgtcccacaaagccaacaatatttactatctggccctttaaagaaaatgtttgcccctgttttaggggaaagataagaaaaaggtccaaacagaaaaagtggataacaaagacgagctggaatgataaaaaagctatgcaaaactagaagaactggcaataattctccaaagtgaagggaaggacagggagttgaaatttgaacc

SEQ ID NO: 154607 - DNA, 337 bp, Homo sapiens
ccaagttcagacagacagtcctaacattagaggtgaacccactggaagcttaataactgacagtttccatactctgtcttccctttaatctctagttatagagcaccaggctggaatgctggtctcatcttggataaaaattctttcctccctccctcattttttccttccttggtttctttctaccttccttcctccactgctgccttagcatttcacatctcaaagcttttgtgtatattaaatccttatattctatattatatatcatgtgcatttcatttattgaagggagaacccctcatgctttatttgactctgtttctttagtggctac

SEQ ID NO: 154608 - DNA, 444 bp, Homo sapiens
catgcatttcaggagtaaatcccacttgtttgtggtgtataatccttctaaaatgctactgaattcagtttgctagtatttgtagaggatttttgcatcattgtgcataagggatattagtctgtggttttattttattgaatgcctggttctgatatgagggtaatactggcctgttagaatgatttaggaagtatttcttactctccacttttttggaaaagttttgagaagggttggtactactagttgttgtttaaatgtttggtagaattaatcagtgaagccttcaggtccaggacttttcttaggagatttttgattactgattaaatctgcttactagttacaggtctcttcagcttttctgtttgtgatttagtcttggtaggggttttttaatttgtttttttgtttttaaaacagagtcttgctctgttatcc

SEQ ID NO: 154609 - DNA, 693 bp, Homo sapiens
acaaaaatggttgtccttgtggagttgatggcacagtgataatattcttctctggaagtagtactatatcctaccagcaacatggcatgtgtgttttcagtcacagctgaaacagggagagagagatttgggagatggaaggagaagaaacagcataccttctctactgccaactctggcatagctgactgtgtgtttatgactctgagactccagaaaccaaagggagatgcaaagaaaaagatggaagaagtaaaatacaaggaacacaagacatgcagccagcaggctcttgagtggttatcatccaggaagatgttgggggatgaagcagaagtacaaaagaacatcactacggcataatagaaacttggccactgagtaatggtgttccagcctacagctacttactgggtccctattgatggcaaggcgtgctcggtgccaagaaagccactgagaatgtgaaatgagatagcttcttctggaatcttgctatctaatcacagtccagattaggagctggcacgagtcacatctatattactcaggaggcactgatgtcaccattatacaaacagctcctaagtggtagccaatttattaagtactgggggtcatgagaaattctgagtggttatggttgcctcagaaggaggaaagcaaagttgtacataaattccacttaaggtc

SEQ ID NO: 154610 - DNA, 247 bp, Homo sapiens
gtgagttacaaagtcctccggaatgagacggttctggaattcatgactgctctctgtcaaagaactggcttgtcctgtttcacccagacgtgtgagaagcagctaatagggctcattgtccttacaagatacaataacagaacctactccattgatgacattgactggtcagtgaagcccacacacacctttcagaagcgggatggcaccgagatcacctatgtggattactacaagcaggtaggac

SEQ ID NO: 154611 - DNA, 325 bp, Homo sapiens
aagtaggagacactgggaagaaaaagaaaggagggggaagagcttgcaaaggggtgccatttattagccttttggttttgttttttaaaactatacaatagactgggcacaatggctcaagcctgtaatcccaacactttgggaggcagaggcaggaggactggttgagcccaggggttcaagaccagcctgggcaacatagggagaccatgtctccacaaaaagttaaaaaatcagcaggatatggtggcgtgcacctgtagtcccagctacttgggaggctgagatgaagaagtatgcttgagcccaggagttggaggctgca

SEQ ID NO: 154612 - DNA, 497 bp, Homo sapiens
taagttgttttatccctgaaacagtcctgtgaggtagggtcgcgctttttaagatgaggactcaagcacagagagggcaacttgccgaagatcatatagctaacacgctgtagaccacaactgcaacctaggcagcctgtgcatttaaccgcaacgtgatgccgcctcccggcagtgcccaatgaatgcatgatgacttagccatgtgctcagggtcccttgacaccatgcccctgcacatctcacacctccctgcctctgcacacgacactccctttgtctggaaggtctgagccacctggtccagctgacagacaccctcaccttcaaccctcagttcagacacccatgttgagtgttcccaacagtcaccccccgagtccctcaggcatatgggtttagaattctaaactccacatgctgggcccaagggagcctggacacagccctgccacagcacttactgcacatgtgtgtcatgtcttgtccctaccctt

SEQ ID NO: 154613 - DNA, 478 bp, Homo sapiens
cgactctagaggagtccccccctagacacttctcttacaaacttcatttttcttaaaatggaactttctcacatcaggaatttgtgttagttcttagaactggctgtctctcgagtattaagaggcccagtgtctatcttagacccattccattcaaaacttacaggtagcgctcaggactgtttaaggatttccattagtgattctgaaaggtggggagaaccatgactttattaccatctcatcatcctatgaaagaatataagacattatgtaactgtgtttttttttttttgagacggagtctcactctgttgcccaggctggagtgcagtggcgcaatctcggctcactgcaagctccgcctcctgggttcatgccattctcctgcctccgcctcctgagtagctgggactacagatgcctgccaccacgcccggctaattttttgtatttttagtagagacgggatttcatg

SEQ ID NO: 154614 - DNA, 187 bp, Homo sapiens
attagaaagctaaggtcacatttacagacttactctgataacatgtttgctgctaactagagattgtagtagactgacctaggagaagaccaagaatgtaccaaacaaaggagaggtaaagtagagtaaccttttttagaatgtatttttctggtctggatttcagatgtctcatttcctacctcca

SEQ ID NO: 154615 - DNA, 514 bp, Homo sapiens
actgatgagatggctgaagttctagcatctattttggatgttggggatgaaactacacattaggagtactggaatagagaaggagcctggagccctgagcactgtgtggagttgagcttctagtctagttttggactatctagtttggactaacctctggacttctacctaagagaaataaacttccatttaatttaaaccactgttgttttgggttctgctatcacagccaaaatgaatactaactaacagagtgctcaggagcatgtattctggaattagattggccaggttcagtcacttattacctggcagccttacgcaatttgcttcccttctttgcctcaattgtaaaatcaaaatgctccagcctggccaacatggtgaaaccccatctctaccaaaaaagcacaaaaattaggcaggcatggtggcacacacctacagtcccaggtacttgggaggctgaggtgagcagcttgaacctgggagatggaggttgcaatgagccaag

SEQ ID NO: 154616 - DNA, 318 bp, Homo sapiens
cctattgagaaggagtaaagggtctgggaggggtggcagggagttgctaattcatgtatggtggctagagaaggcttcactgatggggttgatgtttcagtggagacttgaaggaggaacaggaacgcagcatgagactgtcttggggaagagtgttcagcagaggcagcagtgctcagctagccttgaggggaacatccaagttggtcatgtgagtgcaaaaaggccagtgaggctgcagctgcgtgagcacgtgctcaatgacggggtcaagtgcagcgcctcttggtagtaagagtagctgagtgtaaacaccta

SEQ ID NO: 154617 - DNA, 168 bp, Homo sapiens
ggagaaaagcacactggtggtggcagggaatctggcagtgatgcctggaaacagtacatgagaaggtctacttgtactatcaactacagtaaagactttcctctggcccaaggaatcaagtttcagtaaaggtgttttagatgaacatcccttaatttgaggtgttcg

SEQ ID NO: 154618 - DNA, 563 bp, Homo sapiens
cccctccatccctggcttgccagtgcagccccaagccccagcatggagagacctccaggccctgggagcgaccagactgcggatgggggcagctctgggcgctgacattcccaagtcctgggagcgaacagactgcggatgggggcagctctgggcgctgacattcccaagtcctgggcgcgacccctcctcagagtgacctgggagtagcatcctggttggctgggttcctttcctggtcctcacatctgcttctgtggccacctcctgtttcagccctccgcccttccctctccttttcccttccatccggttgcttctccagctcttcttggggcacttgggctttagattcagagggtcctggatcccaagcccatttcttccactgggcaagtaagtgccttctgctcccagtgccccacctttctcatctgcaaaataggcagtcgtaggtgccttgcaaggtgtgttactcgggtatgaagtttataagtgcccaacagatgtatccgcaagccctttaacttgttggttgtcatattgtatgacttggaataaag

SEQ ID NO: 154619 - DNA, 553 bp, Homo sapiens
tagaaggttctcaactatatcctcaactaatctttattctcctaagtacagctagaaactagatgttctagttgggaacatgtcttctagtaaatgaaagggcaagtgagctatacagatcagcaacttgtcgccacatctgaaatgctacttagtgccttgccactcaagattttatgcagatgcttaggaagtggtaatcaaggaacacagacttcaggcaattttgacaaagtaagcaaagctgaatgcattagaaaaaaaattctgggaaagggttattctatcataatatgagaaattttcttgctcaaaagctctttgtaaggactctccagcactttgcagaatacagtacaagaagctgctcatatcatgactggggtctggtcataagcatacaatgctacattggctccccattggatccccatgttacaaataaggaagtggtagctcagaggttggggccttcccaaggtcagtaggctagtaaatagcaacctgtctaaaacgaggtgcaaagagtggccctaaaatatatctataactt

SEQ ID NO: 154620 - DNA, 231 bp, Homo sapiens
agccaaagagagaggaaatggaatttgtttgtttctaattcttggaggagtcttctccgtgctcctaaaatcataaccagtgccaaattcaggaagaagaggcgggcaggacagccaatgcagattctataaacagtgaaaactccttcatcttcatggtcagaggaccccctatgctctgattcctccacccaaccaccaccacagccttgcttcctcccaccacctctg

SEQ ID NO: 154621 - DNA, 459 bp, Homo sapiens
aacgatggtcctcagcttctccagtgcccccttcccaccagtatattttcaagcagtggattttgccatcattctgttaatgttatgtattacactgattgattttttaaaatgttgaaccctccttgtattccaggaataaatatcacttgaggatggtgtataacctttttaacctaataaattcagtttgctatcatttttttggaggattcttgtattagtgttcatgagagacattggtctgtaattttcttttcttgtagtgtctttgtatggctttggtattgggcctcataggcctcatagggtatatactggcctcataggatgaatcaaattttaaaagtttatttggaaatgtttgagaagtagtggggttagtttttaaatcatagaatttagcagtgaagctatcagatcctgggcttttctttttttttttttaattgggagatt

SEQ ID NO: 154622 - DNA, 431 bp, Homo sapiens
cagtacatagctgttcagttcccaaatttgtcctgttcccttgggccattgtacatgctattctcctccttcccctagctatcagctatttctgttcatatttggagtctgtcacttcatctggggaagcctttcctagagctcttactagcactcttatacattctcagtaacatcatgtagtttcacaactgaaatgaatattttcctatcacattacaattgcattccttaacacctgtaaacgacaagggctgctacaaatcctagttttgcttacctagggtttagaataatgcttgccatgtaattggttctctgtaaagttgttgttggatgaataaaagggaaggaagtaaagacaggatatatgagaaatgctatgaaagtgtgatcttaggatgaactctaggagaggattgggagagcaa

SEQ ID NO: 154623 - DNA, 531 bp, Homo sapiens
gtcagtttagggaggtcatgttgtaagacatggtgagtactgttagtctcaatcataccacaatctgtagagcacagccaggattgtcaatgttgagggctggagtccaggaagttcaggagcaaagatgctgaaggagtcacacgattggaaacttcattgtggtggcactcaagtcactgtgaccggtgtgtactaagcaatacctatgtgccactcacatgacagcccctgggcagactgtggggaacacagccctcctcctcaatgacatacactagatggggcagaaagggacattctcacccgaggcaatgatgtacactagatggggcctgggaatcagggagggccatgaaggcacatctgcatgacggacacggcgcaccctcatgatggacacggcacacccgcaccacagacatggtgcaccctcgtggacatgccacacccacgccacaaacatggctcacccttatgatggacatggtgcacccgcaccacagacacagctcttccttatgatggaca

SEQ ID NO: 154624 - DNA, 352 bp, Homo sapiens
tcacagtttactgcaatgcaagtgtctctgctggctcccacaccggattgtgagcttaaagtaggaatccagccaggcgtggtggctcacgcctgtaatcccagcactttgggaggccgaggcaggtggatcgcaaggtcaggagttcaagaccagcctggccaagatggcgaaaccctgtctctactaaaaatacaaaaattagctgggcgcagtggcaggcgcctgtaatcccagctactcaggaggctgaggcaggagaattgcttgaacccgggcttcagaggttgcagtgagccaagatcgtgccactgcactccagcctgggtgacagagtgagactccatctcac

SEQ ID NO: 154625 - DNA, 229 bp, Homo sapiens
agcaaaggacaattcacaaattgggcagcctctcgagccagagtaggccgagagcgactcccgtggagccacatgtcggaagaagattaacagacagaaaagggaacgtgatgtatggaaagcagaaatgaggggcagagacagccagagtggttacagtttggcatttgccttatttgaacatgatttgaacagttggccccctttggccaaagcttggtgactggca

SEQ ID NO: 154626 - DNA, 398 bp, Homo sapiens
tacctgcaccagtcataccttcacattgccttatacctgtcatatcgatgatgcggaggatagtgggagagtctgtgtaactatctttctcagccaaattattccaatcttttgcatgcaatcaggatttaaaatgagcagttagtatgtaggctgcactgtgagggggaatgacttccgacttcaggcaattcactgtggccattgttgcacagagaggcgtttcagtatttctactagagcctgtgttttgtgaagcttcgctggttttgccagatgccattggctcatcttggtgaagtgcagctgtagaattggtattttgctgagtgtatccacgtcaacgtctctgaaatactggtgacaaactttttcccaccccaatgagaaaatttttg

SEQ ID NO: 154627 - DNA, 167 bp, Homo sapiens
ctagattatatgactctccttttgtctctgaaacttgtccacagtggagattttgacataccacttttctcaggatctacataatctgaattttgttccatgcctcagtcttgcccactggggtgattgtgccatataactagtctcaattcctaggttatgtgact

SEQ ID NO: 154628 - DNA, 569 bp, Homo sapiens
caacatagaagaacttcaacaaaaactgaacatttgcagtggatcacactgaataactttgtattgcactactcataccactcacgtatataatcactgtcctctggctgattatttccgggaaagtgtaagtacgatactatatattcaatgaaatttaaaaagggtgaattgtcagaaaaaggtttttacattgaaaataggtagtctgtaagtataagattacaagtttttaacacatgatcctttcatttatctcaaactcagtacctattaagctacaaggatcctctttttctaactggtgaacacatgtacattcatcttattcatgctctgatcccattacttcccagtctttgagtgactaaactacagcatcctaaattttctgttgtagtctaacatctggattatttccgctgtccctttgtaatcacctacatgtgacctgaagatctaaaattacttcttctaaaagcataaaagtagtttagtataatatatagctctgtctatgcgcatgatgtgtgtatatatctctgtgtgttttcccgcatatagtcatc

SEQ ID NO: 154629 - DNA, 433 bp, Homo sapiens
tgagagctctctgatggctttctagggactgcagaatgaaagccatgtgcctcagttggcctccaagggcccttcccactccacacctctggtaactcctgtaacccttatttccaccacctcccctacccttcatagtactcctgactctggccagatcattccatgccctataacatctctaagacttgcttatgtccaaaggtgacctcctactcatatgttaaagcccagctcaaatgtcacagactccccttgggtctcccacttctcttgggccccaagaggttgggcaatgagtggtacattgcatttgggaagatggtatgggggattgttggcagggtaactcggttcctgaggatgggggtcctcagaatggtgggtggtcaccaatgtctagcacaatgctaggcacaggatagacacttag

SEQ ID NO: 154630 - DNA, 327 bp, Homo sapiens
atgagcaagcctggatgagagctgatggtgtgagtgggtgtaacgggtggtcccagtctggtcttggtagtggtagaggaggggagaatgaggggagggcttcccttaagaagtgatgtttaaactaagatctgaaaaaatgagtttaacctgattatgcacatagttatggaaagagcatggtaaaaacagtgtgtaggaggaactatgaaaaagccaatataaccacagcacagagatgcaagcacttgctgagtttgacttaccagattgtgtatgacttataaaccacattaaatattttggactttcttctagcagcagtgg

SEQ ID NO: 154631 - DNA, 452 bp, Homo sapiens
ttcgagaccagcctggccaacatagcattagatatgagttctaaatttctcttcaaagaatcaatatgtcagtatgttcaattctttgccttctacttttaaacttaacttccttgtaaagcaacctttttcgatcacctgctccaccctgactcattccgattacctgctctgccctgactcattctccaccctgactccttccgatttcctgctctgccataaccattttccccaccaaaccactcacccggtcactctctttaaattagccaatcggaattagtttagcctgtgcggtctaaccctagccaatatgggaatgacagcggcaggggccacctgtgtcaggaataagaacttcttcccctcttttgtccaggtgtgtgctcaccactgctccatctatgagggcgcacccttctatagaagtaaattgccctactgagaag

SEQ ID NO: 154632 - DNA, 455 bp, Homo sapiens
gcaaaacaaaaccacatgcatttccttgaaactgtgggaagggcccccaacattcctaataagcaagggattggatctggaggtcacaggatgaatgagatgtggcctctgaccccatggtgctcacagtcttatcttcactgtgcccaggataaattcttaccaagggcccccctacagccactgggcaggtgcaagggttcaggttcactcagcttcctttctttctcttaaggctccagtgcagaaaaaaagaatggttgggattactttcttctttctgcagtcttctttatttccttttcctgctcccagctcccagttccctcttctaattagcttctcaggaaaggctttctgcaaccaaaattctggctgttgaataaaaagtagactagaatttcacataaggcaaagactcctgaggttggcagatgctgtgatccttgttcttg

SEQ ID NO: 154633 - DNA, 127 bp, Homo sapiens
gtgtgagggtggcatgtagatgccctgcaatccctcctcattgctgatcttttggcactttgagtagaatctccccctacaatgcggtttgcaccgtggttgggtcaatatctgtcccctcttgtga

SEQ ID NO: 154634 - DNA, 380 bp, Homo sapiens
cctctggtcctgccgagctgtgtcattgcaggtacaagaattgcagaagcagcggcactgtatctgacatggggtcttctatgtcctgccctgatgctggcagcgggtctacccccagctgccccatctcctttattagtatcaaacagaatttggctcaagcgctggctccagcactactcaagatctgacctcagatgagctgtgcctcacttatctgagctttctcaaatgtaaaaagagcaataatggtctgtttcttgtccaggtaaaaagagctgatgtttatagagcacaaaggtcaggctgtgacacatgcagtacttggtattttaccaaggctggtgaaactatgtgtagagtaagtaaacagattctga

SEQ ID NO: 154635 - DNA, 181 bp, Homo sapiens
cgaggatcccctcggccgccggattcctgcggcgccgattcctatcatgaccccagtggcagcaaatgaaaaggctcagattctcctcattttcacatgggttgccagccttgctttaactctgtaagtttgtgttccacagagcaaaatcacaaaagagatcatgcaataggaatcccgg

SEQ ID NO: 154636 - DNA, 307 bp, Homo sapiens
gtagaaatcacagacatgacttcacagcctgagattcactggactgccacagccactgctgagtgttgctgcagcctagaccaagccctataggtattcttgatcttgctcccatctgtgcagtggaaagatgcgggtatgaggtgtggggaaatcaaaccaaaggacaaacatgaaggctcttgtaagattcaggagcttgtgtgaatgttaggaagcaaggtggttaccaggtggttgtgcccagtgctgcagagaaggggctgctgaggggtgtcctaaagtcttgtgtcatagctcctgggag

SEQ ID NO: 154637 - DNA, 542 bp, Homo sapiens
gtgatggtgtctagaggatccctgctattcatcggcacaggctcagtttcatggaagacaatttttccacccgggaagggggatggtttggggatgaaactgttccacctcagatcatcaggcattagttagattctcataaggacggctcaacctagatcgccggcatgcacagttcacaatagggcttgtgctccagtgagaatctaatgccaccgctgatctaacaggaggtggagctcaggcagtaatgcttgctggcccgccactcacgttctgctgtgtgtccaggtttcttaacagggcggggactggtacaagtccgcagcctgggagttgtggacccctgataaatagttatcctcatttcatgtatgggaaaacaaaggtggagagaacttgcttcccttctcaaaggtcaaaaacccgataagctaagcagtagagattcaaatccacaaaacctggcaccagagccaggacaatttttagtatattattttgtatctgcaagagcaagaaacacagatgttttacacaga

SEQ ID NO: 154638 - DNA, 314 bp, Homo sapiens
aatagaggaagagcgaaaggttcaagaaaacattccctcttttaaggacatgcacattgtccactctgcttccaattatggatgatcagccataacatcatctcaaaggaggctgagctgttggctttattccagataacctgctatggatgagtaagttgagaactgatgttagagtaggcagctggccacctctgtcacagtacctcctaggtaatggctttcttcccgtttccaaggtgctcaccccgtacagatgtcctctacttcctcccaatttcagagcagttcaggatataaggtacaaaatgtca

SEQ ID NO: 154639 - DNA, 147 bp, Homo sapiens
ggaggggtgagggctggggttatggtaaggagtctgtgggccagctgggattttggtcgacttgggaggtgctcccaatatctgattaaatatttacgcccccagggaagaaatgattctcttgctaccctggcaggaaagccttgc

SEQ ID NO: 154640 - DNA, 744 bp, Homo sapiens
ccaccgcacccggcccaaatgaatactttttatcaaggatgagtagcaagtaaaatggcggccaacttggctataattgattattttttcacttcctttcagttactagctatttttgcgaactgtctttctaaaaagcctactgtctcgctgttatggactaaattgtatccccctaaaattcacaggtagaagccctaacccccaatgtaactgtatttggtgatagggtctttaaggaggtaattaaggttaaagaaagtcacaagggtggggcccttaatccaatatgattggtgtccttataagaagagagagatgccagggatgtgcatgcacagagaaaaggccatgtgaggatgtaaaggaaaggtggcttctgctaaccaaggagagaggtctcaggaggaaccaaactcaccacctccctactttgaacttccagcctttagaatgaggaaagagatgtctgtttttgagtcactagtctgtgatattttgttctggcagcctgaacagacctgtactcaacccaacaggacttcctctccactctggactttcctaatctctccattttaccattattaaaacttaaatgctcttgaatccagccctacctgcttatcttacagatgggaaagccagtgtccagtaaaggaaagtgatttactcaccatgattcctccagccctgcctggactctctccaccttccttttctgacatctctgttttctagaca

SEQ ID NO: 154641 - DNA, 282 bp, Homo sapiens
gtcaagggaaagttcattctgatgttttcgggtttgacttatctggaaaatctgaggagctagcagagaggtagacaagacaaacaaagtccttcttcagaaggcagcaaggacagccacagagctgaagggagggcttgaacataaagacttcagagacctatctacgtggagagatgaagaagagcccgggagcggaagacctggaacagtgtaagaaaccccatacatcgaaaacaggctcttgggatgagattcactcatccacagaagaggcaaacg

SEQ ID NO: 154642 - DNA, 325 bp, Homo sapiens
tctactccaacggtaatttaacctctgctatgccattagattagtaaagagaaatctaaaagatcagcatctccagcccaatgagccatgtctcaatttttgaaaacttggtggaattccaattaaaaagaaaaataacagggcttcaacaaatcaacagagaaaggagcactaatgtttaccaatacttatcattgccataggaactcacacaaataacatgtttcagatgtattaataaacattaatacgtgtgattaatgaacacaaaataaggtttgacatccattacaagcaaataatgcaaacattttaaaaggcagca

SEQ ID NO: 154643 - DNA, 258 bp, Homo sapiens
gtgatcatgcaccagatttccagatcctacttgccgaggaagaaaatggaaatgtgagttcctgcgaacgctgaatctaggtgggacgcttgccttgaacatcatggttcctttggtgatctataagggatctatttaagaagtggtcaggttttcgcacttcttggctggtccagggactgcagaaaccaaagctgctattgttgaggaataattcagtgggtcaaaatggggagatgtactgggtatgagtggaag

SEQ ID NO: 154644 - DNA, 885 bp, Homo sapiens
gatatagggagcttcctgaggactgtgaggcattactccagagaaagaactcatgcttggtcccacaaacccccaagtcctaagaagctgcagcatggtgcattttgggagcctgacttttaccagactgtgtcctgacctggggctcaacagtctcagcatctctacatccttggagtcccactgacattccactgcccacaactgccatcactaggggttgctgcagggcaaggcacaagtgaagtatgcactgtcgctcctcctgctacctgcctatggctgctcccattgaccattgcagagctgcaatgcagccacagctgcccccacctgacctttctgtcagtggcctgggatcaccttgccactgcttataacagctagcacctgcaggcaccactgggggtcctgagggcaggtctgcctgagccagctccatacctccagtacccaagcatgccatccgggggcctggggattgcccaacccagttcaccaccattggcacctcagcattcctcccaggatatgctccactcaacctgcctctgccactatagctggcacccagctgtatgtgccacttgcaggtctgaggtctggcctgcacagcccttcataaccaacaccaacatgaactgcttgattcccagagaattttcccaccactggtctcaagccatgcgtgccacatcagggagggaccactatgtcagccaatgtggctccaggaccagaggactgagccaggtggggtgtacgcaaccaggcggtgaccgggcggagaaagccaggagcggcgggacacgggtgggcgaaccggccactcacggcaaccggggggaaagccgcggaggcagaagcacaaaagagcaaaagatc

SEQ ID NO: 154645 - DNA, 831 bp, Homo sapiens
tagtgcaatcttggctcactgcaacctccacctcccaggttcaagcaattctcgtgcctcagactcccgagtaaggggattacaggtgcgagccaccacacctggctaatctttctttttctttctttctttctttcttccttccttccttccttccttcctttctctttcctgcttgcttgcttgcttgcttgcctgctttcgacggagtcttactctgttgctcaggctggagtgcagtggcacgatcgcagcttactgcaacctccgcctcccaggttcaagtgattctcctctctcagcctcctgagtagctgggactacaggcacctgtcaccatgcctgactaatttttgtatttttagtagagacagggtttcaccatattagtcaggctggtctcaaactcctgacctcaggcgatccacctgcctcggcctcccaaagtgctgggattacaggtgtgagccaccatgcctggcctattttttgtatttttagtagaggtttcactatgttggccaggctggtctcgaactcctggcgtcaggtgatccacctgcctcagcctcccaaaatgatggcattataggtgtgagccaccgcacccctcctggtctcctgatttcaataccgtgctgggttttcagaaagccaggtgccaggccagggcttgcagaggggctgaaatgaagccaggccagaagacagagcagccaggactctggcagcagcactattgggatttgggggctctccagcccgtttggaagagcctaggctctctctgctcggttgcataggttctcatactcatgatggggagggggg

SEQ ID NO: 154646 - DNA, 419 bp, Homo sapiens
taaacagaaggtcgacatttgttgtagaacgatttggaaactaccttacgtgtccaacaacaaaggactggctagatggattatagcatctccataaaacagaatattatgtgatcattaaaaccagctctcaggatgtgtgcagtggctcacgcctgtaatcccagcactctgggaggctgaagtagggagatgacctgaggtcaggagtttgagactgaccatcctggccaacgtcatgaaaccccgtctctactaaatatataaaaattagctgagtgtggtggtgcgcgtctgtaatcccagctactcgggaagctgaggcaggagaattacttgaacccaggaggcggaggttgcagtgagctaagatggcaccactgcactccagcctgggtgacagagcaagactccatctc

SEQ ID NO: 154647 - DNA, 376 bp, Homo sapiens
tgggaggccgaggtgggtgaatcatctgaggttaggagttcaagaccagcctggtcaacatggtgaaaacccgtctctactaaaaatacaaaaattagccaggcatagtggtaggcgcctgtaatctcagctactcaggaggctgagtcgggagaattgcttgatcccaggaggcagaggttgtagtgagccaagatcacgccactgctctccagcctgggtgacagagtgagacttcatctcaaaaagaaaacaaaaaacaaaaaactgattttggacttaacattgtatagaacaaaatagttgctttggttatgaaaaggacatgagcacccagttggcctgaaggacaagactgatgggctggtttaaggaa

SEQ ID NO: 154648 - DNA, 890 bp, Homo sapiens
caaaatgaggcgggggttgggataccaagtaacctttgacttcatagtttgccttcgcacaacaaaggaaacaataaaacttgcaaacatgatgtgtacgggagaaagcggcctgctagttctcaccatacatcctgctcattaggaatgaggagtgaggaacctactaactaacccaacaaccctgcagtcactgactgcggggaaaggcctgctccatggcttccaaagccctggactctgctgactatcacttcaatcgtgctgggaacctgggctcaggagggaaaggggcttggagcccccaccaagacgagctggggcagccacacccccttccctgccaggcttgctttctgcaactgcgcttcctccccgtctctgccagggtagcaggagtccacaacgtgcctgcctctgttcctaatttccatttactgttttgagcaagaaaactctagtaatgtgcctgaagatgttctttgcaggatgattccaggtaaatatccaaatattaaaaatctcattaactatattaagttttagctatatgacagatcacagagttattaaaaatgattaagactatacggcaacatggaagaatgttaaggaaaaatagaatatgaacttgaatgcatatctgccacacaaataggaaaatatgcatgcatgtactgtggtgtgggatcacaagtaattaaaaagtattatcaggtgatgatttcaaaaagggtcaccgcaggacccagagcccgcactcactagagcagcggtgagcagagtagatcacagcaccgaagccctcccagcagagtgcagcagcttcagcgcgaggccaggcctgctgggctgcccaaagagcaccccagctccctcctcccatgttc

SEQ ID NO: 154649 - DNA, 836 bp, Homo sapiens
caaaatgaggcgggggttgggataccaagtaacctttgacttcatagtttgccttcgcacaacaaaggaaacaataaaacttgcaaacatgatgtgtacgggagaaagcggcctgctagttctcaccatacatcctgctcattaggaatgaggagtgaggaacctactaactaacccaacaaccctgcagtcactgactgcggggaaaggcctgctccatggcttccaaagccctggactctgctgactatcacttcaatcgtgctgggaacctgggctcaggagggaaaggggcttggagcccccaccaagacgagctggggcagccacacccccttccctgccaggcttgctttctgcaactgcgcttcctccccgtctctgccaggtgagcaagaaaactctagtaatgtgcctgaagatgttctttgcaggatgattccaggtaaatatccaaatattaaaaatctcattaactatattaagttttagctatatgacagatcacagagttattaaaaatgattaagactatacggcaacatggaagaatgttaaggaaaaatagaatatgaacttgaatgcatatctgccacacaaataggaaaatatgcatgcatgtactgtggtgtgggatcacaagtaattaaaaagtattatcaggtgatgatttcaaaaagggtcaccgcaggacccagagcccgcactcactagagcagcggtgagcagagtagatcacagcaccgaagccctcccagcagagtgcagcagcttcagcgcgaggccaggcctgctgggctgcccaaagagcaccccagctccctcctcccatgttc

SEQ ID NO: 154650 - DNA, 499 bp, Homo sapiens
gggagcaaataagcagctctcttgttaacaactcgtgactcacagatggtcatctgtggtcagacaggggatgagcagtaaagaaaaggggcaaggtcctcgctgtcctgcctgcacctgctcccttgctcctggggcctcccttgccttcagaaccatctcattttaggttctcctgtcctagtttcctgtggctgccataataaatcaccacaaatttagtggcttaaaacaacagaatttttttctgttatataatagttctggaggccagacgtccaaaatctagttgtcagtaggatccttccatgtttggttcagcttctggtggctccgggtgttcctggggttgtaactgcgtcacttaaatctttgctctgtcttcctgtggccttttccctggtaaccctctcatctcctgtctcttataaggacatttgtcattgaatttaggtcccacctaaataatccaggatgatctcataagatcttaaattaa

SEQ ID NO: 154651 - DNA, 237 bp, Homo sapiens
aatcagctatttgtgggacaggacatttcatcttttattaacttggcataaatgacattctgggacaaggtggtgcagctcctggagtggccactgatacaagcacagctgctggggccagagtgggaaacaggtgcctggcgaagatctcgagaaaaaagagagcaagtacagtccacttgaatcacacttgtgctgagaggctcattgtccacagatgccagcatatctggtccc

SEQ ID NO: 154652 - DNA, 339 bp, Homo sapiens
gttgcctaggctggagtgcagtggcacaatcttggctcactgcaacctctgccttctgggttggatcaattctcctgcctcagcctcccgagtagctgggattacaggtgcacaccaccacgcctggctaatttttgtatttttagtagagacggggcttcgccatgttggccaggctggtcttgaacccttgacctcaggggatccacccaacttggcctcccagagagctgggattacagatgtgagccaccgcgccctgctggaagagatttttgtggtctggataagtgatcaaattagtcacaacattcccttaagccaaactctaagccagag

SEQ ID NO: 154653 - DNA, 111 bp, Homo sapiens
tgaacttagagagattctctgggaggtttctggagccattcaagatctggcctctgagctgggaagccagctctctggccagcactttaaaagggctcaaagaagccagag

SEQ ID NO: 154654 - DNA, 383 bp, Homo sapiens
actcaggctgtttgcgttcaagtctcctgttgtgggctggagcgctgaatcagagtccagatttgccttggtgacacatgacaagaggggccattgcatttgaactacataaatattatgcttaagtgtttttcctcattttggagccaaacaggtctcgttaatgataaaatcactgcaatatagtgggccctttttttctggtctggaatttgagacaatgtcaactgtgccaaggggcctggcagcaggaagaaatggccagccatggagatttgcagccatcatgcaagttataccatttaattttataattgtagccattgggagctggactacagtgcacttctcgtggtctgctcttaccccaggctgcgggagtg

SEQ ID NO: 154655 - DNA, 406 bp, Homo sapiens
ttttttttttaagagaggatctcactgggtcactcaggctggagtgcagaggtgcaatctcagttctctgcagcctcaatctcctggtctcccgtgatcctcccaactcagcctcctaagtagctgggactacaggtgtgcaccatcacacccagataatactttattttttgcagagacaaggtctcactatgttgcccaggctggttggtctacaactcccaagctcaagcgatcctcccaccttggcctcccaaagtgttaggattacatacgtcagccaccgcgcctggcctgggcacaacattcttgagccacagatagcaaaggaggatttgttctagttccacttgacgtggaaagtgagggtgttttcgtctgacgccgagggatgttacggaaccag

SEQ ID NO: 154656 - DNA, 331 bp, Homo sapiens
cagtactcacagcaccgctcttgcagtagcaggccctggtgactggttagagagaaatcattttctaaatttgccattggtcctttttggtaaggtgatggttgtttaggagctaatgagattaaggcacaaggtgacttgtggccctttaacaacaaaccaaaacaaaaaaaggagtctccttctgttgcctaggctaaagtgcagtggtgccatctcagctccctgcaatctctgcctcccatgttcaagcaattctcatgtctcagcctcccaagtagctgcgactaccagctcgtaccagtgcatgtcaccacatccagctaatttt

SEQ ID NO: 154657 - DNA, 176 bp, Homo sapiens
tgctgggattacaagtgcgagccactgcactcagccaatctgggagtatttctaaagaaaaaaattactttgatttgtggaggactaaatcataatacatttctatgcaacaatagcttctgagaggctgaggcataagaatcacttgaacccaggagggtgggtcagaacataag

SEQ ID NO: 154658 - DNA, 661 bp, Homo sapiens
agttgatctaaggatccctacgtctcgatcgtaaacagtatacaaagagtatataattttggtttcgagacaggctctcactctgtcacccaggctggagtgcagtggtatgatctcggctcactgcaacctccgcctcccaggttcagacaattctcctgcctcagtctcccgagtagctgggatcacaggcatgcaccaccacacctggctaatttttgtacttttagtagagatggggtttcactatgttggtcatgctggtctggaactcctgacctcatgatccacctgcctcggcctccccaagtgctgggattacaggcgtgagtcaccatgccctgcctggtttaagattaaaagatgacccaaagagagaaaaagagatccctgcattagacagacatgagggaaatttggggccttcaggtgtttccatttactgtacatccttggatagatgagttcctggaaaggaggatgggagtaaaggtggaacaataggagaagggtgaacaggattttttaagtctgatttaaataattgggatatacctataaaatatatgttgtcatttatgtttaaaaagctttctgttcttacgtgagtatagctgaaggattagtggttgaccaatagtgcctggtactgatttgtaat

SEQ ID NO: 154659 - DNA, 182 bp, Homo sapiens
tgccttttgtctacttggatgtagtaatgaggaggaagatggggcattgtggggcgtgtcctctaacttggaacagatgtaatttatttctaggtgaaagttaagaacagtgcttactcattctatttatctgccctccttttatcttcggcactttttcctacagccctgtttctgagctc

SEQ ID NO: 154660 - DNA, 298 bp, Homo sapiens
  misc_feature (123)..(123): n is a, c, g, or t
  misc_feature (126)..(126): n is a, c, g, or t
  misc_feature (131)..(131): n is a, c, g, or t
  misc_feature (140)..(140): n is a, c, g, or t
  misc_feature (267)..(267): n is a, c, g, or t
cttgaccttcttacataattgtcttagctatttctatctctggattttcctgtaaattttacagtcagctggtcatttacacacacacacacacacacacgaaaaacaaagaaaaaaatgctnganctttntctaacttncccttgcagtctgttgtgtgagcagcctgtttatttctctaatattatgtcagtttattctctttaatggactgtaaaaaaatgtaatcacaagagtgccaaatatcttgaaatgccaaaaggcatnttagtttcttttctctgtgctctgagtccac

SEQ ID NO: 154661 - DNA, 337 bp, Homo sapiens
atcctctcttctgctgtttcccttgaactctgtgttccaggcataccagatgcacttgaagtctcaggtctgaggactgggccagatgtcccctctgcccacaatgcctcttccttttctcttctgtgcaacccctgtgcatatgcacacacacgtgttacacacacatacacacacacacagcatatccatttggtgattcccacaaattctttgagactcagctctgaagatgccccctgggaagctcttcctcacactcataatcagatataggcacctattcctctgacaccaccccttcagccctctgatgaagcaaattattttttattgt

SEQ ID NO: 154662 - DNA, 448 bp, Homo sapiens
ccaacgctttaattcacatcctgatctttcccagtgcagtttccacagctctgctatgccgggtgataaaagacccacttcctacaattgggcttccatggcaaacacggccagttgacccatatagtatgatgccaggcacttgggacaggcgggagaaaaagatattttggggattagggtggagcaacttttgaagggtcccatggccctggctcactgcaagaagagtcccaggccgggtgtgatggctcatgcctgtaatcccagaactctgggaggccaaggcaggcggatcacttgaggtcaggagcttgagaccagcctggccaacatggtgaaatcctgtctctactaaaaatacaaaaattagctgggcagggtggtgggtgcctgtagtcccagctactcggtaggctgaggcaggagaattgcttgaatctgggag

SEQ ID NO: 154663 - DNA, 403 bp, Homo sapiens
agtctactgaaatacagtcgagcgtgctctaaatttccaagcctctgctcacattaaccagatacgtctctttcaaacattcaaacaaatactctaggtctcctcagacactgagttccagcatggctgctataaaaagaaagccctcacctccgaggtgttaccactttcatacgctttgtgttcagcaaacaccagagacacaacctcccctggcctgcactgaaccccgagtcccaaaagacaggggatgacaaacaccctctttattttttccagtggacataagaaaaggcagaggtggcaccctggctggaactggccctcacctcaccgactgtggtccggccatagagccacaccttggaaacaggtttccagtctctgtggggcactgacgccg

SEQ ID NO: 154664 - DNA, 349 bp, Homo sapiens
cgtccatcccccttcgtgtttgcatcttggactctgttttacttcacagggcagggatgcaaacacgaaggaaagaggtgtggcacaggcacagttttaatgtgcaaacccttcctaatgcaggatccccattgaacggcctgggacctggctgcctttgatgatgtcatatctcatctcatgaaccaagatggcaggaattctctgcagccaaccttgacaggaaatcatcctggaaatccgctgcttccttaattcatgcaagaaacagggagaaggggtatggtcctctcatgaatgttgtgccattcagttgagacgtgtcacgggttcacctgacagctcaggg

SEQ ID NO: 154665 - DNA, 660 bp, Homo sapiens
tctctttggctgctgtcttaagaatagatagggcaaggacagaaacaggaaaaccagttaagagtctgttgcagtaatcaggcaagagaagatggctcaaaccaggatggctacagtagaagggtgagaagaagtcaggctctagatatattttgaaaatagaaccaacaggatttcctgacagaataaatgaagggtttgaaggagaggattgaaggaggactccagtgctttttgcctaggcaactgggtgttgctatcagttgagacagggaaagtctttatcaggtagagtaggatttggagtaagctcgggagttcagtgtcatatacgatgagtttggcatgtctgttggagatactgagtaggtagtgggatatatgagtgtgcagtttgggagagagaagtggtctaaaatagacatttgggagttagcagcacatgggtggtatttaatgctaggactaaatgaaattgccagagactggcagagagaaaaggcagagactgtagataaagaaggccaaggcccccaggcctgggcacctcaacctgaaagctggagaaaagcaggggaagtagtaaaagaaactaaggagaaacccttgaggttggagaaaactcaagtgtgtgtgccttacaaagcacatgaagaaaat

SEQ ID NO: 154666 - DNA, 351 bp, Homo sapiens
cgggctgacgtgtgtgaatgtgcgttcctttgcgtggctccaaagccgtgctccatcgcaccaatattctgattttttagtccgttctcctgtggatggtcactggcttttccagtattctgccgttacaatgacactgtgagcgccttcatccccttctccacgcacaagagcgtgaggttctctgggaaacatctgtgacttaggtttgaccccaggtaaggcgtaagggggctgtgggcacagcattactgacctctggatatttcgagagaagtaatacagcacatgatgtaatgaaacacatagctgcaaagacgtctctccatggcaaacccacaggactgagtg

SEQ ID NO: 154667 - DNA, 546 bp, Homo sapiens
tacctttccccctctttgaatagaaatagaaaaacatattttattactatttaaatggttatgataattctgtttacttacggtttttaccccattatagaaaaaatctgtttcagaaaatcccactttaatctgagaacatgtgtaagcaaggaaaagaaatgaaaagagacccaaaacagtagtgtctggggaatgtggtagagaaagcagtgggtaaagtccttcacacgtgctcctgtgcagagcaaaccccactggggtggtgagcccagttccagtgctcacatccattcttggtggaggccagaggtactgggacatggggagtctaacccggatcttgaagtccttctttcttattctcaaatatcaagatatgtagaccagactgaagcaggaggatagctggagcccaggaattccaggctacagtgagctccaacctaggtgacagagtgagactccatctcgtaaaagaaaaaaaatagatagatcaatggaacagaatggacaactcagaagtagccccccacacaggtaagg

SEQ ID NO: 154668 - DNA, 490 bp, Homo sapiens
tccactggacaggctgaggaggacttcagaacaagtagataaaagaccgaaaaaatgacaaaaaaggaaaatacagtaagattacaggggacgatcattttctaatttacacattactgtaaatttgatttcttttcaaagaaaaaacaaaataagaatgtaaaatatctaaagaattcagataaattcagtaatgaattaaaggaaaaagattagattctagtataaaattctctagaattcttacattcaagtaagtaataatttttaattttagaactttcaggggtattttcccttgggatttttcttttagtgcactgctttgccatttctttaaggaatatcacataccatgtcctgatccaaaaaggaaaaattataggtattcagattaggtacaagaagagagattgaataaagaaacatgaattataaattgtatggaacagcaaacatataatcatggtataagagatggaggtcagat

SEQ ID NO: 154669 - DNA, 471 bp, Homo sapiens
agatcaaacagtcacagtgaaatctctcagaagaactcataaagaacaatacaagagtggagaaagcactccaataacaccgcaatctcagagtagattttaaaacaagatggttaagatggtacattttcaatttaatgtgtatttcaccacaattagtaaagtaagcctaagtctatgtgatctgcatgccctcctaaagtcatcacctgaaatgctgttccctgagacattttacaggttctctcctgttcaggcctttgctaaataccacctaaatgtccttgaccagcttaaaaaaacaagcaccagcctggacaacatggtgaaaacccatctccactaataatagaaaattagccaggcttggtggcccatgcctgtgattccagctacttaggaggctaagacaggagaatcgcttgaactctggaggcggagtttgcagtgagccaagattgcgacaactac

SEQ ID NO: 154670 - DNA, 327 bp, Homo sapiens
acgctctctctgtggggaccttggtgggaattacagagccaccatcatcagttccaaccactatttcatattctgtttagtttcacctgtgttgctgtatgtacctgtagttaattttttttccattattggtatagtattttggtgtgtgaataccaccatctatccattctactgcttttttttttcttgagatagggtcttgctctgttgcccaggctggagtgcagtggcatgatcacagcagcctcgacctcctgggctcaagtaattctcctgcctcagcctccccagtagctgagactacagatgcactccaccaggact

SEQ ID NO: 154671 - DNA, 332 bp, Homo sapiens
tgtgcatgtgcatgtgtgtgtgcataacacgtggagctgcctggtattgggccccggatgctccagagttcaagatgtgcttgtgatccctgtggcatatctctggagggggcatctatctgtcacggtaaggacgctgaagcctcccatttccgtgggtgggagctaacagaacacacctcacccgtgccaaggaagttgagctggctctgcgtagaggaacaggggagtgataatggggagtgcacagctggagtcaggtgggacccaagagaaaagctcagggctacatagtgggaataagttggcttgtgcaggcatttaggagctcc

SEQ ID NO: 154672 - DNA, 549 bp, Homo sapiens
gcatccgggaagtagttgagaggggggagaggggaacatggactgagaggaggatccacctggagctgaggaaccggacccggcagctgttcgagaacttgtctgtggacaattgcaaataaaattagaaacattaaaaggttaacattagagcacagaaagcctgttacctagtttttaaataacaatagacaacttagaaaagagaatgatcatggctaaaaataaaatatgggttctttacagtcaaccagaagaagtatatcacaatttaaagacaaatagaaataaactgacattaatagtgaaaaaataagagacttagagaacagatctaagatacctattaagcaatgataagtaccagaatgagaaaaaagaagagatggaagatttgtaataattaaaacaatcataatagaaaattttccagagctaaagaagttattaatattaattggttatttaaaacgttacccaagtgcaaaaaagaattaaataagtggtgggtcacaactgaaatcccagcactttaggaggctgaggtga

SEQ ID NO: 154673 - DNA, 499 bp, Homo sapiens
gcgtccatcccccttcgggtgtccatcccccttcgtgtgtccatcccccttcgtgtgtccatcccccttcgtgtgtccatcccccttcgtgtgtccatcccccttcatcttatttcttaaaacaacaagaacaacaaaaatctccataaacgtggaaaatataaatgaaagacaaatttacaatctaatgacctcaacaaataattactttaatatgttagatagtagtccattatttcttatgcgcatactaatgctgggttctaaacattttaattattcttctttcgaagaagtggaggttcagagaaatccggacaaattttcctcatttttttatgtcactcctcatctcttgttttaatcacaggtttaggaggtataaaatttagtccttaaatgcagaaaagcaaaatacctacttctctttacttttctctgactccatacattggtttctgtttcaaattccattcttgccaagcctccccccgtttcc

SEQ ID NO: 154674 - DNA, 268 bp, Homo sapiens
  misc_feature (239)..(239): n is a, c, g, or t
tgcctcagttttctcatctgtaaaataggcatcctgatggtacctacctcatgacttgttgcaagggtaaactgagataacatatgtagagtgcttagtacagtgactgacacatagtgctttgtggtggcaattattattgtataggtaataacagaaagtttatgctccagactttgacagaggttacctttgagaagtagaattggtttggggggcagggactgctgtcgacgcgnccgcgaatttagtagtagtaggcggccgc

SEQ ID NO: 154675 - DNA, 472 bp, Homo sapiens
ttctatgttttggggaagctatattcaaagtacttagtaaattaaaaaatggattactatcaaatactacagttgaaatatatttaaaagacacgtgttgagtaaaccaaaaaagcacagaaacaatgaattaaagctatgattgtattcacactgcaagtatctgtatggaaagggatgagaatatttaacatgtggatttatatttatttgttttataccttcagccaacagaagaatgtaaataaaaacactttttaaacctcaaatatacttactaacccatgcatacattaatcattcataccgcatgattattgttcagtattttctgcaataacaaattggagggtgtgggggttattgtgggtttcagcaaaccacattctatttaggcaaagccaagtattaaagaaaggcctaacttgccaaaccaagataaatacatgccattattatgattacataaaag

SEQ ID NO: 154676 - DNA, 164 bp, Homo sapiens
tgcacccctccctatcctcagaactcaatttccctccatcatgcggaggtgaccctctcaggtcacccacctagggcactgttcccagtccctcaaatccaacttccacctctccccctggggagcacacagagcccgcctcggtttggcataccctctttgat

SEQ ID NO: 154677 - DNA, 424 bp, Homo sapiens
tttttttttttcaattttatccattcctttttattattgttctttattacttccttccttcaactttatttgggtttactctgctactcttttcctaacattgtgaggtggagatgtttaactcatcaactttggtcctgtcttattttttcttttccttgctctgccaccaggctggagtgcagtggtgccatcagagctcactgcagcttcaaactccttggctcaagtgatcctcccacctcagcctcctgagtagctgggacttcaggtgtgtgctatcatgcctggttaatttttttatctttttgtagagacagggtcccactgtgttgctcaggcttgtctccaactcctggcctcaagcaatcatcccacgtcgacgcggccgcgaatttagtagtagtaggcggccgctctagag

SEQ ID NO: 154678 - DNA, 707 bp, Homo sapiens
ctaagtagcctagaattccacgatcatgaagttgtgagtatatcttattgttgcattgtattttcctaggtgtccttactctcttctgtcacttattaacacaaggacattaatacatctacattttcctatttctgatatcatggtttccatgatgtcatcacttctataaccttaagtgatagggtgaccttcagtatgctgattcctggtgtttgcacaaacacatggatgtaaagaagtaaaaaatgtaaaattcacgaaattcagtaaaccacacaaatcagttaagcattctatgccttagcttgttatgagaaacataatgatttttatttttcaatttaaataagcccttctacatacccagcattactgatctcagacaatgaattgctaaaaatgacaatagagcattacactcagaatagtttgctatatttccacatacctcatctagatgtcatggcctacatttctgccatcactcaaccaacattttttgtgtgctcttgatgataaatagacagtcctcaaataataaaagaaactaataatttcttacatagagaaaatgtcaataagatattcaaggtaaccagattattttgagataagtaaccattagaaatatgtggttttaattgctgattttataaaattttagttgatggtacacttaataaagaagatttaaatgtctattc

SEQ ID NO: 154679 - DNA, 647 bp, Homo sapiens
ccagatgacttgctccagatctctgagccaaaaggagaaggagtgtcgggttcaacctcataacatcttggtatccctagcccagttctctaatgtcatattgtctgcttgggaagctcatatgcaataattacattaggattttatcctagacccttgcctcaagcaacatttaagttaatattttgctggagtgatagttaatcatctccccctttttcttccactgggtatcaattcaaaggaaaatggggaccattgaggaggaagactggtaggaaagcgctctatttattgaaatcagtttttacatcctccggtttggagagtttagtatttgatactattttcaaggctgtgatgttactagtgaattttaaagttgaccatcaagttggtgatggatctgttctggggactccagtcatgcttcctggacctctagatgtgtcaacaaagtggaaaacttagattgctctggctgtctttcattacctcttggtaaagcaaactgtatatgatacttggtaagatacctccccaccaccgccaccatcaaatacattaaaactcttgcaactcaggtggtgacaatacgaaaaaaatatacaagggtgttctgagaaggaagagttgagaaccgttga

SEQ ID NO: 154680 - DNA, 470 bp, Homo sapiens
tgaggaccctgacttctgactcaactgctctaatcctctattacccatcatgccctcaggagctaccaagcaactcgtgcagttgaatgccccagaaccattcttcacagggtatccgtggaaatcatcaccctttcaccttcagattctggctcaaagaaattgtgggcgatgagtcacctaactctgtgactcatatctggtctcaataaaggtgttttatgagttgaaaaaaagaggcatccatatagataagacaagaaggcaaactaattaatgaaaataatcctgcaaaggtggtgagattagagatctctgtgtttggtttgaaattttatttaatgcataaatgactatagaataaaaaatggataaattcctgtaaaataaaaattcatcattacaactttattcttcctctgagccaagaccagagctagaatttttttgagacaaagttcaaaatttta

SEQ ID NO: 154681 - DNA, 784 bp, Homo sapiens
  misc_feature (2)..(2): n is a, c, g, or t
  misc_feature (4)..(4): n is a, c, g, or t
  misc_feature (6)..(6): n is a, c, g, or t
  misc_feature (8)..(8): n is a, c, g, or t
gncncnangtaagatgtcccttattcgtctgtcatcttccgccatgattgtgaggcctccctagccatgtggaactgcaagaattctatcactgaactaccaatgcctttggaagtatccaatattttggttgttttgctacctatgggatcatgcatatcagtacttggaaataaatgatgaaagcagcagctcagccacctgtcctcaatgatgggagggcattcacctctacaggaaagaagacagatggtcaacctgatctatgctgcttgtaagcatggtaatggcacacttcctgtcaaacaagttggtgacattgactaggcatggcttctgggaaaatgtcatgtaagctttgttaccatctgagcaaaatggagatgttccttgactgaaatatttagcatgtgtgtgtgtgtgtgtgtttaatttatgtggccacagttattacatggaagacacatattttaattttggccataaaatatactcaacatcataaggaagcacctggagagctgtgttccttttcctgaggcttccctgttccttgtgataacttacatacttggaattatagagacttaattttggttaaaatctctaatttgtgtgaaaaaaaaaaaaaaaaaaaaattcggaggcttttatggggggggggggggaaaggggggtttgcaaggggcttggtctatagttgtttcctgaacccagtttttttgtcaaagggggaaatttgggggcccctatgggagcggatattgaaaagcggttacgtaag

SEQ ID NO: 154682 - DNA, 595 bp, Homo sapiens
tgttctgaagttttacagatggttactgtattggatataataattttgcctagatttttaactgagggggtttgagaaccaagggacaaaatgtaatgtgttttcaaacttcagcttcccttctgctgtaactttcacaaagtatctcctgaaaactcctgtctttgtacaaaattcatcaaagagacagtggagactggggaatttttgaggttgtattcggattggtgtcttcaagggtccctttcagttcgcagtccaaggtgccagggactaccccgtcctccctccctcttctggctttgctctcctgagtccttttgccttctcttcccccttcttggattatcttttcattctcgatgaggttcccacacactgcggtgtgtgtctctgaaaacccactggagacctagcacaactctccgtacatcccgtggtgagaacagaatgaaagatatattgtttaaaaagcaataattaaaatctagtcttcagttccttcttcctcgtcatattttttctccgtaagcctagagattttattttcactagtgtgttcccttgtctccaaagagcgtgtgtgtgatattat

SEQ ID NO: 154683 - DNA, 194 bp, Homo sapiens
tgctgggattacaggcatgagccaccacacctggccatccagggattctttaggtatattattaactgtccaaaaagtagggagaggtaattatggctgttccctaatttatcaacaagttggattccaaatgttcattactgtgccaatgtggaagtaatggttgggttcccagtatggtttgcacttgtagc

SEQ ID NO: 154684 - DNA, 374 bp, Homo sapiens
tgggccagagagggagatggggcagaatggactaaagaaggaaggaaaggaggatccctagaagcagggaatgcaggtggctctttccataagtttgtgggaaagaataaagaatgggaagatagtaaccacaggtaggagtggcaactttctggaggaagaattgtgcccacttttgcaggctgagaggactgacccagtggagagaatttaaggatacaggagagggaggaagaactcaaggcagcctgtcctagaggccgcgggaggggacagacccttcacagagcggaatggcctactgtgcacaagatggataccaggcaggagcaaaataaggacaagcaggagcacagacaggactggcaaccaca

SEQ ID NO: 154685 - DNA, 124 bp, Homo sapiens
actccacttcctctccctgcgctcagtgatacctcattctctcctcagtgcctagtgtcccccagttcagtgcctctctggttctttttctctataaaataaacctaaagtgtgtgtgtgtgtt

SEQ ID NO: 154686 - DNA, 276 bp, Homo sapiens
tcaagctgactttctgtctacttctctatcggaaatggagcttccctaaagactacctcaatgtcggttacccacaggccatttttccatcttgtgctcctaaacttctatgatattaaatgatattaccctttctggaaattgtccttaactttgattttataattttactctaactttgtttcattccttcttttatagcctttcttttctctatccctttactgcagacatgttgtacggctttgttcttgaccttctgatctctctacgttc

SEQ ID NO: 154687 - DNA, 261 bp, Homo sapiens
caataacatatgtaaagaagagtgaataatgaggtatggattagaatggcacccagagggaaatgagactggaatcagagccgttccgaggaaataatgaaaatatgagaactttccctagggtgagataagtctgtgggaaaggtgtatgaggtgacaaaatcattcccagggtgaaagaaaaaaataagtttgagcagccacgagtaataaggcaaaaatattgagagggaaaaattgtagggcaagatgtttaggaga

SEQ ID NO: 154688 - DNA, 480 bp, Homo sapiens
tacttctactgctcctaagagctaagcaataactatgagttaaaggcaagtgagatctcactgcataatccacctaggtagagggagcaagagccaagccctaaatattcggcccagagtccttgccaactcgagtaaggataagacatacaccaatctctcctctattgcctacaaaataagttttcagaaaacttattttccccaaataaagtgctaagcagaacctcaaacacacatacatgaaggagagagtgagggaggaggctgctgtgtgggtagcacgagtgggagggcacagttccactctcccgagcctctccccactgctccaggccacgcagaacctccaaagcaccctagtggcctgcccctgtgtcatttcattgcttctcagaagatttgaaaatccaaaaataagcaaaattaatatatggttgaaattcatggctcaagtgagtgagtgtttaaaaccatttc

SEQ ID NO: 154689 - DNA, 118 bp, Homo sapiens
tttacatctttattaagcaatgatcttgttacgctatagctgctatagctgttttattaagcggacagatataggtaacctgttgagcacttattttatttgctatgatgagcactta

SEQ ID NO: 154690 - DNA, 303 bp, Homo sapiens
attagtctattacctgagaaaagctgacctaataaatatcacagccctcaaccaaaagaacaatgttatttgaaaactaaatcttgtagaagattcaataaattcctggaccttgaaacaaattttatcttcttagcctttttcaaagccaaaaaccagtgtctcacaatagacatgtgcattgtttattccaccctgtgaggaaactgaagttgtattcctcagggtatgtaagcattaatgaccctaaaattttactccagaattgggtggtttcacactggagcatacatgaatgttgtg

SEQ ID NO: 154691 - DNA, 562 bp, Homo sapiens
gactagtttaagcagaaaggaaatttattaaacaatattagaccacccacaggatctctggcgacccataaagcgaggccctgaagaggccagaaacaaggtgcagccatactgtgggtgcttcgctggcaaaaactccactgccactaccctaaagaagacatcaactctccacgatccttgctttccacatggaatttccaagcttcttgtatctctcttcaaacagaccccagaaacccctgccagagagaatgctgagctggatagattccagctgtttgatgtggtccctctgttgcttgttggtttctgctgtccagaatgctgatatgtcctatgttggatcccggacaacacagaaaagttttccatctattttgagtttctttcctactcaactcttcagtagaacataaaccttttaagggcagaggccagttcatcacttttaagtaatcaaatatatttattaataacctattatattcattaacaaatatttattggaagcctactctaaatttggcatagtgctaggcgctgaagatatcattatgaa

SEQ ID NO: 154692 - DNA, 333 bp, Homo sapiens
ttggttttgggaatgaggtcagtgctggtggttaaagcagcggcagtgggtcacagcaggcccactggtacagtgaacttgtcagtgactttcagaatgttgctttagtgcttcttaaacatttcctctcttgagctaggattgttacagaacccggggtgggtacaagcctgaaataggtatcaagtggtcctggctaagagaggaggaatgggagcaggaagcgaggcctgcccagttaacactggtgcccacagaggcgggcaggcagcgaatgtagacggaatggaaatgaaattccaatgacctacgctgtgtcagcttctctctcct

SEQ ID NO: 154693 - DNA, 613 bp, Homo sapiens
aggaaaacatatcagtgtctgttttagtagatctgtagcagaggacagttgtcttgatatattgtagactgtaccctatgtatcagctgccatcctgattcaacaagggggaaggaagttgtctaatacttgttaagcgtggaaggacatttgtgacaaatgtaaaacatcactgtagaacttcacattaatctgtatttcagaaagcaagtgcaaagaaaaaggagtcaaacaatgtctaagtagcatggagttgtgctcttagttgtgaaagcagcagtctcttgttcagtggttattgtaattctcagacctatgctttcttcatgtatgttgtttaaagattacttattcttttcatctaaaaacagtattttaaaaaaccaactgggtacaggtgcttatgcctatagtcccagcactttgggaggccgaggtgggaggattgcttgagcccaggagtttgagaccagcttgggcaacatggggagaccttgtctctacaaaaaataaaaaaatgagctggacatggtggcaaatgctcgtggtcccagctactagggagactaaagtgggaggatcgcttgagtctgggaggtcaaggttgcagtga

SEQ ID NO: 154694 - DNA, 223 bp, Homo sapiens
gccagggatgctgctgaacaccctacaatgcacaggatggcctccacattagcaaaggatcatctgctccgaatgcacatattgtggaagcagaagaaccctgctgtgagttctcgataccccagccaccagactcagactcttcccatcacacctctctctgcttcttcacattaatataacgctcatactccacccctagaatctgggcttggccatatga

SEQ ID NO: 154695 - DNA, 464 bp, Homo sapiens
actagcatttagggaggccaaggtgggaggatcatttgaggccaggagttcaagaccaggtagagcaacatcccaaaatcctcatctctacaaaaaatttaaaaaactagccaggcatggtggtgcatgcctgtgatctcagctactctggaggctgagaattgacaaggagaataaatgataatatttacaggtagcttcagatccctgtatttacattgaggtttcagatttggagtaggatactggagtcattttgataacctggtactctagtgttatctatgtctcttcactgaatggagatatgattccaggacctcttagcatgcgttgaggcatataatactcaccggtgtacagtaatgggcttcaatgctgggattactttttagggttcagctaaatgtatacatttcccacccctgtcctttcataagaagtgtcctgacaactgcagctcc

SEQ ID NO: 154696 - DNA, 229 bp, Homo sapiens
tctgctgaaacatttcctttcctgactttcacaagttagagcaagaaaacgtgctttgattttggtttttgctactgtttcctctctggggagggtttgcaagctctctttctgtgttctggtctgaccagtggttactcttacatttttgacaagtattgaacctttatttttctatcagtaacaaaactgaagcgtgctcacaaccctcctttcatgcgtaagttaa

SEQ ID NO: 154697 - DNA, 368 bp, Homo sapiens
gtctagaggatcccggtgtgtcccttggtctgggcatttgaaagacctggtgaagtgaattaattcagagaaggtttcaaaatgttagggatcatgccaggaaaggagaattagaagagggcaacacagaaagagaagacagcaaagagtttgagagcacaagagaggaaaaagttacaacacaaaacacagctccttttaccaccttaaagaattcctggcttctacaccgaaggcataaaccaaggctgagctaaaatttacctcttcattttctaaatatttggtaaggtgtccagagccctctaattccctatggaaatactctttaccaaaaagaaaataaaagacagagagaaagtgaaact

SEQ ID NO: 154698 - DNA, 339 bp, Homo sapiens
caaaaccctgtctgtacaaaaaatacaaaaattagctgggcatggtggtgtgcgcctatggttccagctttttggtaggctgaggcacgagaattgcttgaacccaggagctggaggttgcagtgagctgagatcgtacccctccattccagcttgggcggcagagcaagaccctgtgtcaaaaaaaagtaaaaataaaaataaagttagggagagagattgtaacacttaagttaacagatagtacagattgcacttcattttcatctccaggtctttagggaggaagggcagctgggaaggattgaggaagggagaagcgaaggtgagtggcaggag

SEQ ID NO: 154699 - DNA, 255 bp, Homo sapiens
gctggccaagtgcaccacgtgaacaaaacaatctcgacactcaacctcttccccttccccatccacagcagctccagaaaaacagcagcagcccctgccccttaccgagcacttccggtgctaagcccacttgctctaattcattcagaccttacctttgtgggtaggcactgtcactgtccctgcttttcaggggatagatgatggagagtttccgcaggtgacactgccagtgagcagcagagctgcccgggt

SEQ ID NO: 154700 - DNA, 296 bp, Homo sapiens
gagaagaaatagaggtggcagttggtaaacccaagtgctggcccttgtgtaagttctgctccactcatctagacagtttcaaaatgccattaaatattgaccccacttgggccagccccggggtttagggtatatgttgatgagccttgcaggttactggtgtgctgctctacccagcagaggacaaggtgcagtgggaagaaggagccttcagtggtaaccggaatcttctgaggcgccagggaggatgttctagaggacaccttgaacagaggcagagaggcaggaaaggccca

SEQ ID NO: 154701 - DNA, 201 bp, Homo sapiens
ccggaacatcgtgagatgtgatgggaacagactcagatagagcaaacaaaaaaaccaagaaggtaaggaggatagtccatgcttccaaaaaaatacagagaacagtatactgtcaaaaggctgtaagagtcagaacagcttttcccctggaattatctcagagattgaatggaatgctgattttctctccagtaaagaatc

SEQ ID NO: 154702 - DNA, 414 bp, Homo sapiens
caatcctgcctcgagcactagctggctgtgacctctctgtacttcagtttccttatcagtaaaagtacctgtctctcagagctgttgtgatggtgaagtgagttaacctatgtagagggcacaggacgcagcctgggctataataagtactgtatatctaactgtatagtctggcactgagtaggcttaataaatgtctgcgaaggaatagcagcattccatcattcacctgtaataatctctttgtggtatcatcactactagatcaaaaaggtagggataaatttctggaggaaaaaacgttgtagatagttggaatgattgaccaaggagggagtgaaatattttgggggaggttcttatgaacatattgactctcctcagtcaggattcccatgtatagtcctgcatatt

SEQ ID NO: 154703 - DNA, 438 bp, Homo sapiens
cttgcagtcgttctacaggatcccccagtcggactcggcaggagaaggagataagagacacatttgaagcagagaatgacaacactaacaaaggcatagaagtagaggagggtatcataaccaaggtgacaccagagtgagctagtgttgaagaatgggtcaacttcctttagagttggtctgttttgtcaacatttctgttaaaatatggggccccaattgaagatactaatcaaagtgtgatccatctaatcaacacagagcacaaaaggactattaactcctaggacctatggaaactactctcaatgtggcataaggttgctttaccttttctttttttgcatgccgagtccgctgcattctgggcagcccggcgacgctggccccacgcacacgggccaccctggtgctggtgatcgatacggcagggagggg

SEQ ID NO: 154704 - DNA, 579 bp, Homo sapiens
ttggaactgtatcctgaagaatgattaggagttagagtagggaaataaggaggctgggaagataacaggtagggcaggagaaggagataagagacacatttgaagcagagaatgacaacactaacaaaggcatagaagtagaggagggtatcataaccaaggtgacaccagagtgagctagtgttgaagaatgggtcaacttcctttagagttggtctgttttgtcaacatttctgttaaaatatggggccccaattgaagatactaatcaaagtgtgatccatctaatcaacacagagcacaaaaggactattaactcctaggacctatggaaactactctcaatgtggcataaggttgctttaccttttctttttttgcatgtcaaaacattgtcttctcattttaaggacagcatattctgattatttttatttaatttatgatattagcagacagtttatgaatcaaaactgaaattcatgagactgatatatgtttccttatatagttgaatttagctactcatttcaacaaacacaaatttatacctaaaactataggtctcaatgatacttg

SEQ ID NO: 154705 - DNA, 279 bp, Homo sapiens
gagcctgaaaggcggagccggctgcggtgagccaagatcgtaccattgaactgtagccttggggacagagtaagactccatcataaacaaacaaacaaacaaaagtcaataagaagggagtcaaagcatgtctacacaaaaaagcaaataaacacaaaagtagtaaatgagaaatgaagaacaaaaaaacctacaataaatacagataatatgtaacagaatcacaagggtaaggtcttctccatcagtaatacttcaactgtaagtatttaatctgca

SEQ ID NO: 154706 - DNA, 506 bp, Homo sapiens
actgctgaaatgtagattgagagagccagaaattagatctcaataggctgaactaatgatgaaaatttaacaatataaaattcaacaagaacaaagttctattctgaagttaacaaaaggattctgcaaagcaatcacctcaaacctctcttgttagaagactgggtgtgaattacaaataaattatagaaatacaggataggtgagatgtggcttaacagttatttatttgctcaacatgtatttattgaatgtctactatgtgccaagacttgtttgttctaggtgttggggattcagaacaagccaacaaccctgccctcctatagcttacattctagcaatatctagagacagacaataagcaaacgaacatacaatgggatgtctcatagtgaaaactgctgagaccaatggcagttaaccatggttcacaagagaaaaccgtggtttaagttggctctaaactcatgaatcaactgtgtgattcaattttgaaaaaagcc

SEQ ID NO: 154707 - DNA, 295 bp, Homo sapiens
tggaaaggcagcccagggctgtggaatcggacctggagggaaaggaggagcagggagacacacaggagagcctggggacacagatctgtggcaggaggtgaagaggaagagctggcgcagaagcacccgagaggcccacagcccatgaagtgttttcaggagagttaagacccaccatggagtgggcgccacagttaagcctggaggttttgcagccaggaggggttctgtctgggtttcttgcctcccaccccagcctccaaagtgggttgacaccagctctgagctgtcagct

SEQ ID NO: 154708 - DNA, 345 bp, Homo sapiens
gaccatgaagggtggatgagtgtcagcattcactgtgttcacaggtgacttatgggctgaaggtggatagtggggcctgtcagcttttggcagcttggaaagttagggcataattgggttgtagagttgcagaaaaaccagggtaccctgagaatcaacgtgtctagtttcttctgtcatagccactattggctaggatagttatgatgtcacataaacataatttcctccatctctgagacctagtaggttattagttgccgagtgtttagatgtgtgaagtgtttcttgctgtggtagtttgttacataagagcattctgtgtacagggaataaaaagaaaat

SEQ ID NO: 154709 - DNA, 475 bp, Homo sapiens
agttaaatttagttgttatcagcatatagacgctatttaaagccgtaagcccagatgagatcacctagggaacaagtgtaggtagaaaagagatgcaaagactgttgcttgggacactctaacattatgacattggagccatgagggggagccatatgaagcctgattgattttcactggcagagtgtgctgtcctgtagcccaatggaggcaagccgttcaaagaggagcacaagccattagctctatcaaatgtccttaaagggtcaagtaagataaaaactgaccactagattcagtaacatgcaggccacttctgacctagacaagataaggagtttgatgagttaaaagcctgattagaggagaaattggaggagagaaattgtagactgcacatatagactgctgctcttgaggaattttattctaacggggaagagatcaatggagcagtaggtagagggaggaaagg

SEQ ID NO: 154710 - DNA, 286 bp, Homo sapiens
agacataactgggaaggggatgagaatggggaaaaacacgctgaatcaggctcttcagaatcgcaaatatttaaacatacagcctcagagatatcaaactttgtcttggcttcagggttcagagactttttaaaatgggcccattaaatgtaagcacaagcatgcacattcttgaacattttacataattttccaatctctttagtttcatcgaatacacctgccaccatgaataaatgcatcatctggaggcatagcagcagggccctgctccctgggaaagcag

SEQ ID NO: 154711 - DNA, 507 bp, Homo sapiens
cggtataatccacgaaagaaaaaatagataaactggacttcaatgaaattaaaatttctgttctgcataagacaatgtctagataacaagaaaacaaggcacagactgggaaggcatatttggaaaagacacatatgatagaggacagttatctaaaatatatcatgcacccttaaagttcaacaataatcaaacaatctgactgacaaatgggctgaagaccttaagagacactttacttaaagaagattatacagatgggaaataagcaatgacaagatggtccacatcatatgtcatcagaaaaatgtaaattaaaaccatgagatactacagtgcatctgttaaaatggcccaaatctggaaaactgacaacatcaaatgctcatgaagctgtggaggaaaaagggctcttattcattgttgctgaaagcaaaatgttacagctactttgaaagacagttgggtagtttcttacaaaactaaacatactcattatatgacata

SEQ ID NO: 154712 - DNA, 124 bp, Homo sapiens
tttccttccattaattcatatgcctgccgttctgccaatcatgacactgtcatgattcctctatctatatagtgagccttaatatcagatagaatggtttcttttactttaatcttttttcaca

SEQ ID NO: 154713 - DNA, 836 bp, Homo sapiens
gcatcagaactttacaagaatttgaaaaagagtttaccgaccaccaagaaactcaggctgaattgcagaaaaaagaggcaaagattaatgagcttcaagcagagctacaagcttttaagtctcagtttggtgccttgccagctgattgtaatattcctttgcctccctctaaagaaggtggaactggccactcagcacttcctcctccgcctccactgccttctggtggagggatgccgctccactcctcccccacactcctccacttccaggaatgcggatgccattcagtggtcctgtgcctccaccactcccctgggattcctgtggaggacaaaattctcctcctctaccaatcctgccattgggttgaaaccaacagaaagaattaaacctgaaatcagcatgagacgattgaatggttaaagatcagacctcatgaaatgactgaaaactgtttctggatcaaagtaaaatgacactaaggttgaaaacggggattgcttgtaacttgagatacatttgtgcaacaaaagagagaggagacagaggcagatatgagagaagaaatcgattacgaacacaactcaacgacttaagtttagattctaaattgcccagaactttcaatttactgaggttttgggtgctatgaggatcgatgtgattggcgttgtgaaaaggtggggagttagatccgcactataagcttctgtcagagcatatggtcagagaggatagtttggacgacgtgggtgtgggacactgaggggatcgggacggaggaatgaaaggggataaaaggcgttgatgatgggtgaaatggagaaatattt

SEQ ID NO: 154714 - DNA, 417 bp, Homo sapiens
tggttccgagagagggactgaggagaccctgaatgtcccctaaactaacccccttttgctgttcaacagggctgcaagtccaagtgacagcctgctgtgtccattctagggagctgcacttcttggaagaattagcttcaaggggctggatgtcagactgggtattattctgccctgagaagaatggaaggtgttttctaagaaattctctggggagtggggaggtgtctttaggttttgagcctccgactagtcaacacggtgatttctgttgcatacctgcagctgaaagaggacagcctcaacccccagcaccccctcttactctttcagaccccaggaagcctcccagagatccccaagtgacctccccagacctctcctgtttgtgtccacctccccactgtgtacccttgt

SEQ ID NO: 154715 - DNA, 203 bp, Homo sapiens
  misc_feature (1)..(1): n is a, c, g, or t
  misc_feature (20)..(20): n is a, c, g, or t
nccacggagagttgccgagnagtgtagcaatgaagtgatgtttgaggccatgcagagtcatcttgggaaccatcgggaagccaagaaaatgccagcctagggccttgctgtcactaagctgctgagccaactctggaatcttcttctcccagacttattattatgggaaataattaaatgggctttgttttgcttggctttgc

SEQ ID NO: 154716 - DNA, 383 bp, Homo sapiens
atgtgtctaagcagaatatagcaatccagttcctctttacagtggcagatagaggagtgaccatgagataccaccatggccaaggaataggatgaggatgtcaaacagcagaggcggagtttttaggaacgttcttcctctctgacaaatgatcaaaacaacaaaaattgttgttgctcacttgcctctttctcgctgacaggatgtgagtgaagtgatgtttgaggccatgcagagtcatcttgggaaccatcgggaagccaagaaaatgccagcctagggccttgctgtcactaagctgctgagccaactctggaatcttcttctcccagacttattattatgggaaataattaaatgggctttgttttgcttggctttgc

SEQ ID NO: 154717 - DNA, 281 bp, Homo sapiens
  misc_feature (1)..(1): n is a, c, g, or t
nctttgagtcacgctctgttgcccttgctggagtgcactggcgtgatcttggctcacggcaacctccacctcccgggttcaagcgattctcgtgcctcggcctcccaatgaagtgatgtttgaggccatgcagagtcatcttgggaaccatcgggaagccaagaaaatgccagcctagggccttgctgtcactaagctgctgagccaactctggaatcttcttctcccagacttattattatgggaaataattaaatgggctttgttttgcttggctttgc

SEQ ID NO: 154718 - DNA, 236 bp, Homo sapiens
cgtcgtcctcaccccccgctatccggcccccccccccccctccccccttccgcagaccaggaatgaagtgatgtttgaggccatgcagagtcatcttgggaaccatcgggaagccaagaaaatgccagcctagggccttgctgtcactaagctgctgagccaactctggaatcttcttctcccagacttattattatgggaaataattaaatgggctttgttttgcttggctttgc

SEQ ID NO: 154719 - DNA, 572 bp, Homo sapiens
gaggttgaggctgcagtgagccatgatcatgccagtacttcagcccgggcaatagagcaagaccttatctctaaaaaaataataaaaagacctcacatttagacaatgtggtagtgtgctggttcagaaggagcccagctatgcatggctaagggcaaatccctgaatggagaaggaaattgaaaaatgttgactaacctgagaaacagtctttggaaaagggtgatctcaggttctcatgcaggacaatttaggaaaaagagagcaagccaggagaaggctgagaacttattccccattagtcaaaaatctgctttaagtcaagatcctgcaatggcctttcacaacaagcccctgaaaatcagcagaacaaagactgggcctggtgagtgagtgcctacgcagagttcttgctgccgtgattcagtgcaagttagaaacctgtgctcttctttagcctggggaaaaaccaaagtcagcaaacccagctcaactcagcaaactttcgtcgcctgtatgctaactataaggcatgttgctaggtactgtggaaattgtaaagacacataaga

SEQ ID NO: 154720 - DNA, 272 bp, Homo sapiens
cgtggtggcagacacctgtagttctagctactcaggaagctaaactgggaggattgctttagcccaggagttctaagctgcagtgagctatgatcacaccactgcacgcctgcctgggctacagagcaagcaaatgtctcttaaaaaatttttttttctaaagaaaaaatattggcattttgttggtaactgctgaagttgaatgatgggtatatgggagttcaaatatattctactattctcggtaatcatcaatgtttagatatttctgt

SEQ ID NO: 154721 - DNA, 1039 bp, Homo sapiens
ctgtttccgtctctatagttctgccttttccataatattgtataagtggagtccttgtgtgtgtgtgtgtgtgtgtgtgtgttttgtacgtgtatgtatatctccttttgagtcggagtgctttcatttaatgtgatgtatctgagattcatccatatggttctatgaaaaacaaatggaaaataaggtgatgaaaagatgctcaacatctttaattatcaggaaaatgtaaatcaaaccacaatgagatactactatagaatggcttttagaatggctaaaaatgaaaacgtgccataaattggcaagaatacagaccaatggaaattttcatgcattgcttgtaggattgtaaaacggtctgtccactatgcacaaaagtttggcagcttcttatactattaaccatacatttatcatatgactcagcaactccacacttaggtatttaccctagatgaaagaaaaattctgtttacatgaaaacctatactcagatgttcacagcaattgtataattgcccaaattaggaagtaacacaaatgtacatcagtggatgagtgattaaacaaattgtgtacaccaatactatggagggctgctcagacataaagaaatgatttattgacacttactacaacatggatgaatctcaaaagtgctgttgtattttaggtaaaccatgtgataacttgaattacatttgataaaagatttataagtgtaaaaactagatttatatattttaattttatatgtgcctgtcattacatactatagaaaattgtgtctacagtatgttatatagcatattgtaatatttattactgtatattccttgtgacaataaaatagtttgtattttatataatagtacctgttttatagtatatgttttattttatatgattacctaattttaatattttacatatcaaactttcacataatattttggttatttctactttcacgtagttgcatttaatgtttgtagtgtaaagatataactacaataaaagaggccagagagtctgc

SEQ ID NO: 154722 - DNA, 276 bp, Homo sapiens
ccagaagagtactttatcatttcagttcacaacaagaataccaaagagggagggatcaacactgtcaaatgctcatgacaggctcattaaaacaaggacctagcattgattactggatttagtaaccatggatatatgatgaccttagcaagagcaattttgctgacgtggtgagacagaaattgtgattgaagcatgagaggagaggacgtagacacaaagtactgacagctcttttgaattttgctgtgaagaatggaatagcacataactaga

SEQ ID NO: 154723 - DNA, 101 bp, Homo sapiens
ttagtgccacccactctgtctccagtagcttctctccccgaagactgcttccagaacaggtcacaggctcctgggctccccttcttgctgaagccaagtgc

SEQ ID NO: 154724 - DNA, 251 bp, Homo sapiens
tagtaagagcaatagctatgattatcagctattgagtgattatactagaaatcacttagtatctcagtattacataatacttttttgtctcttcattcctcaacttttccaagtaaatataaaagctactaactcagaaaacgtctgatttatgtaagatcagaaatttgatacttctattgtatgcatatgatatcataacccagaataaaatttgtaaataaaaatggagttttcctctggattacaag

SEQ ID NO: 154725 - DNA, 391 bp, Homo sapiens
gaaaacttggctctcagattgaaacgaaccctaagcatcacttcatccaagcatcatttcattctctaacttgttagtgcaggagaaattcatttccagaggcttgagtgagcaaatgatacaggtgtcggagagaacataaggatgagaaattcatgtaaggaaatgtaaaatctatgcatagccagagtcatctagtaggtctgtgaacatacttccaaacactcagttccaagctctgtggtttgcttactagtttttggagaatgtgacctgccaaatcgattgctcatccctcaaactcctctgtaatgtgtgtgtccatgaacccactaagaagcaagcttccccagggaaggaatgattttttggagtaggttgtaccatatct

SEQ ID NO: 154726 - DNA, 556 bp, Homo sapiens
tgagctgatgtttagcaccgtgggactgcacggcttcacccaaagagggtgttccaaattttatttggctgaatgccgaatgcccaagaattaacatctatatttggctaaggtgagaatccccatcttagaatgagatcccatggtacaagaataagtctgaaatgttcatcaagattgtgtcataattatcacaattttattattaaaaacgttagtggccaaagttttgatgttttgcattgcagtatcagtacagtcacacccagcactgttgggtaccacttgctcttgaggtcttcaaaccagacatttgtgatgctagatgctcactttcaactcagaaggctggaggagcacgtggacctttggctgatgctgtctgaagggatactcctcatgtgaagctgcccctgggctgtcagtttttctctctctgagtggctggttatggtagagacttacctcctctttgatcttggatgtgaagattgggctgttgctggtgatggccctctgttgaagcagtccccccaattggtactttgctccctac

SEQ ID NO: 154727 - DNA, 460 bp, Homo sapiens
gaaaacaggtctcatgacagggtttgctgatgggttagatgtagggagttagggaagaatgattctagatgactctacgttttgggcttgagcaactggtgtgtaactgaatcttggactgagatggggagactggaggaggaacagaagatttgcgggaaggtgtagaaatcaggatttatattttgaccatcagagaggtcagcaaatcacttcaatttagaagtctttggcttaggggagaggtctgggctggaaattcaaagtcaagagtcattcctctataccgaagggtattcaatgttgtggtgccgatgaatagcgatgccaagggtgccgatgaatagcgacccgtattgaattcaccacaccacatactatgaacggccatgcaccaccacccacggaatcgagaaagagctatggtgccgatgaatagagaggtgccagataaatagcg

SEQ ID NO: 154728 - DNA, 477 bp, Homo sapiens
ggcatggtgacatcgcatgtagccctgctggcctggtatggaggagttgctgtggcctggtttccacagatgtggctgcagccgttctgttgaataggaggctattaagggaaaatgctttgcaaggagctgagcagctgggagagatcatcagaactctgaatggggaactttgtcctctcttgctctgggatcctcttgcatctcctggtctgtctctaggagattggctgttcacgacgtcaaagagagttatccctaggaaccattcctcgtccgactgctttcctgacttggagggacaaggagaagcttaggacatggtgaccatggccatggcagccctgctggcctggtaggaggagttgctgtggcctggtttccacagatgtgggctgcagccgttctgttgaataggaggctattaagggaaaatgctttgcaaggagctgagcagctgggagagatcatcagaac

SEQ ID NO: 154729 - DNA, 261 bp, Homo sapiens
aaaaaaaaaagatgcagtactgtccttgactgatctaacggaaatgctttagtaattttttgttcaactacttgattaccagtagtaattcgggagcaaatatttgatctctggttcaactaaattatcagtgagaactacttgaaaacgtattggtactatttggctgacagaattttacagtgagacataagcctttaaaacaatgtcctctaaaatatgaagtatatgggaagagaagtcttgttcctcatatgttat

SEQ ID NO: 154730 - DNA, 240 bp, Homo sapiens
tgtaggctcagtaagggcactagccatgtcattccagtattcccagggcccatcatagtggggtgctgggactagggcttagttgccctccccagtcctcatcaacacctcctagccaccacaaataaatacaccatctaagccaaaactgagtgcttgtatagctttgaaacaaatcctcagccccctgcctgttcccacttagaagggtgctgctcctaagcccctgttttatataaa

SEQ ID NO: 154731 - DNA, 485 bp, Homo sapiens
accaacttccggccaagtgcagtggctcgtgtctgtaatcccaacactttgggaggccaaggtgggtggattgcttgagcctaggagttcaagaccagcctgggcaacagggcgagaccttgtctctacaaaaaatacacaaattagctgggcgtggtagcacacgcctgtagtcctagctactctggaggctgaggtgggaagattgctttagcccagaaggtcaaggctgcagtgaggcggtgatcatgccactacactccagcctaagtgacagagtgagatcctgtctcaaaaaagaaaaaaagtcaacttccgtaagttgttataagtacggaatgagaagagatctttgataggaatcctgtcggttgtaaagcactgcacagatacctattataattagtttaacttggaaaataacatatactctgtttacagggcaggtaaccctctgccatcaggattaggagacaaaggggaaa

SEQ ID NO: 154732 - DNA, 258 bp, Homo sapiens
attaaaaaatggccgctgggaaatggtaacagaagtccctaaatccacagaagagacgtgcagggaggcctcccagactcttagcgcgttgatttctctggacagtggtgctgccttgaggtgctgtctgtacttggcactgcacagcagcactgctgctctgcttcccacaagcttatgtcatttccccaacgacaccagaaatggcccacagtcaggactgtgtcttcacacccagctcactgcccttggtagcca

SEQ ID NO: 154733 - DNA, 295 bp, Homo sapiens
tgagcctggcccgggtttactagaagataagagcagcagcttcgtagttacaaagattaaataaggtaaaacataaaaatgctttgcaacttctaaggcactatataaagcactagaaggatgggagaatcatgttttgtgtcagatatgaaacaactggcttagaaaaaaaaaagaatgaagcatttttactccttaaagaaaagcttctgtccttccccattgcccaatcctcaacccccaatcctgttggggatttttcctgttagagattttattcaaaaacatttagcat

SEQ ID NO: 154734 - DNA, 490 bp, Homo sapiens
tgtctcaagggaggggggggaaaaagcagagttaattaggtttgaagaagacagccaaagaaaacaaagcagcacctcacacaggaatgactctgaaattacctgctctcttggttcacctgttagtggcttcctccacaaggagacagtcaagaaatctatctaagaggctacatggaagcactgtggagtcacagagcagagcatcttcccaatgtgtatagctctggggatcttcaggggtcagaagtgtccaggattaaaacaagatccctagcatgtacaattcgaaggggtaaacctggaagagaagatgtcacgttctgggttttgcccaaatcccaacatttgcatcagctcctgggagagcatcagggcctttctcccatgattacaattcatgagaccacagttttgtattatagctcacctctagcaggtaagttctgtcttccttccctccatccacctgcctaaatctcttagtggg

SEQ ID NO: 154735 - DNA, 282 bp, Homo sapiens
ggagacaaacaatataaatgtgatgtatgtggcaagctctttaatcacgagcaataccttgcatgccatgatagatgtcacactgttgagaaaccttacaagtgtaaagagtgtggcaagaccttcagtcaggagtcatcccttacctgccatcgtagacttcatactggagtaaaacgttacaattgtaatgagtgtggcaagatctttggtcaaaattcagcccttctaattgataaggcaattgatactggagaaaatccttacaagtgtaatgaatgt

SEQ ID NO: 154736 - DNA, 432 bp, Homo sapiens
gtcctggacggggagcaaggtggctgatgtgggagtggaagagaaatcctttacggtatcccatacgtaccttttgagttttgttccatgtaaatatatacttatgcaaaacaaaaatttaaatacaaatttttaacattaatatttaaggtctagggcaggagggagaagaggaggaggaaaaggagttgaaggagggggcaggggaagggttagaactgctgggctgcaaccaaaacgtaagcaccccggccacgtactgagcgtcctctgggcccagcgtgtgcgggcactgcacatggcaagtgctattcacctcctttgggaaataaggaaacggacaaagtaaatggcaaagccaggacgtgagcccttcatgtgggactgcaggagcctggggtgctctcctccagggcggtgcagctcccccaa

SEQ ID NO: 154737 - DNA, 358 bp, Homo sapiens
gggaactgtgagtccattaaacttctttttctttattaatttcccagtctcgtgcatgtctttatcagcagcacgaaaacagactaacgcaggcagccggtgtggggaggagtgggcaaggagggggcaggggaagggttagaactgctgggctgcaaccaaaacgtaagcaccccggccacgtactgagcgtcctctgggcccagcgtgtgcgggcactgcacatggcaagtgctattcacctcctttgggaaataaggaaacggacaaagtaaatggcaaagccaggacgtgagcccttcatgtgggactgcaggagcctggggtgctctcctccagggcggtgcagctcccccaa

SEQ ID NO: 154738 - DNA, 460 bp, Homo sapiens
tttccaatttacaaagcttcctcaaacattatttttatttgattcttataataaacgtacaaagtggcaattttatcatgaaattgaaaattgtattcaacattctttgtaattcaaaaagtctgccttcaaacccaaatacctcattatctagaaaagtatatacttagaaaagttatccttagcaaactaacacaggaacagaaaaccaaataccacgtgttctcacttataactgggagctaaataatgagaacacatacacatatagagagggacaacacacactgggacgttttggagggtggagggcaggagaagggagaggatcagaaaaaataactaatggattctaggcttaatacctgaggtatgcaataatctgtacaacaaactctcatgacacaagttttcttatgcagcaaacctgtgtcatgagagtctccgtcgaactgggtac

SEQ ID NO: 154739 - DNA, 303 bp, Homo sapiens
atcgagcacattgtccaggtattataactgagcagaatcccagcatgctggcaggaaaacaatgaattcaaattctgctggtaaagctctcagacaattaaagtacagcccctggcccccagcccagggcaggacagaggagagatagagagaaagacctattattggataaggccctgggacagggtgagcaggaagtaggatgaacaagaggttaggatgtcagagaagagccagactcaatcaacctggctaggcactccccaaccaccacccccgtccccaccactattactccctccc

SEQ ID NO: 154740 - DNA, 288 bp, Homo sapiens
tgctaaggtctctgcattttcagtgataggtaagaaaatggtccctgaccttgaggagctttcacatgcatggttctactccagagagggcatgttatgttttatttcatgggcaaactcagattgattgctggtggcttcctggagctcagtatttcatgaggattctgaagctgtctgtggacttagtggaaaatagagtcattaccaattagcaatgtctgtcctggcatgggaggaagaagtagcagtatttgggttttattctggggccaagaaaacatcata

SEQ ID NO: 154741 - DNA, 116 bp, Homo sapiens
gactgaaaagcaactcacaactctgttacataaacgttgaaccagattggtctggtgtggctccaaaaggtgttctcaatgtcattaaatataaaatttcaaggtggtacatatca

SEQ ID NO: 154742 - DNA, 439 bp, Homo sapiens
cccaaagtgttgggatttacaggcatgagccactgcgcccggtcactttcttcttctagtaagatgttcaaacagtaggatttatgtatagtgctgagaatattaattttaaagttcaaaatcctaattgtcagttgggctactctgcttactatttgtgtgaccttggtttagctacttattctttcaaagcctcagtttcctagtaaaaagatgggtaataaattcttagttaacactgaaataatctgtataaaacttaacacagatctctagaacattgtaagatttcagatgttggtacctgccattgcaattgtagatgtagacttaaactagtctccctaaagttggaaacctacaatgttagccagattttgagagggctcaaaatttatttttggtgttcatattacatactattatttaattagtgatc

SEQ ID NO: 154743 - DNA, 439 bp, Homo sapiens
ggctgtttttgttcagttcagggtcggtctgtctaaggtcagacatggctgtttgaattcattgcctcttgtctgttttctaataagcattagggatttgtcatttcttgttgattatcttaattatcctatagcactctgggtctgataatgtgaacgttttgggttgctcagtggtagaatctgtagtattttatagacactaaaacctacatttttggctgagcatggtcgcttacccctataattccagtgctttgtgaggcccaggtgggaggattgcttgagggcaggagtttgagaccagccttcgcaacatagcaaggccctacaaacattttatttttgtattttgtctctacaaaacaaaataaaaaattaggtggacatggtggcatgtgcctgtagtcctagctactctgggagctgaggttgggga

SEQ ID NO: 154744 - DNA, 577 bp, Homo sapiens
aacaggcccttttttaaatataattctccatgcagttggagggttaaacaggcatactgagagtcagtgtaaatgtttagtcttaccttcactgagttctaaggcctgaattaaagcaatgagctcagcttaacgacagtgtccagggttatcactgcatatcctgcacatctctctccttgtgggttgatgaagctgctcccgtccatgtatagctcccagtctactgatgcccaaggctggtctcggaggtcaggtctgctagagtaaacttgagtccaacacctctacacagttaatgctcgacagggctctagctgctgggaacaaggtggcgggttcagggtgtttccagtttagtagatcaatggttaaaaagggctgatagatgaaagtctgttgccccaccccctggatgtgggcttggtcattataatagacaggtcctcgtgtctccctgagaggcatttgcatagctccagcaagaccagatctgagagggcccacttgactatcttgacttccttccttggcctcttgaggctccgatcttccccttcaaggtgagacctggggc

SEQ ID NO: 154745 - DNA, 579 bp, Homo sapiens
ctggattgcaggaaatgttgtcagaaaagtcataggagtggagtgagccagtcgggaaggacattgaaggtcactgtcaagactttggcttccacttctataatttactagcagaggacactggacacactggttaaaagaggccagtgatttttcccatctagaagacatgcccttaatggtaaaactcaaatatggtagcacttaggaaaggatggtgatagtacagggcttagggcaagaaaacatccacagagataagtaaagcggattgtacccacccttcctgttccctcacccactgaacatattgaactctgagtctgcatgctgagctttgggataaggagacaaaacacaacatagttcccatcctcctaatgctgagtcgattggggagatcactggcagtggtactacaatggagtgagttttcagagacagatgaaaagcccaggttgtagggaagtctgactcattttggtcactgatgatttggggaacaaccaaggagaaggggatgggtaaggttaggaaagccttccttgagaaattgacattagagctgggatcttggaa

SEQ ID NO: 154746 - DNA, 156 bp, Homo sapiens
gaaagcaaggcgtctgtttcagtaacctgaaacctctctgtagggttaatagaggggcccgagcaaagagcacaagaagccacattgtctgggaaactggagaattgtgaatggggccaatgtcccagggcagctgcccaaagggaagggagaaaa

SEQ ID NO: 154747 - DNA, 564 bp, Homo sapiens
aatttgagcagaggagttgacatgacatggtatgttttaaaagaatcagtctgtcagctgtgttgagagtaaaatgagtgaagaaacaatagtggaaataggaagaccagttaagtgtttgttgcaatccaaatgaaagtgatagtggtgtggaccagggtagtagcagtggaggtggtaaacactggtcagattctgcatatattttgaaactacagtcagtaaggctttctgatgaattcaaaatagggtggagagaaggtgatagaaggaggagcaaagggagactctaggatttattggcctgagccagtggacagatggagttgtcatgtattgtagtgaaaaagacgacgggaagagcagttcttggcaaggtggggagaagcttagtttataccagttaaatttgtaatgcctattagatatcccactggaggtgttgaatgcatggctggatatttaagtccagagatcaaagaagaggtcaggttgaaaatataaatctgggagagctcagcaaatagatgatatttaaagccatgagtctgggtgagattaacc

SEQ ID NO: 154748 - DNA, 219 bp, Homo sapiens
ctggcatgatctggcccctgctgatctcccaacccatcatgggacagtcaccctcagcttctgctacatgagacatctcatgctctcccagcatgtctgcctccttcccccgtttagcactttgctcttgccctccctttttctctcggaccccttcctcagtacctcccctacatacacaggattctctcccgggacttcctcagcccctgcagcctc

SEQ ID NO: 154749 - DNA, 430 bp, Homo sapiens
cagtggctgctcaaaagaatgaaactgcgcgaccgggagaccacggaaagggtgtctatcttcattcccatttttaatttaaactttaatggaaaacacattttgcattttctggtctttccacctgcagcctcagatggtcgggcagaggttttgagtctgggcaattaagctggtgcaatcttatcacttccaggcctgggtttgactggtgaaggagaacagaatgccagctgaacaaaaggccaggtttccctggacccagtagtcagccaggattgttgtttaaagatcccagagccttgcaccctcccgctcctgcacactcagccagagctgttgatatagcagtgcagcccagagaaaagagagacctggattcaataggctggctgtgagggggcactggtgaattctatggtcacagcga

SEQ ID NO: 154750 - DNA, 325 bp, Homo sapiens
tagctgagattacaggcacccgccaccatgcccagctaatttttgtatttttagtagagatggggtttcagcatgttggccaggctgatctcgaactcctgacctcaggtgatccacccacctcagccttccaaagtgctgggattacaggcgtgagccaccactcctggccccagttttgtacttctttgcctagtttgggactatgaacaagaggaaatgtagctttgtttgacttctgccacttcctctttccattcttccatttgggtgggtgttccggtagcttgtgttgagaaattttaacttcttaatgttttgtatt

SEQ ID NO: 154751 - DNA, 120 bp, Homo sapiens
gccagcttatccagatctagacatgcaaatgcttgctggtaaggtgattgatgatattccctatcttaggtattataataagattgttgtgtacattttaacctaatttctatctgtcaa

SEQ ID NO: 154752 - DNA, 466 bp, Homo sapiens
tgaagatgctaacaatctagcagaaaagagaggccagaaatttcctctcctctatcttgctatttattacatagtcctttattattttttttcaaatctactttttagcaagaaaagattcatcatagttcaatagaatttatggaaaccaggctaggtaacaagtatttgacccacacaaatttgcttttaatacaaagtgatccatgcaaagttgcttttaagtaaaagtaaatgatagagtacttttattcacttaattcatgcaccagcaattcacaacattcaagcagcagcatgtaagcaagcagcacaattttcatgtgtccactgcattcatcataacatcatcgcagcaaacagtcaaggtacttgcaaccagcactcataccatcattattccaacattcacaatcaccaacatctttccacaatcattatgcattccaccatgcatatttcatca

SEQ ID NO: 154753 - DNA, 251 bp, Homo sapiens
ggtggctcatgtctataatcccagcactttgagaggctgaggtaggaggacagcttgagaccaggagtttaagaccagcctaaacaatatagtaagacccactctacagaaaacttaagaaaaaaaaattttttaatccagcaactttaatatttcttcatgcgtacatgttcacatacatacacgttcaaagcagaacatggaataattgaaaaattataaataatcaaatccttctcagcacatgaaaa

SEQ ID NO: 154754 - DNA, 395 bp, Homo sapiens
taaacaattcaggaaacactgaaagtttccttcataatcaatgcaagaaagcagcattttttttttctcctacctcagcctcccatatagctgggactacaggcgtgcgccaccatgcccaggctaattttttgtatttctggtggagacggggtttcaccatgttggccaggctagtctccaactcctgacctcaggtgatccacctgccttggcctcccaaagtgctgggattacgggtgtgagccacagcgcccgtcctaagatcagaatattttgcctaaaaatttggattcccagtttctttttttttttttttttttttttgagatggagtctcgctccgtcacccaggctggagtgcaggggcgtgatctcggctcactgcaagctcc

SEQ ID NO: 154755 - DNA, 426 bp, Homo sapiens
agctcggtccgtagcgctgctggaaactgctgaagtgtattccaaagtgactgtaccatcttgcattcccaccaacaatgaatgaagagtacctgttacacatccttgtcagcatttggtttcattaagtgttttagatttaccattctagtaggtgtatgatggtatctcattgtagcactaatctgcaattactggatgatttatgatgttgggagtcttttcatacaattacttgtcatttgtatatgaggtgtctgtttagatcttttgcccatttttaaattgggtttttatttttcttttgttgagttttcagagttctttgtattgaatagtcctttatcaggtatgttttttacaaatcttttctcctactctgtggcttgtcttctcaatctcttgacagtgtcttttgcagagcga

SEQ ID NO: 154756 - DNA, 657 bp, Homo sapiens
atccgtttgtcatagtcacttagtgacttcctatcccttaagcaagaagaatttacacttgccacatctcttctaaggtttactacaaattgctggaatcttacgtactacatattacattacaattaacatcctcaaagttcaaccctcagaacagataaatatttaacatgcaaataaataatccagagggattgaaggggagagatggcacgtaaatgattcaaagaatccacaccaaaaccaccaggtgaaaagacgccggggaagagggatattcactagtctcaggaagagggatattcattagtctcaaagatcaccatcaaattccattatcagttaccaaaaaagaaacaataccgttacaatgaagacaaagggaaacaccggtgtttccctttgtctagtgtttccaccccacctgtagtcttcctcatccatggatacttgcttggggctggtgctgccatctacccccactctcctagtcatcaagtgggcatttgaagtgtgtggaactgttttattttgctttgttttgtgacactagccagagggcattactgtgtttattgagagggaaagagggatcctaaacatttttgtaatgagcaggtatagctctacatgaacaagaactgactcacccaacat

SEQ ID NO: 154757 - DNA, 171 bp, Homo sapiens
tcgcccggacattaaccatgagtcctctgggctggcatgtgcaatgggcccagccggagtgctgctgggaaacctgctcagggggcgagctgagcctcctgggataattctgactaaatgattcttcacggagttgacttgaaatgtgatgaatgggtccccagtgctctt

SEQ ID NO: 154758 - DNA, 412 bp, Homo sapiens
atttcttcctctcgctattattaaacagagtatggaaactgggaatgggataagtgagggaggtgacgatactgaagggctcggagacagaatcgtttcttagtgaacccttaccctatccccaaagtgggctacttcatgcagtttccaacctgtgcgctgcatgactggtgttaggattattgcagtaactactgttgttgtcaccatactgcatactggacaccctatcatatgccaagtgctgagctagcaagaactgagccccagctgtctgacttcgaggtctgcccactagtggtcaaatgccactctagctctgtctacctcacaggttgtcaggaggtttgaatgaaggattattcccctgcacacagtgagaaagaaatctgccatactccttctcctcatc

SEQ ID NO: 154759 - DNA, 374 bp, Homo sapiens
ctcactagtgagtatacgattcaacagcctcctgccctctactaagcttgtatgttaaaccatacatctcttatcatgcatccaagaatggtttctacttatgctcctaacagccatatcaaacttgttgaaacttgctctgggtgtggtgattcacacctataatcccagcactttgggaggctgaggtgggcagatcacctgaggtcgggagtttgagaccagcctgaccaacatggagaaaacttgtctctactaaaaatacaaaattagccgggcgtggtggtccatgcctgtaatcctagctagtcgggaggctgaggcaggaggattgcttaaacccaggaggcagaggttgcagtgagccaagatcg

SEQ ID NO: 154760 - DNA, 578 bp, Homo sapiens
acgtggggttatcgatggaggtaggattggtgctgtgggtgaaagagtatagatggggtggtggttgtggtaaactttaatagtgtagggagctgagcctattattaatgtggggtggtgggtagtttaggctgccttgtgtagaaggacagggctccattattggacaggctgaggacactggtgtagataaagatggtttcagaatccagagtgtgtcaaagcggcatagaggtgctcactaactgagatgattgagatatgcaaaagagttaaattaatagaaaagatttgtttctaatttagtaactgctgcccttcaaaatgacattaagtacttgcgcccctcaatttgaagaaaagaaaaaaaaaagccatctgaggctgtcaagtccgctaagagtagctgactggccgaaatagaacccacggggagagggtgtctctcactttgaatctgctcagtactgggttctggcagcagcagcagcaatttatagctcacatcttccacttccaccctccttgtctgtgatacttcatatttcattttgcaattaaaggtgacctgaaaatgc

SEQ ID NO: 154761 - DNA, 194 bp, Homo sapiens
gatatcatacagaggagcttcactatatccaccactgtgatatcatacagaggagcttcactatatctaccactgtgatatcacacagggtagcttcactatatctaccgctgtgatatcatacagaggagcttcattgtatctaccactgtgatatcacacagaggagctgtgctatatctaccactgcgata

SEQ ID NO: 154762 - DNA, 379 bp, Homo sapiens
aaagacccagaaatggcatagatgatggaattagtgatcaggacattaaaacagctactatgaatattccccgtatgttcaagaagaatggagaatgaacgagagtgagggaccggaaacgactgtgttccatgctgagggtggcagaggctggcctggatgctggatgaggctcaactcgggggcctgggctgttgcactggggctggactggggatcacggaagagggccaggcccgcgtgggtctccagggctgtgctcaggggcgtggtcttctgcagtgggggcttggctggtgagtggagactctgcgtgactctgggggcgtggccgagaatgggtgtagctctgtactagggcgtggtcatgcgtaggggt

SEQ ID NO: 154763 - DNA, 339 bp, Homo sapiens
atgatttacggagtgattaacagaggtctacataaagttacttttcccctttacttaattatattgtagtgtgcagataaaaaaactactaccttctcatccaagtggtctgtagaattcatgttccttacagtggtcatttaaagtcaatatttatttatttatgtatgtaataaaaaaagttggatttttgtgtatgtctgtcatgttatttagagagaagtaatcttgtaaaaatgttttgtaaaaaacaaaaaaattgtaaatagtcttgatattctgtgactcattatttttatgttagagtttgtacaaactggttcaataataaagtatcca

SEQ ID NO: 154764 - DNA, 681 bp, Homo sapiens
tctcactctggtacccaggctggagtgcagtggcacaggtcatagctccctgcagccttgacctcttcccaggctcaaaggatcctcccacctcagcctccaaaggagttgggactacagacgtgcaccaccacacccagttagttaaaaaaaaaattgtggagatggggtcttgctctgttgcccaggctggtctcaaaatcctgggctcaagcaatccctccaactcggccttccaaggtgctgggattacaggtgtcagccactatgcctgttttttgtttgtttcttttttactggtagagctatatttagacaaatttctaaaggaagacaaaactgaggtgtttccacattcactaaaatcttaaaataagggcatataaaagtttttttcaacaagctcctctgtcttaattcgcattgtgcttgctggaaactacagccatgtttagatctcatctatactctatttcggaaaaagtctaattttaatcattaacttcacatactaattaacggctgtagttaagctgtgaaaccttacctaagctaataggaaattaccttcacatgaggacaacttaagtgattcagacactccaccgttctgactatacttttgctgtgttgccacctaatttttattactactcccttactcactactccagccaaaca

SEQ ID NO: 154765 - DNA, 389 bp, Homo sapiens
tctcttactctggaacttattctgtgtgtgctgtggccttcaccctgtagttaacctgtgccctctgtatattcctccttaaaaagaatgttagaaaatggactctaggccgggcatggtggctcatgcctgtaatcccagcacttttggaggctgaggtggatggatcacctgaggtcaggagttggagaccagcctggccaacatggcaaaaccctctctctactaaaaatacaaaaattagccaggcgtggtggtgcgtacctgtagtcccagctactcaggaggctgaggcaggagaatcacttgaacccaggaggcagaggttgcagtgagccgagatcacactgcagcactctatcctgggtgacagagcgaggctctgtccc

SEQ ID NO: 154766 - DNA, 535 bp, Homo sapiens
agtcccagctactctggaggctgaggcaggagaatcgcttgaacccaggaggtggagatggcagtgagctgagatcacaccactgcactccagcctgggcaacagagtgaaatcctgtctcaaaaacaaaaataaaaacaaaaaaagcatacaaaccacaggagctcctcttggtccccctttgtctttcattccacctccagaaatcccagcagaatcaccttcaaaaactcctagaatccaatttttcccctccattgctactgccctgatctgagcctccataacccttacccaaatgcttcctaaacgtatcctggctggtgctgctgaattccatgtctttccagctgccctttaaaatacggtaggaggcaagtcttttctcaaaaccctccagtggcttctctctcagagttaagatcctgcagtggccttcctggcctcaggtagtgtctgctgacctgtaccctcggccactatactccagccacatggctttgtggttcccttggacatatccagcatgtttctg

SEQ ID NO: 154767 - DNA, 205 bp, Homo sapiens
atggtgggagtagggagaagtcatgatgaatgggtgttagaagagataaacagtgagggaaagtacacaaactgaaaaagcacacaaaaatcccaaaaacgaagtgcacaacagcaacaaaactaacaggaaaacaaaacttgggggcatttttaaaatatttggtttttttccttttcaagaacaggaaaaacaaaagatggtg

SEQ ID NO: 154768 - DNA, 287 bp, Homo sapiens
cagtcttcagaatcctttccagctgtaaaattcagtgattctctcttttcaaaataaaatgaatttataactttgagaaataaaatgtaatgatgctctagtactgctgagggaaggaaacatctgtgtatgcctcacccagaaccagtcaggggaggaaaactgctgattttctagggtaatgatgtcctgtgaaccaaccagactggcctcaagccgtctcaggaaaaatgacagcttgaagttctcaaaggatccaccaacatgcaaaggtctgcaagttcgca

SEQ ID NO: 154769 - DNA, 379 bp, Homo sapiens
actggatagagaatgagctgccagccagccttgggtcccacatcagggtcttggttctcctccccatgtcagtaagcccatgtgcccaggagaaaggaagatgtcatgcacactcctgtctttgagaagttgggtcttcaggctagcaggattctgactggggtctgtgagactgggaggaagccatttcccttcagcctcaagtctcccttcagggaaatgaaggcattggtgagagccctggttgcattgtgcagcccccacctggcacaggttttacacacagaggtcacattccaccaccacctatgcattcagacactggggaagacctggcctgtggacccccaaaatcccccctgggtgtctgacgccaccc

SEQ ID NO: 154770 - DNA, 302 bp, Homo sapiens
tgatgatatggcccttatttagtctgaattatctggatacaatttggtcttctatttcacaggtgtaaggaagcagcacagtctggaacataaaaacgtgtggactctggtgaaaccccgtctctactaaaaatacaaaaaaattagccaagcatcgtggcagacacctgtagtcccagctactccagaggctgagggaggagaatggtgtgaacccgggaggcggagcttgcagtgagctgagatctcgccactgcactctagcctgggtgacagagtgagatcccgtctaaaaaaaaaaa

SEQ ID NO: 154771 - DNA, 353 bp, Homo sapiens
caggggaaacacggaattgttttagggcagtggaattattctgtatgatacggcagtggtggatacatggtactatgcgtttgacaaaatccacagaaccttacagcacaaataattaaaacttaattatgctattttttttttagacggagtctcattctgtcacccaggctggactgcagtggtgcgatcccggctcacagcaacctccacctccagggttcaagcgattttcctgcctcagcctcccgagtagctgggataacaggtgcccgccacagtgcctggccaatttccgtgtttttagtagagatggggtttcaccatgttggccaggctggtcttgaacgcct

SEQ ID NO: 154772 - DNA, 501 bp, Homo sapiens
tacttttccacaggtaattaagacctgaaatgcagaggttttcagatggttcttgtccaggatggaatacatggttatttcctgaaatcttcgttgcattattttccctcacactggtagataatcagaaagattaccacacctccatgcataggatgctgggttattaatctggggaagaaattttttctctcccttttatttgcttaaatccagaggtagatataaaccaccgccacctcactctttacaaaaatcctatttaaaaatatttttaaatggcataaataattatatttttaacatttaaaatctaagtaatgcagataagacaaaaattctcaccactcttgctacccctcatctactctgctgcccagagtaaactgttgctacctatttgtgtgaccttcctgagttttcttgtttacacacatacgtgtctacactaagataagccttcacacaagtaacaccatccctgtgaaatcatttatccat

SEQ ID NO: 154773 - DNA, 176 bp, Homo sapiens
cagcaataggaaatttaaagaagaaatactggcagcaagagaaacacacagaaaaagtgagagccaaattctgagtgtaaattcttaccaaattcatgcctgacaactaaattatgcatatggaagtgggggagggaccccagagaggccagtgaagaagcaggcagagacctaag

SEQ ID NO: 154774 - DNA, 283 bp, Homo sapiens
ggaacaagacagagagacgaaagaggttccacagccttttaaactactagatctcatgagaactcactcactatcaggaggatggcattaagggcttggtgctttgccatttgtgaaggatccactcccacccctttatgattaaagctttttccacctaggccccgactctaacattagggagtgtactttcacatgagctttggaaggggcatagagaaaaaccgtattattctgtccctgaccccacaaatctcatgtccttctcacattgcaaaataca

SEQ ID NO: 154775 - DNA, 620 bp, Homo sapiens
tttaattgtgtagggtttttcgtgttgagttctgaagagttcttgatatattctggatataagccttttatcaggtatgtgatttacaaatcttttttccagcttgtggctttgtattttgatcctcttaacaatgtcttctaaaaaattctcatgatcagtagtgcaaaatgctgtgtttttgaagagaagttgtaaattttgattaatttactaatttgttactttgtggattgcatttttggtgtcatgtccaagaaatctttgcctgacccaaagtcccaacagttttcccctgtattttcttgtagacattttatagttttgggctttacattgagatctaggattcgtttggggttaatttttgttacgtggtgcaaggtatgaatcaatgtccagttttttgcatgtagagatctaattgatctagtagcaccatttattaaaaagatgtatctctccactgaattgcctttgaatctttgtcaaaaatcaattgctggctggccacggtggctcactcctctaatcccagtgcttttggaggctgaggcgggcggatcatgaagtcaggagttcaaggccaagctgttgaacgtagtggaacccctgtctct

SEQ ID NO: 154776 - DNA, 472 bp, Homo sapiens
gtttctgtattaacaactgggaaaagtacagcaccttatcaacatttatttgaagatttggtggactttgtggaagaaaatggatttcaatagagtccccaaaccatgacagatttggaattaggtgtgatcaaggcttctaacagtcaatttgaagatgtcaccaataaagtttgtcttttctgttcagcccaacacactgggcggaaaattcagatgagacaggaacttccgtttaaagatgcgtcatttgcctgcgtgggtgttcctcccagctgatgacaccccggagcgttcagggaattaacagctgcatttgccctaagaagccggggaagttactgactggctcgaaaatactcgtgcgtatggcaggatgagaggatgctttgtgatggtgttgttgctccgtcaccagcactatttccgccaaatctgcggtctgtgtatgaggcccatgcgcactggacct

SEQ ID NO: 154777 - DNA, 266 bp, Homo sapiens
gcgttagactctagaggctcccccatgtgggcattacttgctttattaggctttttggtggctgtgcatcttgtaagggtgtgtatgcatgtgcgtgtgtgtgtgcgtgcgacatgcgcttgtcctctcagacccaagttcttaaagggaaagagactggggcctacacagaggcaggcatgtatattccacagaccagagtttgacaagaatgactggacacaagagtggagcccagtcccagctctatgctgaattcagagtag

SEQ ID NO: 154778 - DNA, 504 bp, Homo sapiens
atatttaaagagtaattgcattttgccatcttagttaagaactctgctgcatcctaaattaaaaacattattgacttaaaatctataatacaaaaaagctttgtttttaaatacctagtttctgtccctcaagaccacataaagaaattctaataaagaggaacagtccggaagcaatgactggcccttgtcctgtgtaccatattctgcagcaggaacagtgcagacatctgaaacaggatagagctttaatcagctgagaggtttgctctgacttctgttttttttatattgtagcaaagctttcctgtagccatttctagtaggagaaaagtcagtctttatgatcaacagtgcctttttagttttttttttgaatgcataaatatccattaaaaaccatctttctgacattttcttgtatgggtttctgatgaaaattaaagatctggccctcgtgagacctgtaacctgtaatggaaacagtggtcagatccaataaga

SEQ ID NO: 154779 - DNA, 617 bp, Homo sapiens
ttcaagagagaagtctccaggaaagaaagtcaatagaagtaaaggtgcaatctagagatgtgtgtatatgtaaggggaaggagatattataaaagcaaataatgcaaataaagagacatggcaattagaaactccaggaaaataatgttgaaatgcacaagtgaactgtggtccaaatataaaataatgtgacatgaatttaatatatagtatatgagaaaagcattctaattgaccttgattctagaaacagtcctcagaatggcccaggtgattttatattgcatcagttacagaaggacacaaaatctaacacactacttaggccagcatcaaacaatatttacatggtcctctaagataagtgctatgtattggttttcaaagtttacagttatcctgtagtcaactacagttgtggctgcaagacagaatataaatattagtaatcctgaaaatgtgaaagtataagctgtagctgatacaagttacaataagaaagggagggataaagagtgtagaaagggttaagagtatacatattcttatattaaagtagagcttgaatagaatctgtgaaatgaggatgcagagaactttaacaattatttgaggtt

SEQ ID NO: 154780 - DNA, 271 bp, Homo sapiens
tgtctgtctgtctgtctatcaatcaatagcttttggggtttttggctgcatggatgaattattattttattctgtctcaaaaaaacaaaaaacaaacatagaaaaaaaaatcttaataagtttacagaactcttaaagtattttcatgaatcccagcgtttcatagaaaacagactgaaaagcacaaatttaatgcttctctgaataaggactgcaatgcttgttcttttattatgctttatattcatcctctttaagacatgaccttggg

SEQ ID NO: 154781 - DNA, 223 bp, Homo sapiens
cacacccttgcccaccagtgctctgcattattgccactcattccagacaaaaatcctcatgacctctttgtctgaagacacggcactccctcacacagcacatactgctacttcatctctaccctacaactctgatttatccttcaagttccaactcaaatgtcacctcctctgggaagctctctccagcccctccagttgtgagttatactatcctacctgt

SEQ ID NO: 154782 - DNA, 225 bp, Homo sapiens
tgtctaatatttttgttctggcctaaagaatatgttgacatttagattctctgccgccactttcctccagtagggacagaatagttgaacccttgagaaatacaatctgtacttttgatccatagtttgcttcttccgttatttatctggttgtggaaacatggtttagtaccttcctcctctttttttttttttttttttttgaggcagagtctcactgtcgcc

SEQ ID NO: 154783 - DNA, 220 bp, Homo sapiens
tgaggtctagaggggcggcagcacttgtccagggtcgtggccgacaagtcgccaagctggggagtttccatgggatccaagcctatccccaagcagcccaggggacacagacagcatgcaggcacacaatcgcacaccctgccccgccacccctgagcctgccgcatcgtcattcctgtgcaactaggcaccctgagtctccacatcggggtggctctgg

SEQ ID NO: 154784 - DNA, 137 bp, Homo sapiens
tgatttgagattgagaagacagtaatattgagtgagataaataatactaataggtcccaccggtactagatgtgcagtgcaggatgggtggcatcaaagagaatggtacagaaagggaagactggaaacgagaaagg

SEQ ID NO: 154785 - DNA, 784 bp, Homo sapiens
tagcacctcctcaatgttcaacttccacgttgctttccaactgcagcctcaatgcttacctggttatagccataattgtgattttctttgtgtaaaataaagtcagtcctaaagtgagagaaaaaaaattttacaggaaaagaatctttaactgacatgttttattggctgtctaaactacagtagttaggaattgtgttttacctgacataacaatagtggtctaaacaagacattaagtaaaccagcggtaggccagtctagtgctagtggaaggagtccttagtcattggtgacctagactcattctgtcttggatcccagtattcttctgcatgatgccttcctggatgtcacctcatagtccaagatagctgcagagttattctgacaccagccgtcatatttgtaatcccagcaccagaccctccagctaagcaaatacccttttcccacacagctttcccctatccccttctactagttctgtttacatcttcttagccagactgaccacctggccacatcttgctgcaagggagaagctaggaaatgtagtcttttagcttgggcctattgctagcccaagtgaaatcagaattgttattaaggaagaaaataaaccaatattgggtggcacttaacaatgtctgccacagttgctaatcaataaaatctcccttgaagacatgaggaaatccactctctataaactccagtacatcaccaatgccagttaccctgccttgcggataccatcggccctcagcgtctgtgggttctg

SEQ ID NO: 154786 - DNA, 389 bp, Homo sapiens
ccaccaactctggtttcttgctggttgggggtgtcctttctgagggcatcaatttcctaccaccccaaagctccaaatagagaaatgtggggagctgtccaaggtgtgtccaggaattatcttccagtgacctgtagggtggacaggtaggcagaggggatatgatggtatcaacagggtccaaccctgagagaatcatcaccctctttaggcctcggtcttcccatctatacaataaagaggttggactccatgttttcttaggggccttcataccctgacattctaggagtcttaacttttttttgatgtcgcgcatctcagggtggtgactgggtggaagtttgagaaaaatctctctctctctcttttttttttttttttgatgg

SEQ ID NO: 154787 - DNA, 265 bp, Homo sapiens
cccccaggattattcgggtcatgcaggtctgtgtgtggatcctgagagctgggctgtttacagggcagtggaggcagccaggctgtacctggactgaaacacctcatggtgaagcacttcccttggattaagctctatttagtcagctgctcgtgccataatggcaataggattatcagctaagtgagggaaaggctcatgggctgggataaggccatccagggggagcctgaataacagtctatcagaggggcatgggtctgaa

SEQ ID NO: 154788 - DNA, 593 bp, Homo sapiens
ctgatgttctacatggagggtcttgcagctgcagaactgtaggagaactgatgttctagtttgagggtcttgcagctgcagacctggagaggagctgatgttctagtttgagggtcttgcagctgcaaacctggagaggagctgatgttctagattgagggtcatgcagctgaagactcggggaggagctgatgttctagattaagggtcatgcagctgaagactcagggaggagctgaggttctagtttgagggtcatgcagctgaagactcgggaggagctgagattctagtttgagggtcatgcagcagaaggctcagggaggagctgatgttctagattgagggccctacagctgcacacctgaagaggagttgatgttcgagattgagggtcgtgcagctgaatactcagagaggagctgatgttatagtttgagggccctacagctgaagacccggagagtatctgatcttcgagattgagggtcgtgcagctgaagactccaggaggagctaaggtggtaatttgagggtcttgcagctgctgacttggggaggagctgatgttctagtttgagggccctacagtt

SEQ ID NO: 154789 - DNA, 300 bp, Homo sapiens
cgggcgaatcacctgaggtcaggagtctgagaccagcctcaacatggagaaaccccatctctactaaaaatacaaaattagccaggcgtggtggtacatgcttgtaatcccagctactcgggaggctgaggcaggagaattgcttgaacctgggaggcggaggttgcggtgagctgagatcgcgccattgcactccagcctgggcaacaagagcaaaactcagtctcaaaaaaaaagagatagacttactctgaaggagcaggaggagagaagtatgctagcggtggggcagctgggaag

SEQ ID NO: 154790 - DNA, 508 bp, Homo sapiens
ggagaagctgtcttcttgacttttccagcttcttgacattgactgccttcctttagctcacagcccacagcactcagaccttgcttccaccatcacctcacctctgactccaaagctcctgcctccctcttaaaagaacctgtgataacactggacacacctgaataatccagaataagaataaccttccctcctcaagattcttaatcagttctgcaaaaatccctttttccctgcaaagcaacccattcacaggtttcagggattaggatgtgaatatctttggaagaccattattctgcctaccacagacattgagatcatagataaattaatttaccccttctttttttaaagtttcttttttctttcttgctttctttctttttttttttttgtttttttgttttttgagatggagtctcactctgtcacccaacctggagtgcagttgcacgatctcagttcattgcatcttccgcctcccgggttcaagcaattctcgtgc

SEQ ID NO: 154791 - DNA, 323 bp, Homo sapiens
ctcaagcgctctaaaagccaataataaaatttaaaaatcaatgaggaagctgacggcaagccgatgacggggccagaggccaggaatgatgtgtctccaagtgaggagcaggcagacagcccaggcggcagggcttccaaccagaaccccagacccagagccccgagcatcctggcgcagacgcctgggatttggcagagatcctgcatccctggacggcgcctccccacggatgcgggaagcacaagtgggaaatgaggctgtccaaggattaagacccagacccccagtgccgtactgttctattcttcctgtctttggag

SEQ ID NO: 154792 - DNA, 209 bp, Homo sapiens
ctgtttgtgtaagtaaggcccttggcatcagcacgatgtaatagaaagaacactgactggactgggcctggtggctgatgcctgtaatcccagcattttgggaggctgaggtgggaggatcacttgagcccaggaggttgaggctgcagtgagccgtgagtacaacactgcactccagactgggtgacagagcaagaccatcctgtctc

SEQ ID NO: 154793 - DNA, 269 bp, Homo sapiens
catcggctgagcagtaaatcagaattttgtcccgaatgttactcacctgttagtcgcagccctccaacacaggttcgctgtggaaatcactgccattttacccatcttcttgagcatgaaaaaaacccccatcttcccagaataacgatcccactcccaatttagcaagcagccaatttctagacaatttgactaatgacaaaaaaatcagtgtttatgacatcatctcccagcttttcactatttccttttcaccttgaaaagctaat

SEQ ID NO: 154794 - DNA, 485 bp, Homo sapiens
gtggggtgtcaaaatatctttctagggtccataaatttaagttctaaaaatctgacatgtgaaactagaaacttctgctccagacccacaaagctttactattttcctccagacatcattactagatcaaacattacggtttcgcgaacagttttaagtttaggtgtatggggcccctctgtaccattttataggtcaataccatttatttctccatggaatatctttggaaaacacaaaatgaaagtggacctagaaagacaattcaaacaatggaattgaaaaagaaatcttgtggccgggcgcggtagttcatgcctgtaatcccagcactttgggaggctgaggcgggcggatcacctgaggtcaggagtttgagaccagcctggccaacatggtgaaaccctgtctctactaaaaatacaaaaattagccaggcatggtggtgggcgcctgtaatcccagctactcgggagactgaagca

SEQ ID NO: 154795 - DNA, 669 bp, Homo sapiens
atctttaggttaaggtcgccaacttaacccaatttagcctgtgactttcttggtttttgctctgcaagcttctgtcccaggaaaccccacagtactggtcacactggggaggctggcttgcctgcctaccacctaaatatcagccaccatcatattgagctcttactatacctcagctgggaacttgagctcaaggctttggacttgagtataactttgctcctggaagcaaactgtctggctatttctattccttgaccctaaatcaaaaaatggcaaataactctcaggccatggagcttcccttgggtgttacagttacagattttcaagtcaaggatatgttcaggacctaattagctcatccagacacttagaatctagattcatgctggaagggaagaaaatgtctccctcctcacctttgctggacacaaggatgtgtcatctttcatctgtttcttgccattgtcattaccatcaacattgacagagataacacatagaaccttgaattatggaatccttattaagttagatactcatctcttctagaaaataaaatgtttattagtaaaagcagaatcctcaggaaaacagtatttataagccctagacacatggccctggaaaagtcacttaacttctctgaacctctttttcctatga

SEQ ID NO: 154796 - DNA, 487 bp, Homo sapiens
tggtagtggtggtggggggaacgtgggtgtgtatcttggaaagtttccttttcccagaactatctgctggaccccctgggtaagaggggtgttccaaagttctggcaacagcatcccctggcttcaaatcttccccaggcaggaagcgtcttcactgatgccccaccatggagaggggccatgggcaggaaggatggaagcgcagaggggaggacaggatgaggagggcatttgtagagaggtttgaagttgaatcagaacacacaaaaaccctcaacccattcaaagctaccggtgagtttcactagatcatttaaagtggggggaaaaagcaatggtacaggaaggaactcaaaacagataaaggtggctcccagtggtccccacctcctgacactcaaactcttgtttagtcccttgccacatcacggttagtctgtgaccaatggaatatggcagaagggatggtatgttgctttgagaccag

SEQ ID NO: 154797 - DNA, 352 bp, Homo sapiens
tcagtgtatcctgctttaggtggactttgtctttatgttcataattttaccatcatttatattatggcagaaatatcctaaaaagcatgtgttagctttgtcttctgttctttttcttttttttgagacggagtttcacttgtcacccaggctggagtgcagtggtgcgatctcatctcactgcaacctccgcctcccaggttcaagtgattctcctgcctcagcctcccaagtagctgcaattacagcactcaccaccatgctcagctaatttttgtatttttagtagaaatgggatttcacaattttggccaggctggtctcaaactcctgacctcaggtgatccacctg

SEQ ID NO: 154798 - DNA, 332 bp, Homo sapiens
cgcctccgggcccgcgaggttttgacgaccagcgggcgccccctcgggaaccacatttgtttcccgctggtctcgagcgtccagagcgcgaagcggcggagcacggcgaacctacgattcgtgatgcttggcctaatcctctgcccttcatgggtgcgggcaggaacggagtagcggctgatgtcccctccctaatcccaaagccccacaaaagccaaaatacacacgcaaactctcaccagcgcatctcacaaacacaaaaactaaagacaacacatgaaaatataacccgatcccccaccaaaacgtacagttcaaaaaaataaaattca

SEQ ID NO: 154799 - DNA, 184 bp, Homo sapiens
attggatgatgctcagccacaatggtggtagagtgtggatcttctctactcagtccactgattcaaatgccactcttttccataaacatcctcacggatgcacccagaaataatgctttagaaataatgctttatcagctatctggatatctcttaacctggtcaagctgatacctaaaattaa

SEQ ID NO: 154800 - DNA, 156 bp, Homo sapiens
acagttgtgaaggaaaataacctcagacctacttttttcctgaagctttttgccagacgtatgcatatatggagtttgtataaacataaccaggggacccattctgtatgtttatccaccaatcttatacctgtatctatatgtattaaaaaagcc

SEQ ID NO: 154801 - DNA, 687 bp, Homo sapiens
ggctgtgttccatccctgcccccgctgttaaccatcacctgttgattccgctggattttcatttactactggagaagggaacagaaaacagaaacacatgtaggttttgaatttaaaaactttttttcctttttttttgagacggaggttcgctcttgtcttccaggctggagcgcaatggcgtgatctcggctcacagcaacctccagccgaggcgggtggatcacttgaggtcaggagtttgtgaccaccctggccaacatggtgaaacctcttctctactaaaaataaaaaattaggcgggtgtggtggcgggtgcctgtaatcccagctactcgggaagctgaggcaggaaaaacatttttaaaaaacttgtgatggcagagtcaaaacagaacaagcctcggaagatgtgcacatttaactgtccttcagtattctgtgtaaaaataccactcacagttcacgttttcacttttgaaaggctcgaagtgagggaaatcaaccatcataatgaaagaacaaaagaatgattaaaagaaaaggtgaataggattcatgaaaacgctttgaggccgggcacagtagctcatacctgtaatcccagcactttgggaggcagaggcaggcagatcacttgagatcaggagttcgagaccagcctggccaacatggtgaaaccccatc

SEQ ID NO: 154802 - DNA, 218 bp, Homo sapiens
catacagcctattgaaccttattgcatcattccatgcctccaagtcttcaccaggaaatactaatttcttgcaatttgcaacatggagctcgctaattcctatctaattttccagatatgatggctctggtaagttctattttatgcagaaaatcaatattaccttttggtcaagtctttaatataattattttccaaatagtcacttttctagctag

SEQ ID NO: 154803 - DNA, 327 bp, Homo sapiens
ccctgaactcgctgatcgctcagctaccgaaatgtctggcagaggctccgtcttggcttcactgtctcccctcagaaaagccagtctgagatcctcctcaagtcttggaccaaaggaaagacagacaggtgctgcggccgacatccctcagcctgcagtcaggcaccagggccccgagcctctcctcgtggtgaagccgacacacagcagccgtgagggtggctgccgagaagttccccaggctgcctccaaaacccacggcctgctccaggccgtcagaccccaggcacaagacaaacgtcctgcggtgacctgacagcccggccc

SEQ ID NO: 154804 - DNA, 712 bp, Homo sapiens
agcgtcagctgactcacttctcaaaaacggagctccccgagtgagcaattcctgtcccttttaagagcttacaactctaagggggtccgcgtgagagggtcgtgattgattgagcaagcagggggtacgtgactgattaccggtgcaccggtaatcagaacggaacagaacaggacagggattttcacaatgcttttccatacaatgtctggaatctatagataatataaccggttaggtcaggaggggtcgatctttaattaccaggcctggaatgcatcgccgggctgtctgactactgatttcacttctgtctttcttttaactcctacattttctttgaggcagaaattgggcataagacaatatgaggggtggtctgctcccttatttagggatattgagtttcccaaaccagttacttgttgattgtataagacacaactcacatttatttgtccaaaacttccactcttttttttttaaaacctcttgcattttccgatgctgtcactcttgaggtttcctgaaatcccgtcagttctaggaattcatgacacttctctcctcccaattgtgggatgtggttacacaatcatggtcccttcagtctccatctcaaaccggaagctttacccctgtcagcctgtagaatgtcttgggtaagaatgaataccctggttgggcgcggtggctcacgcctgtaatccca

SEQ ID NO: 154805 - DNA, 440 bp, Homo sapiens
ttgaacactcagcagggtatgaatggttgaagtatggcatctgggattggcccagacttagctattgttacaggcacatactcctaagttttcgatcttgtctacctattaagctaggttgcagttcatccacaaaaacttaaatatagaagtatagagccctcaggccatatttagttcactttaacacactcttctgtgcattctgaattataatcctcatttcttctcattcccaagtaaactcaacatatttagagataattttctctacttttttttttaggttgacagtttcaaagcagtttgcagggatttctctttgtctttaaaaactcccttttgtcctgattttcctcaggtgggctatgactttcgtagatgctgagtggattaaaacaaagagtttttcacattatactctcagaacacactttttt

SEQ ID NO: 154806 - DNA, 184 bp, Homo sapiens
taataattagctctagactgaacattgctccagacctaacaaatcataaaagaaagaccagaatggatcaaactgtttgcaagtaacttaattgcatttcagaacaaagctcaagaaaatatgcagtaataaaaagaaattcatcccttagtaaggtaaaatgcacaatgtatgaaatctaatc

SEQ ID NO: 154807 - DNA, 805 bp, Homo sapiens
acaaagaagaagatttctaaaccatgccactggtaagatttttaaaaattactataattgacttaaaaactactttgatccatcgttggctgaaaaaaaaaaaaagaaaaaccaccaacttagtataaggtcaaatttataataatgcagaattgtatgttttctgtactctctattagggtctgcaaatagtaagcacggataatttatacaattctttggggttttatttaggagacaaaccatgtgggagacaatgcgcaacactcacagaagactggggcttccctctgcaactcaactctgccactagctggtgatgtgatttccagaatgatctttgtgtcttggttgcctctactgtaaaatgaatgagctacctctcagatctcattcagatgcaataccttacgactcggagcatacacttagttttaaaatctgagatttaaagttatcatggcataatttgcagagtttgtgtaaagggccttttaacagattgagaggttgggggtggggataagatatagttcaatcactgaacaccaagcaaggaactaggctaagaatactgagggaaaagtcaagacttatttcctcaaagagggaatctcttccctaaactaccaaacaggtatcttgtttattattttcgtctacttggcggggaggttgttttgccactcgtttcacagtatctctggagcccacagtggctgttcctattttgactaatcaaacccttctttgaccaacatacacaagattataaagaaagaaatttaaaagaccacaggtgctt

SEQ ID NO: 154808 - DNA, 108 bp, Homo sapiens
tgggagaggaaagccagggcccagcacgcacctcttagtgtgagaccacgtggggggctttaggtgtgcgggctccttaatctgcccaacaagcccaagtggggttca

SEQ ID NO: 154809 - DNA, 176 bp, Homo sapiens
tggcagtgacaagagtaatttggggagagaacatactgaagatggaggagccactgccagcctgtatttctgagtggctgcgtggaacagaggggtccctcctcccaccctggatggttaaagaaacaaagacagcaacttcttgcttataggccagcggttttcaaaatgtggtc

SEQ ID NO: 154810 - DNA, 298 bp, Homo sapiens
gtgttattgcttccagcatctctaggtctgcaacagcaagagttaagttttgctcagagaatgaaggaaaaataacacagactgggcagccagatttgcgagtctgggcttttcctgacaaccagtgcagactatagctccatctgacatggaaccggcgtattcacaagcattgctagatctgtgatctagttatgaaaacaccagaaatcggctttgttttcagggtgaaaaaaatgcaaagtcatacagattcttatttcctaatcatgataaactccactgtatggtatattaa

SEQ ID NO: 154811 - DNA, 374 bp, Homo sapiens
cacttgaacctggtaggtggaggttgcagtgagccaagatcacaccagtgcactccagcctgggtgacagagtgagactccatctcagaaaaaaaagaaaaaagaaaaagaattaagcaaattgggtctagtattttagagtagaagaaaagaaaccaaatggggaaacgactgagaagcaccatttttcagagtttggggatgagtcctagtacttgtcctcagggtgttcaacagtattgtgtgggaaacagacaactagatcattgataatacgttgtaaaaatttgaccatagagccaccgcgtgcagcctgttctccatcttttgagatagttatatttcaaggcctttctcaaatgttacttttctcc

SEQ ID NO: 154812 - DNA, 246 bp, Homo sapiens
cctaagggctgtgaaagaaaagtacaaggtacaaagagaaacgtcaatagtcctgaaaggttgactgcatcaagaacatgtccatggagaccaggctgatggagtttttgtttggattgttttgggtggcagggggtaggggtaagggcacatggagcgttttgtttgaggtacttgaaagggagatgtcaagtaggcaactgaatatccaaatcaagagagtctgtagtggagtggtgactcaag

SEQ ID NO: 154813 - DNA, 349 bp, Homo sapiens
gcgcacccttttgtcatataagcgacaacacagggagaaagctttgggcaaagggaacgatgtgtgctagtctttgggatgagtgaacaagctgaattccataaaggaaacatttttggtatggctgaagtgtgaccttcccaacacatttagtcctgcgctgcctcacgttggtcaagtggttgatttcaattacgcttttcgcgagtatcttccagatcactgcctccctcacagatcctccaggatttgtagaatcccagctgagaatagtcaagggctttggtccaaacaaatcaagctaatttcccaactccacagttgagtgtctacaccgccttgggcagtg

SEQ ID NO: 154814 - DNA, 396 bp, Homo sapiens
aggccccatcttactggacttagcagcagcatttcacatagtcttttcctccttcttccttgaaacactttttcacttggcttctagaccacgccccatcttgttcttgcactgtttctggctattccttctcagtctcctttgctcgttcctcatctcttgatctctgaagatggatgtgcctcagggcccggtccttaaacctcttctctctgcatgcccactccctggtgatctcatgcagtcttagggctttaaagcatcaatatgcttatgactctctaatctcatctgtagctctgaccccttccagaactccagattcatccccactgggatgtctaacagaaactcagatttgccatgtccaaaatcgagttattgattctcccctcc

SEQ ID NO: 154815 - DNA, 381 bp, Homo sapiens
cagggtgctttccattaggaactgcctaataagactaggaaaaatctttattgctaagaggacctagcagtgtatatattcagggtagagaagtataatgaagaacaacggtccccttgtattctgatagcatatggcatttatgcaggtttctgacagttagatgtgattgttaaattacagtcttgaaaaatgttatattctccccctgtgtttacaggcagaaattgatactaccttgagaagagtcacatggtattttcccaaaagagccaagataaagaaccttcaattctacataatgaggcacatttctaatatgccttttgttctaagtggacaacatatgaaagcagcagtgggatttttttttcagcttct

SEQ ID NO: 154816 - DNA, 484 bp, Homo sapiens
tccccttcccgagagtaaaaacatccatatgcccatcacctgagaaaatcatatgcacaggatgcacccacctcacctttctctgcctcatcatgtcagaaaaagtaccccaccttttgtcacaaggcaaacctgagataaaagatttagatggcctgtaattccagcacttggggagaccaatgcaggcagattatttgagtctaagagttcaaaagaagcctaagcaacttagggaaactgcatctctcaaacaaatacaaaccattagcctagcatggtggtgtggtggcacatgcctgtagtcccagccactcagggtggggagcactgaggtgggaggatcacctgagctggaaggttgtggctgcagtgagccgtgatcacgtcactgcactccagccacggtaacagatatttttaaaaggatcttctctgttaaaaataatcaaataaacaggtggccatgaggctagtgtggctg

SEQ ID NO: 154817 - DNA, 545 bp, Homo sapiens
actatcaataaccaaactcattaactaatgagatgatctggccaggccctgcattctcagaggtggttttgggggtcagaagggtttgcgtgttggggaaagaggcttggggtgggaagagagatgacctccaaggctttgcaaagctagccctgatggagggtgaagcttgggtgtaggactgtggcccttccccttcctgtgtcccaggaagactctgaaacctccctcctcaccctctgctaccttaccccttttggggatctggcattgaagcatctgttgatccactgtctcttcgccactccttgtcgtaacacgagaagtgattcctagctctgaggtgtccatgcagagaccacagacacatgcagtgactcaaattggttctgagatgggccagtgtaaggtttcccattaggtagatttcccacagcttggcttaacgtcctggtggcttataagtgagcatgcctagaactgcttgtccctatttttgactcggctgcatacgattagggtttgagtattcatgtggcctgctc

SEQ ID NO: 154818 - DNA, 332 bp, Homo sapiens
taaaatattatgacaaccagcaaaatgtggttggttctagacactgaaaatagctaaaaaatacaagctaaaattgagtgagaaaaatatttaacttccagtcttagtttaaatgattaattctttatgtacaacatatctggtttgaatacaattcataagaaaacataaaagtgtacttctgtattaactaaatgaagtccatagaatagtggatgatggataaagcaaggggagattcagatttcatttataaaaaaaataatggctagactatgatgactagcaatccatgtaagatctgtaacatagcttccaactcatatgccatc

SEQ ID NO: 154819 - DNA, 435 bp, Homo sapiens
gcagaagagccttctgggtagagaggctgcagtgcaaaggctctgaggccagaacatggcttaggtattcaaggaacagataggggagctcctagagttttgagcaaaggagtgacacaaacttttatcaggattcttttaccagtgctgtcccaagacttgggcctggacaagattggtaaagatgacaggtgttaaatgtaggtgggtgagagaatcctatcagcaggtgagggaatccaggaggaaattgtttcaggtggggaggagagaaagtaatgaatctagttttaaaaatgtagaactggagatgaaggtggaacatcctagtggagaggctcagatgagggttgacagaattttagatttgaaagatcatctggtctatcccttcattcaagaaatatgagcctgcactgcacctctaatcttacc

SEQ ID NO: 154820 - DNA, 450 bp, Homo sapiens
aggacgtacatgaattggactgggcgtggttggacgtgtgtcgagtctgtgatagcctctactgatatcactgtgcagaaggctctcagctttgttttgctggctgtttttctaattcagcagggaatactcatcagtggcagttcaatgcgcgttaatgactctgggattgcaggcatcactctggacaaagaaatgattattgtgcggtcaaaagaagttcaaagacaagaagggaatttcagttttttccttagagatccacttcaagagcatataaataagccaaatgttaaaaaccacagtctgaaagctgacttcaaagtcacaactctctaattaatgaactgcgagcttcagtttggacaagttgtggtttgatgcgcccataaatcaacatgacaggcctgttcacagtctcagacagtgcttgtcattgagtcacatcag

SEQ ID NO: 154821 - DNA, 512 bp, Homo sapiens
cacacgaggatcccggtgttcctttgtctttcctttagactatcattgaatcacattttctcagtcttgttgtcaaaggatcatcttcctgtctgttctaacaactgaactgtacaaacttgagttgcacaacattaaggtttatacacctttatcacttgggttggaattcatttagtcaacataaatacctcaatagaataggtttttattgagcactcactaagtgtcgggcactgacagttctagatgttgcagatacagcagtgaacagaacagtgccgtcctgcagacagaggaagaaaataaatgaataaatggatattatggtaagtaagtcgtgctaagaagaaacacagagcaggaaaaggagtgaggaagtgccgaaggctggtgaaatggggagctcctgctaagacaattttccagcagacacgtgagggctgtgggggagaaagctctgtgtgtaactgggaaagagcacgatacagacaaagggaaacaaatgccaa

SEQ ID NO: 154822 - DNA, 693 bp, Homo sapiens
gggtaggcgcggggcggtcggctgcggtggcggcgtttggatgattgtctctcggcggcggagtcggtaacactgtggtgacactatctctgtcatgcatcaaacttataaaattggctgggcatggtggtgcatgcctgtaatcccagctacttggaaggctgaggctggagaatcacttgaatccaggagacggaggttgcagtgagcagagattgcaccactgcactccagactgggcaacacggcaagactccgtctccatagaaacaaaaaaacaaaacttacatatgtgtataagcctgtgtcaggattctgtacttttccttttatctacagtttgcatatttatatttcttcagtaatatatgctgtttcaagtactacagctttatattaagccttattgtctggtagaacaaaactttccacatctaaaaagttttcttaactattatttttctcattcatttgaattttagagtatgcttatcaagctctatgaaaaattacattgtagttggctgggattttgttgactttgcatgttaatttagaaaaaactgacatcttgaaggagtgttttcccatacaaaatgtatttatatctgttatgtctttaggcagagtttctatttatccacactaaggtcttgtacattttttattggctttatttctgagtactttata

SEQ ID NO: 154823 - DNA, 405 bp, Homo sapiens
aaaaaaacaaaagcaaaagcaaaaaaaaaccccagctcctgacagaccccagcaacttatagatgaacctgagtgaacttttctcattaccatgctaaagtctccacccggggagtagctatagcttcattaccataacacatgacttatgtgctggcataatgactcactgcgtctgtaccactgggacccctcctatacatgggatgatgtagcctctcgcctctccattgctccataaaattctcctattactttcccttggagagatgctgctttggaaaatactcccagtgtcctccttacttacaccaagtaataaaactcctattgatctaaacttgcattctcacaaacagtcgtttgttactcgccaggtgaatgaacctcattttttttttttag

SEQ ID NO: 154824 - DNA, 303 bp, Homo sapiens
gatgctgctaaagtgattgcatcagcaggctctgaggggctgagactgaagcctacctccaccacatccaacttcaggatatgtagatgatcccttggccttcattgtctatgaaaaggggtggtaccactcacactccaacatcaatgaagacatcacttacagcaaagcaagtaaactacagagcacacacacgtgtacaaacgtgctcgtgtgtggtgatatggactcagagttgcacatacacagcacaaggtgatatccacactacctgagcacctgacgccagcacactactttcta

SEQ ID NO: 154825 - DNA, 437 bp, Homo sapiens
tttccctctactggggtgaggtagaatatgccctgtctctctagaatgtagaaacaatgtttttccagcctctcagccccaagcccttagtgctaggctatcctttgccttgattctgaccccttcccattatctctttaccccagacctttttcaatagactggctcagagtcataattaaggagtaaaagccgggaataagagaaagaaaataaaatccacccctccccaaaaatgcatattcaggctgagtttaaaaagggaccgtaaatcactaggtgtttcctgctacatataataaatatgctgtcctgctccttcaacagctgttgttcccatgctctaattctgaggtctgaaaagattggggctagggaatggttagacagacaatgagcctttcctccccaaacaaaaattccccaatctggtatgc

SEQ ID NO: 154826 - DNA, 496 bp, Homo sapiens
gcctcagcctcccgagtagttgggactacaggtgcacaccaccacgcctggctaatttttgtatttttagtagagatggggtttcatcatgttggccaggctggtcttgaattcctggccccaagtgatctgcctgccttagcctcccaaagtgctgggatttcaggtgtgagccaccgccctggccagactgtaggaatctaataatcaaataattgtaatgggaaggagagtggagtagaagcccatttctacttactctttctctgaagttttaactgtttgacaatttctggaagtcacctattacaaactcagtatttctataaacaaatagtctgatgcatcagtttataaacaccaacacatttatttactatgtgttatcagaaaagcctcacttatcttccttgtgttctttgactaggtgagtacttaaccatttattgggctcctactctgtgctaagcacttaaaatatttcacctctcacagg

SEQ ID NO: 154827 - DNA, 301 bp, Homo sapiens
caaactacccctgccactaacatccctaagaaatagagtagttgtaaaattggaacagaacatgtcaactgtagtagctacctcaaaattcccccttccctagaaggagacgagcgttttccagaaaaggagacctgcatccctcccgtgggctagaagagacaagatgacactctgagggacagcagcaggtggccagggcctgagacatgggctagaagagacaagatgacactctgagggacagcagcaggtggccagggcctgagagctcaggggtgtaggtatgaacaacagtgca

SEQ ID NO: 154828 - DNA, 447 bp, Homo sapiens
agtatttgttagaataagctattttttccccactaatggtaacaatttaatattgggcaatcacatttcagtctaaaaaaattagcagcagtgctggattttggtctaatatcatgggacttttcccagtctacatgtaaatcatcccacctttgttgcagcagtggagaagggcttgtcactaggtcttctaatggactgctagagtttaattatatgttgttttatggtgtctggcaatgtgattcccctgcctgacatagtttatgagctttttaaaaataaagatcatgtgactttgtgttctcatttgctaaaaagcattcattctttgggttcttgtagatcctattgctgtagtgaacttggacctggtgttgttattttgtaaaaatgtcctcaaaatcaaatgtcactgaatataaagacagttctaattaattaatg

SEQ ID NO: 154829 - DNA, 352 bp, Homo sapiens
acacaggacaggaggcagggagaaaaacacacaaggaaactgagactcaggcaatgccacagacatacaaaaaagcagcagagccaagaccgtagtgaaagaaagaaccacactaagagacaaaaaagaaaacaccatgagaagcaaacaaaagaatggaaaaagggcaaagactacagagtaagcaaaaggggtcagcaaaacaaaagaatacaaagaaagagagagaaaagaacaggaggaaaccaaactgaggcagatgagaggcagagatggaaaataaataaggggttgaggagcagaatgtagtggacgagcaggcaagaaagagtaatactcaccaaagagacag

SEQ ID NO: 154830 - DNA, 349 bp, Homo sapiens
ggtgtgctatatcctgctgatggcaaaatacaacctaaatgaggcacaggcccaatggctgagagacagtacttcaacatgagaactgaataaggctgcaattagcaagaaaccaaactacctgacccccagaggcttctaactagctagtggtttttctgcttccagtccgtaggagtccagaagcaacatgcttcacaggccaagcacagagccaggggcttcgactctaagttctaattgagatctgctgctcatgtgccctggtggctaccttagaaccatagtcataggaattagagagcagaacttccagaagaggcctgcagataaatgtggcaggtggaca

SEQ ID NO: 154831 - DNA, 330 bp, Homo sapiens
gttcagccgcgtccacacgacccctccagcagcggccaccaggacccccgagagccctgccgcgtctacacggatcaccccctccggggcccagctgcgtcgacaagggctacccctctcaaaagtccagccacctggactcgggtcaccccccaggaaccccctgggagccgcatccacgcggaccccgaccccagcccgcgtccacacgggtcccccgacccccagcctcgcctcctacctccaacgcaaagcagagacatgtctccgagctcgcaggtgggccggaggcggccgggccggctctgtcgggtcgggctcagcggccgc

SEQ ID NO: 154832 - DNA, 340 bp, Homo sapiens
gtcccccatcccccggtggagccagtgaccctccctcctggcatggggaacaggtctgtccacacgtgggtcacacacgccgttccctcgggcaggacctggtcggcctgatgagggcagccagtgcctgaggaggtaaatggccgagtggaaaagttcggcaggagggagtgagcagaagaagccggagccctcgggcacaggagtgtcctccccggcctccctccctcggctgggcgcccccgcatcctgcgccccgcccaggggaggatggaagaaggcagccccaccgcggactccgctccgcccccgcctccttcctcctccgacccggggctgc

SEQ ID NO: 154833 - DNA, 436 bp, Homo sapiens
agacccctgccagggagcagagaaaagatgcacccaccacggacgccacgaccacacacactctccctggccgctgcacacaaatacaaaccctaactggcaagagcagagggaccaggaaactgtccctagagtcaggaaccccatgtgctcagacagcagtgtaagcaagatttctccacccactggatgccaggagagtcctcctagggggcccctacaccgagactctgcccccctcttaggactgtccctgagttggaagccagcccacttggaagccccctgccctcccaagtggaacactggcacaggaagcaggccctgtccccaccaccttctgcaagctgggccccatcatgctacagaaacggggagacctggtctcagggatggcgctttcctgacatctcttgttaccccctcgctcaccagg

SEQ ID NO: 154834 - DNA, 224 bp, Homo sapiens
ctgaggtgggaggatcgcttgaggccaggagttcgaggctgcagtgagccaagactgtgccactgcactctagcctgggggacagaacgagatcccgtctcaaaaagaaacaacagtgtaacagacaaacatgtacccttcaccttgattcatcacttgttgacagtgggctgcatttgtctgctctctcattatacccgcacacacacacagttttatcttct

SEQ ID NO: 154835 - DNA, 335 bp, Homo sapiens
ctgtaaagcctgcagaactgtgagccaattaaacctcttttctttataaattacccagtcccaagtatttcttcatagcaatgcaagaacagcacaatataggagataagaatacctccctcaaagggatttttgtaagtaaatgttaagtatgtaaaatgcttcacagtatctgaaaggagtaagcagaatgtatttgctgttagttacatcatttcttcccagcagtaactgtgattaaaacttcctatttgcctctttttgtcagtgctttgatgactggccttggggagggtctgagaactaaatgaacagggacaaatctctatcctaga

SEQ ID NO: 154836 - DNA, 157 bp, Homo sapiens
tgattttagccattgtaatagatgtgaagtggtatctaattttttttgatttttaaaaatttctctagtgattgttgatgtgtttttacttttctttctttctttcttttttttttttttgagacagggtctcaccctgtcgcccaggctggagtgt

SEQ ID NO: 154837 - DNA, 391 bp, Homo sapiens
agaggccatgctttgatgactagttggataatagaaggtaaaactaaagtgatagacttactgaagactgatttgaaatatagagcaagtatccagaaatgatcaaagttctttttcacgattgtactttgctaagctcctgtgtctctggagctcagagtgttgccacagcttggtatatatgggctaagcagggccagtctctgctctaaggagcattcactatgtcaccaccacttgacattggaaaagcactttcctcttgtccaatcacttggccagtgtgaactctgtgtgtcttaactctttaagaggcaagtcagtcaggaagtagcccccttgccaaagcaggaattttacttacagcatggattctaagcaggccagtgat

SEQ ID NO: 154838 - DNA, 666 bp, Homo sapiens
taaatcagagctgttgaaggcttgagttcagcttttttttctgttttttaaatccagtttcttataacataacctaaggcctattttcatcacaccactcacgtctttatttgtgcttatggaatgctgataatctgaagcttttttttaaaggttaaaaaaggtttaagagcatttttaaaaggttaaaaaaggatacgtatcatgaacaaagtttgtatttgttttttaaataaaaccttagtgtgaaaaacaaaacaaaaaagcaacacgaaaacaacagcaggagcaaactgaagattccctacctgagacagagaagaactaaaatatatagcagcacatttcaagatactatatggtagaagatctcccttagattaatgtggcgtttagttctttgttgtatggacaggaatgcagcacatttttattacaaaaataaggagctgttcgggttgtactttttagtctcaaaattggaaaggtaaaaccaataaagatgatagagcataaaataaaactctgtgctaaatagagcttacattctaatttacaagtttactgtggaaacatttattcttgataaaggagacacctggctctacttttccaactgcatgggcaagaactactaaaagaagagagaaaagaaaggagaaaaga

SEQ ID NO: 154839 - DNA, 947 bp, Homo sapiens
ccactcctgctcaggctccatcttcttgtcccaatgggagaagtttttttacattctggagaccttcaaccttatccgacacctcctcctcgtgctgttcctagtcttcctagactatgctgtcttctgggtgcttgacctggcccggcaccagctgcagggggagattgtggcccgcagtcctgtgttggtgtctctaaccgtggaaggtactggctacgctgggaatatttatcgtgacctggtgtcagcatttgatgtcctgcagcaaggcaacatcagtattttgtcccggcgttgtctccttcgtccctcggagcctgacagcactggctacatagtcattggtgcccctgcctaggtccatttgtcagccacttttggcttgcatcaggcctactgcctgggctgtgggcagccccaggatgagggagacatggagaacactgtgtcctgcagtacccccggctgccaaggtctctactgcctcacttgcttccgcctcctggacaatacctgctccgtgtgtgcatctcccctctcctaccagggggacctggacctggagctggactccagcgatgaggagggccctcagctatggctggctgcagctcaaaggaaggaccctgagcaggcatggttattgcagcaacagctccaagaagtgctcggcaggagcctctcaatggagtccacttccgagtccagtgacctggatgaggagaaggggcctcagcagaggaagcacgggcagcagcccttacctgaagcccatcagcctgtcagcattctcaccagccctgagccccacagaccacctgagacatcctccgccactaaaggagcccccactccagcttcagaaccctcagtccctctctcacctccctctcttcctgatccttcccacccaccccccaaataaaccaaaagtggacacaagt

SEQ ID NO: 154840 - DNA, 266 bp, Homo sapiens
accgcgcccggccccctattgggtctttagtaggatggatttggttcctcttggtgccccagagagcgaggttatgaattgtcagggctggctggtttagcttagaggaaactaccagtgcctgcacttaagtcttggagctctccttagcctgaatctcaggcctggtaagaggaacaggaactgagtctgctgatttgtgaattgagaatctgcatttgtgcagccctcaagacagccgcgtccagggttcttgagaactggca

SEQ ID NO: 154841 - DNA, 266 bp, Homo sapiens
agatcttagtgttgtggattcttagagtgtttaaatttgattttcaagacttgctcttaaggaaaacaacatgctttaagcttatggtttgtgagtgctgcctgggcatatgtgactgcaacatgtgttaactgttagtaatagcctctgtaggtgttggagtggaccccatcagctttatttatatagctcacgtttagaacaagaacctatagcttcgaattctctgtgtcatttgttgtttttgaaaggaagcataggtgtaa

SEQ ID NO: 154842 - DNA, 495 bp, Homo sapiens
agtgatagaggtggagttctctgctgatccattcagcctgagcagttctcacaccactggctctggggtgctgcttggaccctgtgtctctcttcccagaggggaccctcgggagagcctggccttccccagacaggcctgtggttgttgtctccagttcctgcctgagcctcagtcttagagactcagcccgtcaggatggccctatactctccatcgttctctctgcttggatgatttctcagcttcaccaggctcctcccgcttgctctgaggtggcccgtgccctcgcagctttctgcagaggtgtcactgtactctggcacctgcctgctgatgtagatagcaggggagctgttttctcccttgcgggggtaggagcggtcttagcctcctggtgcgctgtccagggaatgcctgagcacccggctaatgcctggaccaacttctgcatgttcccatgaggaagaccacagggtcggctgcaggtgagca

SEQ ID NO: 154843 - DNA, 356 bp, Homo sapiens
ccacattgaaccccacgtcggggtcactactcaaggcagtggatggaggcccttcacatttctgggcctcagccacagctgcagtaggtgcccagaggtcagaagtgagatgtaaccagagatcccagacctcccggaccagatcgtgccgcaaacgaaatgccagctcgagctcccacagctctacggaaggcctcccggaactaaagcggaggagggtgtcagcctcatcccgctgccagctggccctcagttcctcaaagacagtgagtgaggacggacctcaggctgtctcttcgggtcacacccggtgtgaaaaggcggcagatacagcaccagggcagacactcaccccc

SEQ ID NO: 154844 - DNA, 433 bp, Homo sapiens
tgtcccatctaataaggaatatcaataaagaaataaaaattattttaaaaaacaaaaaattgtggagttgaaaagaacaataactgaaatgaaaagttcactcaggggcccagcagtaaattggaacagtcagaagaaagaaccagcagacttgaagttatgtcaatagagattatacaacctgaaaaacagagagggaaaaataattaagaaaaatgaatagaagcttgggacatccttaatgagagtaccagaggagatgtgagagagaaagaagcagaaaaaaagttccaagcagaaaaaatgtccaagaaataatagctgaaaagctcccaaatttgctgaaaaatgttaacctacacattcaagaagcccaaaaagctctacacaaagagacacacctagacacacacacctggacacacacacctgg

SEQ ID NO: 154845 - DNA, 564 bp, Homo sapiens
taagtcagttctttcccctctccaagtttagctgttatcatcctaggattggcacatgctaaactgacctggaaagcaaacccatgactgggggagtacacacaataggcaccatgcccaggtttgcttctaacaattataagaaacccaagccagctaaaggagcagtgtgctgatctagggctgtagggcaaaaaccactctggcagccaccctgcccctccatctccctctctgccagacagtgggttgaacacacatgtacacctgaggaggagggtctgacgagggctgcctcagatcagaggcagcaggactagctctgtatgttcgacctcatgtctggcccatcttgagtcccaggctcatacaaaatcacctttgttcagatacagattcaatcagtatttaatgagccaagcactacttgaagcatttgaaaattccttctttcacataagccccacaataacactgcaaggtagttatcaagtccctacgttctagatagaaacaagattccgagaggttaagcgactttccgtatggagctaccgagaacta

SEQ ID NO: 154846 - DNA, 619 bp, Homo sapiens
ctatgtctcgatcgttactcattcaagtgtcctgcccttcaggggaccctattaactatatcctccggctcttaatgaggcacgggggaatttacaacatttaacccaaatactttcatccaaacatatttattcaattattttggcttccatcaaagcaaaaatggcacgggacaaagttaagcagtcaagcaaagactttatcaaggctatggtaataggatagagagaccagaactcagtctgagctccactctgtggaaacaaagggtgagagggtttttaagttctgtggtgagctagaggaaaagtatgggaagatgtggagggaagtcatagaccaatggtgtttgctaatggactttatctgaaagaaaaatacagttctcatatctttatgacgaggaagtagttttgcaactgggagcaaggcattcactgaagttaggctcctaccttctgacacagaaggggaaatgtgctaatatcttccttgatgattacatttcaaagtttgagatataactcttttaaaaagcctcctgccatttttaaaacctaagctccactaaaaaccctatgctccactaaaaggcaaatcagctcctcccctatgcca

SEQ ID NO: 154847 - DNA, 561 bp, Homo sapiens
attacttatttagtgtttgtttctcttcaagagagccagagagtttgagcaaacaacataaggcctgtctgtcttgttaaattcacatgcctagcatgtagaaaaggatttgacacatttgaggtgttcagtaaatttatgaaacaaaagaaaacactgtcaagctgggtccaatgtgggtttttcaataaagaaactgcattgtaatccagccacccattttcctttgcttccctgaaagaatcttagccatctgaaaaggaatcattattttagctagcataatcgcgatgcaaaaataattatttcacttattctgtaccccaagtttggaagtcaactacagactctaattgctgcctaaatcccagtagtaaacaaaccagctttgcattttatatgttaccatgaggttctccgggtttgctcctcagagccaaagaaatgttgacacagttgcacaccaagtttcaacatgctgatcatgttaaaatagtgcacaagaaatatttttccactttataaaaagccagactgtttacatgcttaagtggccagaga

SEQ ID NO: 154848 - DNA, 257 bp, Homo sapiens
cagcgtgattccatttgtgatttttcaaaggaagcaatacatcctttcccttgcataggaaatttctggacagatgagcaacaagcaatgaatcatggtaacttgaggaagaggggccagaaggggagatttatactcttcaccttatgcccttctggataatttgaatgtagtcacgaatacatattacatttttaatattgcaaactagttattttcaaaaattaattgtttaataagggatccataaggagttc

SEQ ID NO: 154849 - DNA, 276 bp, Homo sapiens
atcactttcacctttgtttactcctaggcagggacagggttgccctggagccctggcccagccagtgtgttgtggactggcgggttaggctggagagaagtgaagagtgggtggcagtgagaagcctagttgtggttgggacgtgttcttgaggaagatctggatttgaatcccagctctagctttctagttgcatgacgttggataagtgactcagctgaacctcagtcttctcatctgcaaaatgggtagagcaccttgcaaggctgttttgcc

SEQ ID NO: 154850 - DNA, 625 bp, Homo sapiens
agaattttagttgctgatgcagtttctttcattaagtagaaaagtaatgagacccagagacattactgtcacatagttctgtggcacaaccagaatattgatagttccttgacaaaatcacttgagatgcagggtcttgataattagagataactgaggtggcccttttagggaaaagaatataaacaaagccttagggcatatttaggaaatagcaagtagctcactttgattactacagccaaaggtgcatgatgtgggacaatgtaagatcaaactgattttgacaaaatgaaagtttttgaactttaagatccaataatttgcaatttattaattgggtaggtagtgagcgatgactaaaagttcttaagagagtgatatgattggatcagggttttaggacagtgcttctcaaactgtctgtgagggaggaccagtttataaataacttttttccaatctgtttcaaatggacacgtttataaaataaaaatgaatttcaagaaaaatgaagacacaaaatgtaagcctaccttttttattactacattcaacaaacaaaattgctctgtcaaattactgtaaaagtttctaaatacttaaaatttctgtatgtgtcatg

SEQ ID NO: 154851 - DNA, 403 bp, Homo sapiens
aacttcagaaaaggaattccctcacctaaggcaggctaaaaagtcacctaaaaaacaatgacttctatagccttgtctgtagaaaagcctacatttaagtaattgtaactgtaagaaggtttgaatacttgtcacttcaaaaggaataaaagagcctagtaaacagctgtaataaattgagtatttgagaaagatgaacatcatgttatggcagaacaaaacccaacccgtgatcagtttttgaacacatagcaagcaaatcttttacaatcagcaagcaaaggataatctctaaaagaaaacaaaagagcaaatttctccaattatacattttaggattagttgtaagattacagcaagaaagcatatttttataaattttaaaatgattaatgattgattt

SEQ ID NO: 154852 - DNA, 516 bp, Homo sapiens
agctgtcccttgtccatgcccactgcccacgaggccccttagcacaacttccttgccatcattctgaaaaatccaggcacggggcttgtcttgaggtgctctgaaagcttgcagtccccagagtgggtgggttatatagtgaaatgtgagttggcctctccaccaattctatgccatacttggtggcctggggcttgagaaagtgccactcataaacttcatgtatttcttgtcacttctgcctctactccatctcatcaaggtttgagtttattctagggtccaggtggtaaacataccactcaacccgccatcatcctctgcctttttctaggtctgtttcccagccatttcaacttcctccctcctccggggatgaaatagaagcccccaagcagataggcgtatgcaaatactggtgatggaggtagagataggaacagagcaagtgataaaggagggaggtgttcttaatgtaggagcgtctccaccctagctcagcaatctaaggcaagg

SEQ ID NO: 154853 - DNA, 487 bp, Homo sapiens
taacaatgaactacaatatgggaccctggattggatttgggaacagaaaataaggcacattactgggaaatctggtaaaatctaaataagggccagcagtggtggctcacacctataatcccagcaccttggaaggctgaggctggctgatcacctgaggtcaagagtttgagtccagtctggccaacatggtgaaaccccatctctactaaaaaatcaaaattagccgggcgtggtgccgggtgcccgtaatcccagctcatccagaggctgaggcagcagagtcgcttgaacccaggaagtgaagtttgcagtgagctgagatcatgccaccacattccagcctaggaaacaaagacttcgtcaaaaaaaaaaaaaaaaaaaaaaatctaaataaggtctgtagtttacttgacagtattgtactaatgctaatttatgagctttgaccatcataccacagttacgtaagatgttaccattaggg

SEQ ID NO: 154854 - DNA, 283 bp, Homo sapiens
cagggcgagtctatagaggatcccccgaacaggacaagcaagtaaagaagacgtgccaagacaaatgtcacaaaatgaatgacagagttgagagcagtgccctggagttttcaaatggtacagtcggggaggcttgagagtacctagcaaaaagggcatcttgatggtgagggggttctgaagtgggagaggggttggaaagcaaatgatgaagccttgatttcagactcttctctgttactagggccttgggaagccctgttttgctctgagcctcagtttc

SEQ ID NO: 154855 - DNA, 399 bp, Homo sapiens
acagcgttaaatttcccttttcctccaccagatcagagaaggaaaattttacaaattgacttaaatttctcgtcaattcaggtgacgttccctcagattaaaagctgaagatggaatgagagtagctgtgttcaatgctgtgcggcagatgcacacggcgcggctggctgcatgctcctgggcaaacacaactcgttccaggcgccgaatacgccgctcccaccgtgcaggcaaaacagaactaactctcatgtccacatttccttcgcctcacactcatggcctatttttctttcttggagacatgaattcaccttttgtagcatctgctatagcgccttctggaggcaaacaatagcctctaaaataaaaccaggagtaggcttcagtcttgccttg

SEQ ID NO: 154856 - DNA, 570 bp, Homo sapiens
acaagagggaggaaaaggggagaggaggaaccaagaggcctgagtggcagagctgcagtgactcatcaggtctcaggcctgcccttggtaaacctggatggggtgacttcaaagttaattacactacgtgctttcaagatgctgggatgaaagtccttgggaggcataattacttgagaagacattcttcaagggccgtggaggagcccaggttactatctgtaggcatcctttgccccaggtgggcctttcttttgtttgtttttgagatggagtcttgctctgtcacccaggctggagttcagtggcgtaatctcagctgactgcaacctctgcctcctgggttcgaacaattctcctgtctcagccttccaagtagctggaactacaggcgtgtgccaccacgccccgcctaatttttgtatttttagtagagacggggtttcaccatgttgaccaggctggcctctaactcctgacctcaggtgatctgcccgccacggcctcccaaagtgctgggattacagctgtgaggtttgccttcttaaaggggcagtgctcctcccacag

SEQ ID NO: 154857 - DNA, 547 bp, Homo sapiens
aggaggagaagagaccagggacacggtgtggttggctacagaatttatgaataggtaagaaacccgccccctcccactggaacctctctgaaataactatggagacacagcaggaggctagtgcagtaacagatgggagcagaagttactgaaacacactctgtgctaaccagggagttgtgggactggtgcactcacacactgctgggagaaatcagcaccattcactcggaaagctatctggcagtttgtaccaagggtcataaatctgtatttattcctgtttccggagacacatgctgaggaaagaatccaaaaggtggaaaaagcttctaggcatgaagaggtagcatcataacttaagaaactagagccaccgtaaatatccaatgggaaatgtttcattaaatcacccatgttcactttaatgagacagcatgacattttaagagaagagatttcaagactttccagcaacatggaacaatgcacagccccaacatttgagcttaaaaagcaggaatccacattgtttcctcaccaggac

SEQ ID NO: 154858 - DNA, 193 bp, Homo sapiens
tgtgggattacaggtgtgagccaccatgccccactgtttatacattttaaattacatgtttgagtggtccacagatactgcaaaagaaagatggcccacatgcagcagccaattcaggatttcagaggtaaaggtgaggctctaaacatgggttcaggaatcaagtaactctgaaggtgagatcgtaaaggaa

SEQ ID NO: 154859 - DNA, 491 bp, Homo sapiens
tgatccagctatcaccgggcgtcgtttacactgagcagaacagttacaagccaggaaactgtgaatcactgctcgaaatattacaacgaggaacgagcgtgttgggaaggtcactgtgaacagtctcttttcaaagcactctgccttgtgcatttcccacaccccacaaccttctagaaatgccaaagctccaggcaggccacccttcctgtgtgtcctggccacttacctgcacacctgtcctcttgagactgactcagatcctccagaaccttcaaaatggcctgctgctccagcccctatcagctctccttcccctgtgacccttttgtggaaaggagtgcttccctcctgatttcatatttgtgaatctttactcttccctgctgaggtgacagaaagaatcagaatgtctcgagtgcctgtgctgtgtcatcacccacagtggggagagacaggcaggaaaacaagctccgacatccccggtagcc

SEQ ID NO: 154860 - DNA, 180 bp, Homo sapiens
aaagaattaaaatgccacttatcttgcactgctacttactgctactgagctggtcatcctactgaattaattaggttatacattgaactatcttttgagattattacatttcaggccatttattgtctgaaacactttaattttctttttgtacaagagagggcactctagtcctttatt

SEQ ID NO: 154861 - DNA, 198 bp, Homo sapiens
aatttatgcctcttcattttatccaatccctaccactcctctttcaaggccaaactccattcttttctcctccgtatggccttttctgaccacttttctgattgtctgcagagatctttccctaacagaatagatccactggtaagctaacaataacaagttgccttaaaccatctcttgcactattccatcctctga

SEQ ID NO: 154862 - DNA, 607 bp, Homo sapiens
aacagtgccttggacatcatctggcatgtctgtcaatgtcaagatgttaggtagacaaaaatgaaacaattacaagtagagaggtttcataagcataaatccgatgtgagatccagttatgacgtctaaaatgttactgattgatgtctataatgacagtcttgccaaaaaagtaaaagaataagagtgaaccaggagagaaatgtcaagggtgaaggagaagctcaggtatctgaataccaacagtctgagctcatggaagtaagtaaaaattgcttagggcagaaataactgcctcaaccctcagggcattcatagtccctatgcaggtcacctctgacctcaaacagcttccttcattttctgtagtgtatatgacaaatactatcatttttttgtgtcatgacatgaaaaaggttggcaagccctcgctagggtctttaaatgtgaagaaaacaggagattaagggtaaacctttagaagccaaatctatagttttagtaggaaatatagactgatagatccttcaaaggaaacaaaaaggtaggaggaaaaccagaaaaagaatatatcctatacacaaagattgggagagcaggtctggtg

SEQ ID NO: 154863 - DNA, 146 bp, Homo sapiens
tgatccagagtaagataactaacttctccgaatctctgtgctttcatctggagaaatagagaaatcaatatcaatatatcaggattatagagcaagattgcatgtgtaagcccctaaagcaggattgtgcccagtcagccctcagt

SEQ ID NO: 154864 - DNA, 367 bp, Homo sapiens
ctcactggaagtggcgggacagcgtagtctggctcaaaagcacagtcgctttctgtggagatgccacctgttagaaggggatggaacaaaagagctggtgagaaaagatcctgccttccctattaaaatacatcttataggataatccagaacaacaaatattttcactgtgaaaaatcaaagtattttcactacatgcattcatttctacacttactatgtactcaattccaggtctagcactacgaaactgaagatgagtaaactaaggttccttcttataaggtgttcactatctcatgagagatgcaatcatataaggaaatacaagaaaataatttccacataagttgtataaagaaatgat

SEQ ID NO: 154865 - DNA, 279 bp, Homo sapiens
cagtgttgtatttatatccttgaattaacaagtgcaacccaaattaatatttcagtgattttttttcctgtcctcataagaacaaagatcaatagcttgttgagctgttacttatcctgacacaggctttaaatgcatgaagtctcagaaccaactctactccatatccaaccatggttaagaaagccaggggagggaggacacagttccagtgttgtattttttatccttgaattaacaagtgccaacccaaattaatatttcagtgattttttttcc

SEQ ID NO: 154866 - DNA, 607 bp, Homo sapiens
atatatgcaaaaaccctccttcaacagattctccagagagggaaaccttgcactctctcaagaatcccatcagcttcactggacgagttacttgattactcttgctgaatattaacagcatattggttaatagcatttaaaataaaaatattggtcaaaaagagcatctacttctgtgaaatacatgtaatttcccacaaaatgcctaggcatgccccatggaaataatatgttaccatatgtctcagagagagtatgtcaacagttgaaagaaaaacaaaaaacaaaatttttgaaaggggtaaccaaatgaaagttttggtctttcagaaaaacaaaacaaaataggaaaaatgatcaaaaataaattaaaacaggtgtattaccaccctgatcacaatgaatgagagaaaaagtattgaaaacaaagacatcagcagaatgtgttttcttcgccttacaggatgagcaataacaagttttacatatctgaactgctattactgttatatgtagatatgacagactgtggttctagaattgaacaagttatttgttattgagattaattaaaataggatgccatgatccctttcaaacaaaaatt

SEQ ID NO: 154867 - DNA, 561 bp, Homo sapiens
cctcccagcctggtcaaaagtactaaaactattaaaaagattgaattacctacaaactttgatcttttaaaagcaagagaatgtaaattaatggagaagagtgttctgtagttaacgtaaaaagaaagaaactgacactgtggcatgggcaagatagcagaggattgaagacccggtttttgccttttttccccccttttcctgaggacttaaactttattttggaaaaagtggcaggtttgtttttgttaaatggttgaaaagtgtttgtatgttacttctcagatattactcagtataaattatttcttaaaaccatatgaagttgtttaggtaagaatgctcttagtaattactatacctaagtcagcctgtattttgtcagatattttttaagaaatgatccagatcaaatcaactattttgaggaatgtgaatatatatccagttacaactaggaaagaatgttaagaatataagctgtgttaagaaacaggaaaattctcttgttatatcatgctgctgccaatctgtagtttctgtgactcaggaacagaagta

SEQ ID NO: 154868 - DNA, 371 bp, Homo sapiens
agtaatacgcacacaccccatcacaaaaacaaacaaaaaacactgaagttctgcttttgtcaagtccttactcaatatttatgccctccattcctcacctctaattccctacacacacacacacacacgcacacattcccacacacacacgcttctacaaagaacacttagaaaaacagtattccaactacaagcccacttctctcatccactgacctcttctgaaaacacaaaagattttttaagctatcagtaacacgtccaaacacaagctgataagtttgagctagaatttacatatatacagttgctacacaccctcctattttctgcaagtctgtggaaggaggctgggaaagaactaagtgcaa

SEQ ID NO: 154869 - DNA, 871 bp, Homo sapiens
caagctagattaaaagcatttatagcatatgttacaggtaaaagcttactattaatataatatctattattgtaatgcatagaaaaagatccgtggatacaggtcatgttgttaacagcactgggtattttcagagactgatggggaaggatggtcaaaagaattggctttatttgtatgttttaagtttttacaatgagagtattaatgtattatgtgtctattaaaaaataaattttgatctatccatcctgttgaatattatgtagaattgaatgtggtatttctgatgggtattatcttagaagaaggtttagacaatgtaaaatacatatgggtatatatacgtttatataatatgtaaaaataggctgtgagaatgtacttcagtggctgatatggttatcttggagatcgtactgtgagtgaggtaataaagaatgactgtcatgttttgctcttcataattgtacattatttgaagcctttgcttttaaattatttgtacagtaaaaataaaaacataggggaaaaaaggctgaaatgggggaaatctgagctctcacatataaagatcctatagaaccacactatcccatacagtagcctttaatatgtggttaatcagcacttgaaatgtggctagttctatattgagaagtactctaagtgtataataagtgtaaaagctggagtttgaagacagtacaaaaatgtaaaatgtcataagaatttttatactgatcatatgttgaggtgataatatttagatatgaactaattaaaatatattaatacagattttacccgtttatttttactttttatttatttttttgaaatgtagtctcactctattatccaggctgga

SEQ ID NO: 154870 - DNA, 483 bp, Homo sapiens
ttttaatctccgcgtcagaggtgactagtgataaattttcttcattttgtataatctcaaaagaatgaggtcagcatttcagtattccatatgtgaactgagactatcaagaaactatattatccccagaagcaccatatagtaagtaaatcaccaccaccaccccactgtagaaataatttaaacaaaagaaagtttgtgtttctttaaatcttaagtatagacaatttaaagataaataaaaaacaagtgtatatgtatttatataatgaatatacaaacaactatcttaatgtgttttgggttttgaatttatggatgtagtttctttgcttgcattccaaaatgttataaactaactaagatgtatagcttatcggtgcctgtcccccatccttgagtgaattagatgtctaaggaatttcgtaaactttaatctccaaagatctccaaaacctcagtaggcaaggtggcaaaaaaaaa

SEQ ID NO: 154871 - DNA, 225 bp, Homo sapiens
tatcaccggccactctaaatgaattatgtgtttaaatgttcagattttatagtctatttaatcctgtaaatcttaataataaatttgatggcaagcagactgtgagtggaattttagataacaacatatgttcatagtgattcatgaaaatgtaatcctttatggtaaatctgtattatttataccaaatctttctctctggactagagccgcttttttaaattc

SEQ ID NO: 154872 - DNA, 680 bp, Homo sapiens
  misc_feature (161)..(161): n is a, c, g, or t
actctagagtatcccctgggaggtgcaagtgcacatagctttgccttattcttcttaactgtgtaatattatacagtgtacatgtactgtaatttacacaggactttgaaattcacttaaaatttgtgtcagtgtgaggtgaagatgaaaatggatttcgnctctcccaaatagcaaccctctcctgtgtgctggggggatattttctttttttttcccttttctttttcattttttgaaacaaggttttgctctgttgccccagctggagtgcagtggtgcaatcttggttcactgcagcctcgaactccagggctcaatcgatcctcccatctcagcctcctgagtagctgggactacaggcacattcctcaagcctggctcattttttgtagagacagggtttcaccatgttgcctgggctggtcttgaactcctgggctcaagcaatttgctccctttggcctcctaaagtgctgggattactggcatgagccactgcacccggcccggatgtttttatagtttgctttttaagataatgcagtggacaacacaatttagaaataaggagagcaaaatctgtataccacatgggaagtatcatttttttcctgttttacacctgggcaggtaaggtgtaaagtgggaagtgggaggtcaaggggtcgcccaggcta

SEQ ID NO: 154873 - DNA, 542 bp, Homo sapiens
agtcagccttgggatgatgtctgccccctgccatgtccccaccagggtggtgcctggggcatgggagtgcccaatctttactagctgggtgaataaattccaggctacactgactcacctcacaacatgtttgctgtaggtacacggcagcactgtggcagcagctatcgtggggcaaataggagtcctgggcccagagtctgctccaaggaagaaataagtttccaaggcgttcctatttgcccccaactcaggagatcaaagggaagagatattgcccctaaacacagttctccttctcttaaccatgtaagtagtccagttaagagtaacagatatttgaggttggatgattactattttatttttatttttatttttttgagacagggtctcactttgtcacccaggctggagtgctgtggcgcaaacatagctcactgaggcctcaacctccagggctcaattaatcctccctcctcagcttccctagtagccagggctacaggtgtgcaccaccatacctggctgtgtttctctac

SEQ ID NO: 154874 - DNA, 301 bp, Homo sapiens
ttctttgtctcttccagtattcttatgctaagaaaatatttcttctatttaagatacagtagctgttcccttgtattttctcataggggttctttgttttattttgtttgatatttaactcttaaattcacctgcgttttattttcttatgtattatgagataaggctttaatttgatctttttttccagaatgaaacaaattgctcaacagcagttattaaacaatcttttctgtttctaatgatgatgctatattttattatatactgtttcatcatttttattgtgtaggaatttttt

SEQ ID NO: 154875 - DNA, 236 bp, Homo sapiens
gacggagcattctaagcagggttctaggaggtccagagctagaaaaggggttggcctactggaaaacagaaaggagggcagtgtggtgaatgtgaatgagggttagcaggatgtggcgggggaggcagcaccagtgggctacagacttgacactcagcaggacagacgcccttgacgggtgctatgtggcattcagtgaggtcacaggaatgaaagatcactgggcactggatgag

SEQ ID NO: 154876 - DNA, 698 bp, Homo sapiens
ctgcctcccgggttcatgccattctcctgcctcagcctcccgagttgctgggacttcaggtgcccgccaccacgcctggctaattttttgtatttttagtagagatgaggtttcaccatgttagccaggatggtctcgatctcctgaccttgtgatctgcccgcctcagcctcccaaagtgctgggattacaggcatgagccaccacgcctggcctggcctggtagtttttataacagatgttagatagcaatactcttcataactctgtacaaggcaatcaggcaaaaccaaaggccaagtaaaatgtaattggttaagctaattgtagctgatgaaacctttacgttttgtgaaagaggagatgtgcatcagcagctgtaagtgagcactctaagatgcagtgagtaaaaggtgttgggagatgagcaactaaaatataacctcttagttataaattgcagaacgaagaattttactcagagtacaaactagtggaaaaagtctttcgtatactgggtttttcagagttcttaggcaagattatatagtttgatttaaagacccaaaaatgtacttcctggggtgcaggaatgtcaggtttctgttaggtggaacatgctcctcatggcacagaattggctacatgaagttaacctacaggccaggtggtaatcggcaggatgggtcggccggagg

SEQ ID NO: 154877 - DNA, 656 bp, Homo sapiens
gtcccagctactcggccgggcggggggctgaggcaggagaatggcatgaacccaggaggcggagcttgcagtgagccgagatctcaccactgcagtccagcctgcgcgacagagcaagactccgtaaggaagaaaggagatagcactgccatccagagaaatgggaccttggctgacagaaaacgcacagccaacactcaacattccaataagacacagcagtgacaaaaggggagtcttacgctggaagaaatttcaacaacggcagcagtttccatcagtaagcacactctgatctctatatgacgatttgcacgctacatcactcaaattcggtcaacaattgctttacatttggagaaaaaaatgtatcagtaggaaccaggacaaaacatgggaaatccgactgggagcggtggcttacgcttgtaatctcagcactttgggaggcagatcacgaggtcaggagatcgacaccacagtgaaaccctgtctctactaaaaatacaaaaaattagccgggcatggtggcgggcgcctgtagtcccagctactcggagaggctgaggcaggagaatggcgtgaacccgggaggcggagcttgcagtgagccgagatcacaccactgcactccagcctgggcaacagagcgagac

SEQ ID NO: 154878 - DNA, 402 bp, Homo sapiens
gaaagactgtgtgcgcatggagagcaacaggcctagttcaggagacaatttggatatgaagtgataaaggtcagaataggggtacggatagtggtaatgcaagaagattaaacaagataggatagctaacaaaatatgagcaacctgtgaagaatctacgaattctggcctagctacacctgacaacttggtactatctttaatccaaaaaagcaaataaggagcagtgtaagtgtggaggtggtttagtacaaacatgctgagttattaactagaaatgttctccaaggtagctaaagtggagtgaggagaggccaaggctatttggagagataaaggattcatctacaaagaatgaaatctgaagtcacatcaactgagaaaagaacacttctctgaatt

SEQ ID NO: 154879 - DNA, 474 bp, Homo sapiens
tgccttccaggccatgccacctccagctctttcatggcctctcatctccccaatctctcaatgttggggtgccccaagaccctgtctttgtctatattctgggtgatctcaaccagtttccaagggcagacaccaaccccaggctgaagactctgacttgacctccataccagacctcaatcctcaattctagactcttgcacacaccctcctgctctgcactgctgcctgatgtggaatgagcacctcggccaacctacggtggccagcgtccaaggcagcacaacgcttcctgctctgcactgctacctgatgtggaatgagcacctcagccaatctacggtggccagcatccaaggcagcacaatgtcctctgcagtgaatgctgggaggtgttgcaccctccgcaacccccaccagggttggtagatatgaccagcagaatatgacagaaggttaacagtgtattactac

SEQ ID NO: 154880 - DNA, 362 bp, Homo sapiens
  misc_feature (351)..(351): n is a, c, g, or t
ctttagacataaggggggctcacactcactgcaaatctctttcccacaggctggtagtaaccacagaaaaagattacgggcaaggcatgagattggagaaagctccccttggtcctggaggcatgcagaaggtgactggtggctgtcagaggagcacacacagccctgctcatagagttacttcactctaggaatgaaggtgtggcgacatatgcagctgctgttttgttccgaatgtctgaggacaagccacaagattacaagaaacggctttcagttgagctgaccagctctcttttcagaacagagccaatggcttggaatgggactgctgatcttggacttgatatngatgccccagg

SEQ ID NO: 154881 - DNA, 255 bp, Homo sapiens
acagaccagggaggaggctataaaaatgtaaggctatgagatactacaccagggtagtgacagatgaaattgaaaagaaggggctgctatgacagataaagaaataaggctcagacttgtctagatgtggcaagagtggaggcagacaaagataacacatgaaaccaaatgttacactgaaggaccaaaacccacttaggatcaatgcttcccttaacaaatgttaggtctctttctttgctccccttttctcaa

SEQ ID NO: 154882 - DNA, 498 bp, Homo sapiens
acccagcatgaggtgaaccatgatgaaggggaagtcagaaaggaaagagattgcaccagtctgaagattgtagtttctcttgtaaagtttacaacaatatgtgatgatgtaatcacattcttagggctcctcccagagtcttagctggatcctgtgctactgaaaacagcatggtactgacataaaaatagacacattgaccaatggaacaggacagagagcacagaaataaacccatgcatttatagtcaactgattttcaacaaaggtgccaagaacacccaatggaaaaaggatagtctcttcaataaatgacgttgagaaaactggacactcatatgcagaaaaatgaaattggacccttgtcttacaccacatacaaaaatcaactcagaatggattaaagacttaaacataagacctgaaactataaagctactggaaggaaacataagggaaaagctccatcacattgatctgggcaatgatttattggat

SEQ ID NO: 154883 - DNA, 275 bp, Homo sapiens
tttccccagaagcctgtgtgaagagcagctggtactgtggtcatggtggagatatagaagtatgagaggggtacttcctgctcccaagaggagcagtctggtggtcaaggcaaggcacacatggtagtaggctagaggtatcagagaaaatttcccatgggagatggaacctgacctaggctaggaacgttgtgggggatttaaattaagtagagaggaaggaatgggactttgatgtagagcaggggtcatcaaattttttctgtaaagaacta

SEQ ID NO: 154884 - DNA, 237 bp, Homo sapiens
agtgagtaagaagaggggagaaggatggcacagttagcaaatagcaatgtctgttatacaccctcttcaaggttccttgtgagcggtcaaccttaccagacagaacaatcttccaaggtagacgagggctgtcttttaggcaaggagttcaagtgtctataattctcactctttttgcttaggatcttctgactaatgaaacacattcatttagtttatatttttatttgcataggg

SEQ ID NO: 154885 - DNA, 481 bp, Homo sapiens
  misc_feature (28)..(28): n is a, c, g, or t
tagatcgagctctgtaccccaagggtcnttaagccccaaaggtcctctaagatactctgcaaaatgggaattaaaggatgagagaagggctcaatgataggaagcagtataacggagcgagttggaacataagctatggtgttatgtggagctgggttcaaatcctggctctaccactgaacttctatgtgtctaatatttagctcttagcagattatcaggcacatggaagaaggaaaagagaaaaataggttatcatgtttatcatcattaacagcaataagaaataagttcttggcattctgccttgactggaatttgttataagcccacactggacctgacgttggaattctgtaacccaaggatagactgattgtaataaaatttttaccttccgactttttatccactacaatgtactgccctagatttttcttgcttttaatcagtgagttcttaggcttaagggacccttggc

SEQ ID NO: 154886 - DNA, 386 bp, Homo sapiens
gggtcgggggctccctgtttctagccctgccctgctccctgctttctttgctggctccagggcctggctgtctctgcagctgtaggactgaccgtccccacctccatggcagcctcctaccagaccttaggacggagcttcatgatctggtggtcacctgcccctccctgtcctcctcctcttccccaaactttgttgatgcctcaccttggctttgactccattctcacagcatattgtttttggcaaccgttattgacatacaattcacataccatgccacctgcctctttaaagcacacaggtcagtcatttttaacatgttcacagagttgtacagtcaccaccagtcaattttaggacattttcatcacctcagaaagaaa

SEQ ID NO: 154887 - DNA, 178 bp, Homo sapiens
tctctctgcctctacctgaacatcctgctccagatccttttccccacccccctcacatctccagctggcctgctcggtgctgtcacgcgggcactgtgagcctgcagagtccagggggttcctggaggtcagggctcctgtttacctatgcatctggtaagacgggacatgtgactag

SEQ ID NO: 154888 - DNA, 260 bp, Homo sapiens
ccatctctagctctctgctggtcaattagtctatcaactaacacatatttatctcaacatctgagacacataaggagtatcttcattccagatcactgatagtaacctgagaaggaaagaacgacctacaattaacggttcaaactctagcatacaaagttaaaatactgattaaggccagacgtggcagctcccgtgtgtaatcccagaattttgggaggccgaggtagacggatcatttgaggtcaggagtttgagac

SEQ ID NO: 154889 - DNA, 371 bp, Homo sapiens
taaatattaaatgcaattgtgatgttataactactaagaagtaatttaattttctgaatacatatctgaggaatcctacccccaacccccaacctctgcgccaggctaaataagcgaggtaaacactcatgacacaaggctatgcagcattcacacttgaggtcaaaaattccaaaaataaatccataacaacaggtgttatcctaaaagcactgagatgttccccgtgaaagaccaacaattttggatttttaagaaaataaagtagaaatgctctatccaaacacattttttaaaactcaccttgggtcatttcacaaatatttatttcttagcaatccattttcctttgcttataaattcctgtttca

SEQ ID NO: 154890 - DNA, 384 bp, Homo sapiens
gctcttgggttgaagggtaaataattcctttaacttttgatgatgataatgataatgatgatgatgatgacaatatgtgccccgcttcatcagccagaccaaaggtccagaggacagctgttacatagtgcacttcaggaccccctccacacctaacagaatagatcccaaggttgaatagatcctgtgtctttgataggagactgggagctccttgaaggcaggagataggcatttatgagtatgcacctgtctccagaactaagcactctccttggctagaatagacaggtgtctaccaattggtgaataaaaaacacaaagggtttggaatgaacatctactgtgatttaattttgacatggtcagtgaggctgcctagag

SEQ ID NO: 154891 - DNA, 593 bp, Homo sapiens
gcacgatgggggtgcttggcagcaccctcgcctctccccgctagatgacaggagcactgccccaccagtcaggacaatcaaaaaggtctccggaagttgccaaatgtcccctgggggcaaaatcacccccagttgagaaccactatcctagaaataagtcaacaaataaccaaccacaggcggcttgggctggggactcacgtgcaaccatgaagaggattcatgctgcttgtgaggatgggggaggccagacccagatagttatgaaacactggtaggaatgctgccatggaggtactgctggggctccaaggagaacacataagaagggcaacaaagccaagaggggcacagggaaagagaagagttaagtgtcagaaaaggtctgtttctggctgggtgggtgtaatcccagcactttggaaggctaaggcaggcagatcacttgaggccaggagtttgaaagcagcctggccaacatggcgaagctctgtctctactaaaaatacaaaaattagcccggtgtggtggcacacacctgtagtcccagctattgggcaagctgaggcaggagaatggctttagaccctggg

SEQ ID NO: 154892 - DNA, 837 bp, Homo sapiens
atatcatgtttatgaatacaaagattcaatgtcatccagattctgaatctcttaatagtgatctataaatgctatgcaattccaacccgtcctaacagttttttaaaggaatttagtaagttgattttaaaatctgtatgaaatataaatgggccaagagtatttaaaatctctcaaaaaaatattgtatgaaacttatcttaaaatatactaagatttagaacaaatttataataagtagcttagcgtggcactggcataggcccacataaatagatcaatggacttaacagagaccccagaataataccatgcatattcaatataaaaaattcaatatacaaaagagatggcattctagtcagtaaagagggacttttcagtaaataatgctgggaaaattgatttatatattttttcgtgaaaatggatgcctactcactacacatatacacaataaacaggtggattaaataggaaaactctaaaatgtttagaagacaacacagaatatttttgtaacctcaggttagagaataagatctttaaaagactcaaagagcttagacctaaagggggagaactcagaaattcaactgcattaagaaatagtatttacaaaaagaaatcattaaggaaattaaaatgcaaggcacaaagtaagaggatatatatgctacatacatgactaataatgaacttttatctggaacacataaagaactcctaaaaatgaatacaaaagacctgaatgtcttctccctgccaagatgtagtaacagggtctagatttactctctcacctaaaacaattgaaaaccaaacaaaatataggac

SEQ ID NO: 154893 - DNA, 305 bp, Homo sapiens
tctactggcctggtcgctgcttgtgagacctggagcagtaggacctgatgcattgaggcccggtgcagtgagtgaggccccatgcagtgagtgaggcccggtgcggtgagtgaggcccggtgcagtgagtgaggcccggtgtactgagtgaggccccgtgcagtgagtgaggccccgtgcagtgagtgaggcctggtgcggtgagtgaggcccggtgcagtgagtgagacctggtgtagtgagtgaggccccatgcagtgagtgaggcccagtgtagcaagtgaggcctggtgcagtgagtgagg

SEQ ID NO: 154894 - DNA, 663 bp, Homo sapiens
tgcagtttcggtgatctagaggatccctatgaattctgaagtccagctgcatagagaacggtcacatctgagccctagagtgactctacctgcaagatttcacatcagctttaggactgacatttctatcttgaatttcatgctttcctaaagtctctgctgctaaggctctatttcctcccccagttaaaccccctacattagtatcccactagcccaggggagcagtaaactttctctgcaaagactagatccttttttacgctttgcagaccgcatagtcactgtctcaactactcagctctcctgctgcagcatgaaggcaggagagtctccgtcgaactagttcgacggagactctctcgtgactttcaactttcttctcagaaccaggcaaatgtcctaaataaaagtcggccctgtgtcccctgtcctctcactggcttcattttgtagaacacattacatcattccagttacagttcacatcctcatttcaaaagcactttaccttgccctacaatgctccagtttccttaagtgacctgtactcttttcaattagccagttatctaagtctagctgataacagtgtagaaatcccactcatctgttcccctaccctgcagtgtgattcttcatggatgtggtgtcaaaacagaa

SEQ ID NO: 154895 - DNA, 183 bp, Homo sapiens
cgctccggagccatgcctgtacccacccccttcctcagactccactcccgcaggtgccctaggggaaactctacaaccagcaccatggccggaccccatttctcctggaacccctgagccatagctataaccagccccgcttttagagcttatttccctagaatatcctaagccaccctcgta

SEQ ID NO: 154896 - DNA, 170 bp, Homo sapiens
actgaggcccaaagagatgaggcgaattgccaaaattcaaatagcaaaacaggtctctcaaactcagccctcttaactgcaaatccaacgctctttggcagataatgcatgtgaagagacgaggatacggtgagctggagggaattttaaagtgaatccatagaaaggat

SEQ ID NO: 154897 - DNA, 522 bp, Homo sapiens
ttaaatgtgatgtcaatggtagtgttaagaattaactataactaatacatggatggatctatgccatttatgacagaatgtaagaaactgatgaagctaagtattgcctcagatgcaagagaacagttcagagaaaggagctaggaaatacagtactgtaccttcttctgaatgtttgggaagggctcatggagcaatggagtttccagaagtcatttaatggagagacagggagatttggaagtcttgggagagtattggaagcataaggggtggactgtgaagtcagaatcctagagtaagggcaagtcggtggccgctgggtgaggcatgggtgaaagacctccagggtggaagcctgggggactgggaggaatttttcagtaaaccattcgaaatacaagcaggacctaggctctagtgtacctcttgggtagagggaacaaatatgaacagcaccacagagaagagatacccagactttggtaagttactgcatttgaaggccggaagaacagagtg

SEQ ID NO: 154898 - DNA, 405 bp, Homo sapiens
gcaaataatgcatatacaacactcaatattttagtatgtcctgcactcacgattttaaccctaataggaaggacaactggaattctttctccttagcatccacgaaccccatatgttataggacaaacagatggccagaccctggcctgtgcctccaaacacagaccttttcaaggtctaatgcttccagagaagtcttcacactggctctgagacccacacttgtaatccatacaaccaagcagcccgatcctctaaacactcaaccatctcgtcctcagtggcatatggttacctaaaataaacctgagaagcaaacacaacttctccgggtgactttcctatgataaggtgaacagaactgtatgacattcaaagagaactgatgaagcggcagcagtgcag

SEQ ID NO: 154899 - DNA, 567 bp, Homo sapiens
  misc_feature (251)..(251): n is a, c, g, or t
ggagtgcagtggagaatggtatagcttatatggaaaacagtggaagatggggtttcactatgttggccaggctggtcttgaacgcctgacctcgggtgacccgtttgcctttgcctcccaaagtgctgggatgacagacatgagccaccgcacccgggcgcaccctttgatcttgagatggctgatacggcagagcagcccagcagtggatgagtgcttacatttaaaaagttcatgggatttcatagatnagctcatgaatgtacaagtccccggtgtaaaggttcctcgactatgaatttttttatcctttctttgttcgtggggtgtatgatgcataggacatttatagatggaatatacctttcaggctatttcttcctctcccaaagtgctgggattacaggcatgagataccacgcctggccaataatcatcataatactttttcttgtgagttcaacttctggagactctacatatgggtgagatcatgtgggatttggttttatgtggcttattttacttaacatgatgtactcctggttgatccatgttgtatcacag

SEQ ID NO: 154900 - DNA, 309 bp, Homo sapiens
tacttctttttaactccttttgctagatttttaaaatgtccttctcttaaattttataatcaaatctaagatttttacagtgatctgtctccaaaccctaccgccttcttccttctgtgtgataccataaaaacatcatttgttatctctaaagtcccatccttaatccttcttcctgatcatttttatattgtaaaaacaaaataggccattctgtcttaatgtgtgttttatatatctctatgttcccttgtttttgtctgtgcacaattttgttcttcttccagagattcacttatgactacggcc

SEQ ID NO: 154901 - DNA, 658 bp, Homo sapiens
ttcatagacattatgtatactttcttaagttttctgtacttgtgttatattaaataatataaatgtttttaaaattccataaatggaattaatagcagattagacatagctgaagagagaattgctaaattgaggcagaaagtgttcaagctgcaacgtggagaaaataggatttaagatgcagaaaaacagcagaagacatacttggagcagtaataaaaatgccaatatatgtgtatggttggagcctcagaagggaataagagagagaagcaatattgaaagaattcatggcgtaagatttttcaaaattgacaaaagacatcaagcttcaagttcaagaagtactacagcacccaagaagggtaaatgcaaagtaaaccacacaaaaggcacatgattgtaaaataaagacaattaagaaaatcttaaagcgaaggaataatagacacattatcttaaaatgagtaaaaataagacagttgattttccaactgaaatgatgggagagagtggattaacacttttaaaataatgaaataaataacagcaaacctgtaattctatatccagtgaaaatattatttaaaggtaaaagttaagacatacttacataaatgttttcagagaaagatgctgtttgtttacccctgccaaa

SEQ ID NO: 154902 - DNA, 345 bp, Homo sapiens
ggagggtggagtgatggaaagaacacaggagttgggctgcccaggttcaagacctgatcctgtttcttcttagctgggtaactcttggcaagtcacattttgtcttagaacctcttagtaccttcatctgtaaaaagaatagtcgtgtgtatctcagagggtcattgtgaagaccagctgagatagcgtcatggctaaggagagtgctttgtagtcatgaaggtatcattagtaatatggtatcaactattcttcattgctacttattagattctaggcactattctaagatttcacatcaggacttttcaacagcagcactatgacattttttctagataattc

SEQ ID NO: 154903 - DNA, 459 bp, Homo sapiens
ttcatattacgtttttgagatagctgtttatttttttgagggggaaatagtgacataaataggtttagaacctcaggtggcttaaaaccccagatgtagtcagtggtaaattttttttttcttggttagtctagttttggtgttggtaagtattatatatgctggtgggtttttaaaaagggcacgtggtagagtctggcatactatttggagtcttgtggtagctgcccacttcctgctaatgcagtagagcatgttcataatggccttatatgctttccttcctagggcaggccgtacttagtcataccaggtaagaaatatgttttaaaattttagttaaacagttatgatgatagcttatagtttactttgcatttctttatttatagaaagattacattttctacacagtgatttactgttgttatttcctactttgttaactcattaactcca

SEQ ID NO: 154904 - DNA, 736 bp, Homo sapiens
tgcagcaggctccttccacccccacacttggtggcatagtttcaatggcacactgaaaatggccctggggcccccttccagcgggtggcttttggagctgtaggaagaggggacagagttcctcagatggctttcagtcaggccatccctgtggtgtctcactggacattttactaagtgcttctaaatctgcagactaatgtttacaaaggagagacatttttatgagaactggaaaatgatcccaagcaatgtttaaagatattttataatttatatagaataatcagctcttcatccagctcccatttttctttcctgttagaatctgtacagaaaaattcaaaaggaatttcttcactttattgagagaaatggaagagcagctggagttaggtaggaagggccagggtgccgttgccatctgtcttcagagaggggacagcgaggcttctgagtgcctgcacttattaattagcgactgcttttggagagttgctggcttgctgctgttactctcaggcacctacaactgtctgagtctcctgcatgttggtcctgtgtctttaagagaactaagttgctttacccatgaaggcagctgtaaaatggtggaaaagtcgttaacttgactcaaagccctggttttgagtcctactgaaactactttttctctgtgtgacattgagaaaatcacttcgcctcagcttccccatttgtaaaatttcaatgataa

SEQ ID NO: 154905 - DNA, 170 bp, Homo sapiens
ttcccagctgaggtggggcctgatgtcttgtttcagctcaaattgcaaagcagtgtcgtttttgcaatctgtttagtgccacatttttcacatctttgtgagtctttttttttttttttttgagacggagtctagctctgtcaccaaggctgaagtgcaagtggtgcgat

SEQ ID NO: 154906 - DNA, 275 bp, Homo sapiens
gccttccttaagagccacgtgacacagcacacaccacctactgtgtgtgctacaagaatcaacaccttctgtgagagcagcaacagcctggacaaaagttaagccacttttcattaaaaggttattcctcaggctgggtgtggtggctcacgcctgtaatcctagcactttgggaggccaaggcgggtgcatcacaaggtcaagagattgagaccatcctggccaacatggtgaaaccccgtctctactaaaattacaaaaattagctgggcatg

SEQ ID NO: 154907 - DNA, 678 bp, Homo sapiens
ccattttgttaatgggttttactttttaattttgcttcctaatttatttatttctgcttttaattttatgcctttgttcacctttatttggtttgtctgctcattttaacacttccaacttaaatattttatttagtttgtttcttgttttctattagatgcatttacaacataaatttttctttgactgtcagtttggccatatcctgtaggctataattttattgtcattcatttctaaatagtctgtaatttttatttctttttactacagttatttggaagagcattttaatttgcagatagtgggatttttagatggttggctggtttgtttttggctttctatctgcctctaacttctcatttttatgcatcatgatgagagtatatttctattttccaggtttgagtttttcctcaatgccttgaaaaagttatttttcaaaagttacaggcacaaatgtttgcctgaatctcaactttgaagtcaagcagcccacagtaaattattacgtgaatacctgagatacaggggttgcttttgttgttgttgtttaaacacctaaaccctggagtttaatgccatctcattatttaaggcctgtggataggagaaataaaacttctgcttgtcagggctttttgtcctttttgtgtaaggatagggatggtgta

SEQ ID NO: 154908 - DNA, 641 bp, Homo sapiens
atcccacatctcttttctcttattctagtaacagcatcccactttcctttggggaactgtccctacccaactggtggactgcccatcaaaggtcaacatctccctttgagggaggacatgtgacccaagctcacccatcaaaatactgctaccctcctagacaaagtgattggcccacatgtggggatacgaccccagtcaacgatcaggagtctttttcaggtgttaatttcaatactggataagaaaggtactaagcagcatatgaactttgctgcttactagaaagcaccttctgagggaaaaggagaaacagctgacattagcactacctctggcttttcagctggacaggcccacaatcatttttttgaaactcttggatttaaatatgtttcagaactcagaattattcaggtgagaatagcacaatgaggcacatacttgagtatattacatacacctctgtctggatcaaggacaacatcactgcaatcaaattcaattcatatttctgcaatgaaacaaactaagggcctaattaatgtcagtttaggtcagggtaggttttgccatgaagaaagtgcagatcaggtaaggtctgattacaaaaagtgttcagctgttttcagaaaggcata

SEQ ID NO: 154909 - DNA, 296 bp, Homo sapiens
gagaataatttctttttattgtcatgacctggaagtgaattttttactctttgtttctcatctttatttcaattgtagcttccataaccttcaacctgaatatttaattaaaccaaaagatagttgaggtatgaggaatttatttacaaataggaatctattgtgaatcatatcttaatagcttggcatcacacatctaatcatacaaactttttttcaggaaagggagatatgaaaaagtacagactagatgaaggactctttcattctttttttttttttttttttttttgaga

SEQ ID NO: 154910 - DNA, 419 bp, Homo sapiens
gagaggggcaggatggtggaactgggaggaaagtccagcccagccaaggggggctctgagagtcagaggggctcccaccattcctggccatgggaagaccctactctcggtcttgtggctcttcaatagcccccaggctcctggagtgtacccaggatagcttttctagtttttagtcctgtgtgagaagctgtgagttacaccagtaaccatctctctctgccccctacctcctctggcctttcttccctttctctctttctctcccctccctcctcctctccctgtctcctttggtctctctctgtctctcttctgttggtcactctcccgccctctgtctctttctgtgactctgtttccccatctctactccttgctgctccctctgcctccttctgcctctttgtctccccctg

SEQ ID NO: 154911 - DNA, 554 bp, Homo sapiens
cctgtgagagaggctggcatccagggcgggaaacctcttttgagggcgtgaaccaggatgtgaagcagcatttgaattcttgctgctctcttctggagcagtgggatattgggcagttcacttaacctctctgagctcctttctcaagcctttttttcctgactacagcgagcaacagctgtttgagatggtggagcacattcttgctggtgaaaggaagcaaggtcaacagagactcatagaggaaacattcaacaacttgaacagtaagcaagttgcagtttccgtctcagtggactgaggtgatacagcagattttgctgtggaccaagatccagttttcctcataacactcacaggtattaaatgactaatccagatccccagcaccacatcaaggtaggtgacagaagattaacaagttcctaacttttctttaagtgtcatttgttgcaacgttctgaaactgattaatatcccctccccctcttgccctgaaatgaatctggtggtattaaattaaataaaatagttccagtttgtccataaaaaaa

SEQ ID NO: 154912 - DNA, 513 bp, Homo sapiens
agtatagtgattataacaatgatgatgattctgtggtgcccagtgttttgatgtgttgagatgactagatgtatggcattgtgggtaagtagtgagacatcaggttaacttgaatcttgacaggccatcaggactatcatctatgttggaagaaccaacttgtgattatagatgtggactcatttgaggaggctatgtaatactaatgttaggatctgtttggcttgagggctgaagatctgtaaccattgaatgttccatcttctttgcagatgcttagttataggaagctagttcttcttttcctttgcttcattaaaaaaaaaatcttgtggtgcttataggcatgttatttctcaggtggattgaaagctttgttccactgtaggatctttgaggatcgtacctctttttcacctttgcctactgaaaaaaccattgaatgttccgtcttatttgcagatgcttagctataggaagctagttcttcttttcctttgcttcattaaaaaa

SEQ ID NO: 154913 - DNA, 1274 bp, Homo sapiens
agacataggaaggaggagacgttcatttttactcctggtgttcgaatacaaccaatagatgaaacagtcactttattctctgtagctgcagattcctaatttatggcatgattacatgattccttgtctgtagaatgatcagcgatcatgctgaagttgatagactttgaggtcccctttgacccgaaagactgggacagcagatttcagttcaatatgaaaaaggattttctagctggcagatctgtccaacagaagaaatgtctgcccaggaagtagtgagcttacggctgttggcggtattcaagtagggctgaatgctgttgattagggatgcggtagaagagaaggacaggaattaggccgacctccaaagtctcttccaatttagagggtcagttatttaatatatgacttgtcaaagccgaaagacacatagaataggggctttaccttcagtggcaagtatttgagtcaatatcatcaagtgtgttctttaaaaatgtttataaataggtcccagcatttttgagagacccttctgggatcattttagaaaggatgaacaaaacaaaacaaaaaacaggtgaggtgcattgactcacgcctgtaatctcagcactttgagagactgaggtgggtggattgcttgagcccaggaattcaagactggcttgggcaacagagagagaacttgtctatgcaaaaaatagaaaaattaaccaagcatgatggtacacctgcccatggtcccagctcttaggaggctgatgtcggaggctcacttgggcctagagtttgaggctgcagtgagccaggagcagtgagccgtgattgtggcacactgcactccagcctgggtgacagagtgagacctcgactcaaaaaaaggaaaccaaggatgagaactattttaagttgggtcagaactcagtttgtgaacccagggctgctgaaaattaaatttggtccttaggaaaagcaagaaggttggtggtggtggggggccgggaaatggccagtaataatgaacaacacagattgacatgtagacaagtagtaggatcatgctgggtgtggtgtcacacatctgtaatcccagcactttgggaggccgaggcgggtggattgctggaggccaggagtttgagaccagcctggccaacatggtgaaaccccgtctctactaaaaatacaaaaattagctgggcgtagtgttgcttgcctgtaacaccagctactcgggaggctgaggcaggagaatcacttgaacc

SEQ ID NO: 154914 - DNA, 230 bp, Homo sapiens
tgaagtaactacaccatgaagacacaacgccttgatcactctcagcccaagcatcggttacacgtggctcatggattcccaagcggtctccaggaaaaacagaagagaacaattctcaacactaaatagcaaatagaaagagaaagaatagttaatgagccaaaaaagacatttagagttaaaatcctggatcagctgaaacattaaactgaaaggatgattacagtttg

SEQ ID NO: 154915 - DNA, 418 bp, Homo sapiens
caggctggtcttgaacttcctggtctcaagcagtcctcccacctcagcctccaaaaatgttggaattacagccatgagccaccacacctggccataattttattttttataaaaaaaaattttacaataaaattcagatttgttcttattgggagaacagtagaagtcattgaatgaggaatcagtgagcagattttaaataagaaaacataattttgttattgtgaagaatggatagaatatggcaaacctattagggaactattgcagttatccaggaagacatgatggtagcttgaaatgtagtcgtgtgaatggattcaagagagatttagagggaaacagtataatcaacctgttgttgataggaggagtaactcctcagagtagttgtgggtaatggaatacatgtttctac

SEQ ID NO: 154916 - DNA, 283 bp, Homo sapiens
gttgtgaacgctgtaggggtgggagtctgctggagtgggctggagccgctcacagtcatctcagtgagcctgctggtgcccagcagccctggggaggccaggtgagaatccctgagctggtgtagccatggtcaactgtgtagcagagaatccccttgtttcataaacaaatatgctttgggagctttgccaggcactcagcagcctttcttccactgctgtgtaatctgtttcatttacacgtcttccaacccatcttcctaccactctcctccttttctca

SEQ ID NO: 154917 - DNA, 106 bp, Homo sapiens
actctccatcgacccccttcttaacacacagccaccacagaatgtttctagctagaggtctctctctctctctcctgtttctgccctggtgtgggactgcatgccc

SEQ ID NO: 154918 - DNA, 562 bp, Homo sapiens
tgtatatcctagtttggtcctgccccatccaagagaagagagcgccatttcgccattttgtagttcaactacttagaggacacatctcagcatgatttgtcttcttgaagagggtaccttttagtactttgtataaatatctgatatgtatcggtggaaatcctagaataatggatactattttcctatcctggaattcgggccacctcacagcctttagtctagccgagactaataaccggttataaaatgcccctcataattccctccaaaggtctggtgattgtaactggctctgtggtataatttttaaatcagaattctttagttgcagaccacagcaattgattttgcataacttaaacaaaaaggaatatttagaaggatattggaattactgaaatctaaattgacatgctgaaaaacaaggcctcagggaggtcaggaaccatcaagctcgagacatttaggtagcagaacctcagtctctatagtccccagtcaggtttaaaaattcaaggatggggaatctgattatttcactaagagggatgggaacttt

SEQ ID NO: 154919 - DNA, 221 bp, Homo sapiens
gtgcccatttcccttttgattttcctccatgttgtgatgccaccatgcttcttgaacttcccagcctgcagagcagtgaactaaaaaccctttgggccgggcgcagtagctcacacctgtaatcccagcactttgggaggccgaggcaggcggatcacgaggtcaggagatcgagaccaccctggctaacacagcgaaaccccatctttactaaaaataca

SEQ ID NO: 154920 - DNA, 325 bp, Homo sapiens
tttatgatttttattagtgatttgttttttgcaaacttaaaaccaaaaatggctaacagctggaagattgaaaatacaaacataaacctcagtgaattaattgcagggatttcaagaatcatttccagtattttaaaattttggttttgtcttttctttttgtaaaaagattaacttggctactttaagctccactattcagatcatagataaatctgtcttttattctaaccttagtatttaccttatgattttaatgatgaatttcaagatgttgggttttttcaatgtcagtaaacattttttacttttacatatgttctta

SEQ ID NO: 154921 - DNA, 303 bp, Homo sapiens
tggtgaaaccctgtctctactaaaaatacaaaaattagctgggggtggtggcggttgcatgtaatcccagctgcttgggaggctgaggcaggagaatcgtttgaacctgggaggtagaggttgcagtgagccaagaacccatcactgcactccagcctgggggacaagagtgaaactctgtctcaaaaaaaaaagaagctaagtcaagagttacatgcaggtgtgttccattatacaaagcatgggtactccaaatgggcatttgctgcctggagccagcatcttctatgtagaccacaaaca

SEQ ID NO: 154922 - DNA, 1647 bp, Homo sapiens
tagcttaaaatacatacatgtacatttattcatgctccccattcttaccatcaaatgtactgactaaagccctaactgaactgaaactcgcagatttcaagctattctttacaagacccaaacatttttgctcccactagttaaagtgtgtgcgcactaagaataagagtgtgtttgcaaatctatttatgtgagttatgttgtgattttaagtaaagagttgaatctaatattgtaacaaccactgacacattggtggggggaaagttgctgtttctatggaaaccacagaaagcttcagtaaaggcaaactgattaaacatatgctattaggtataggcaagtcaatttttataaattgggaacttataataaaaacctggaaaagtcacatagagacagtgtcttctatgtaactcccatactgtcttaatctccttggaagtcctctccccacctccctctctccacacagtgcccagcttctgcagctaaggcccttcccttcataaggactttaaaagtgtcttcatgttgctgcccaactttgcagaaagtgaaagcagaaatagtagacaatacattaatgcaagaaaggcagtgaggaactatcaaatcaaacaaaagctcttgtcattaggttaaaacgttagtaaataaatgtacatgtatgtattttaagctaaaataaaaatcttaaactatgtatgcatcattagttttttggattcaccaactgggttctagttgcgttgaataagaaaattctcctctattggcaatgccctagctatatcatcttggatgcttatgtaaatgctgttccctttgtctggtctgcccttctcacctggcaagtttggcaaactcttactccttcaaaaagtcagtataaggcctctgcctaaagaagacttctctaattctctctctggttctttgagctggtcctctctctgagattctactgccctcagtaaggtgctccattgtgtttatccctatagtattgtctgtctctcctcactggactcagaaatttctgggggacagggatactgtctgtaagtctcaaggtctcctgtgtttagcacagaggaggcaggtttgatgagggagagaataaagaaatgaattaatgaataaggtataaaatcagacagcagggtgcaatctagaggacagagcattgaaaggtgtagataactgactatgaggaatttctgagggtacccagaaaggggaggacctttgctgaaggacccaggcattgagtagagatgggtgaggggaaggggatcccaaggagattaagacagtaggggggctacatggaagacactgtctcagaacagactaatgtcttaggctgtctagtaaggatggggccctggctagagaatcagatctggcaggccttgatggatatggtggatgaaaatggcccccagcagggggctttcactaggtcacaaggtctgggtctcacctgagaggatgaaggtgccactatctttgtccactacctcccattgggggctgcggagcacctgcctcttggagcgctctgaggctgggggctcgtagggtacatgcaggatgaagttgagcaggcgcagctggcgcgcttcccagtaccgctgcaac

SEQ ID NO: 154923 - DNA, 527 bp, Homo sapiens
taaaactcaacaagtattccccaaccaaatcctagaaaacaaggattagaggaatattttcttaacattaaaaagctatgagtaattatacagccaaagccaatgctgaatgcattactcctaaaattaggattaaaaaaaacccagatactttctgtttatgaaactctagtataattacactacaagaagaaataaaaaaatagagtgccttttagcaaggtaatatgctatgtacttgaagcacatgtaacaatccactggaaaaaaaatatttgaccttgaaaatatgtattaacgcacttagaaaacataataaaaaatagatatttcaagccaggcaaaaaaagataaacatcacatgttctcacttatttgtgggatctaaaaaccaaaacaattgaaatcatgagcatagagtagaaggatggttaccagaggctgggaagggtagtgagaagctggtaatgagatggggatggttaatgggtaaaaaaagaaaaggagaaggagtaatacacactatt

SEQ ID NO: 154924 - DNA, 498 bp, Homo sapiens
attgatacaggaaatgcaaatcatcatgagtaccatttaccgtatttgagattataaggccacaatgagaaatctttagtctgtctttgaaagtcaggggaatggagtttggtgaatgcccttgactgttacaaccaacaaagatgggtgcaactgagacactcatctctttactcgacattggctagagtttctcagcccttgactcgtatctcagcccatatgaatcctcacagacctagaatggataaacgattgcctttcccaaatcggaaatgttttcacttaagttggctagatggaaaaggacatcttaaatgaggcactatttttcatggattagttcaaataacatttaatgagcccatgtttagtgccaggtactgttcagttaccagggccggttcttggctttaaatatattttctcctatatttctaatagtaaccttatgggtcagcaagcattttccccttcccatttttaatatgggaaact

SEQ ID NO: 154925 - DNA, 463 bp, Homo sapiens
caaggaaacaaattctctccctgagcccttaagaagaaatgtagcctagccaacaacctgaatgtatacttctgaccttcagaactgtaaaataataaatttgcgttgctaaggcacgaagtttgtggtaatgttttagcagcaataggaaactgatgcaagcacccgctgcgaatctctggggtttgctctctgtgcacctttcttttgtacattgcggtgtcctgtaaaccctagctgccttggtctcctcaaaatctcagctctgccaggctctccctctatgctccatggtttggaaactgtctgtgaatataagctgaggcaatcacagggctcacaccatttatttcccgtctctcatgggtccgtgcccttcattgtctcacattcagtgttttgcagaccattattttatagtctacattttttagctgtttcaggtgagggggtaaatctggtc

SEQ ID NO: 154926 - DNA, 398 bp, Homo sapiens
taaaagccgctaccagctctgggctggagggacaaaaataaacagtggtactggatcccagagacttaactcagttactgggccattgggtggaagatacaatcatagagagcttgtctggcaagtgctaaaaccatggaaggaacacagcatctgccagagacactcataatacagatagagagggaaaacatcctggattttctcttcttccttagctccaatctcccattagtgatttcctagagtcttctgacagggagcctggtaaatacaaactgcagggatcagcccccactaggacaccgagaaagcagcagaagggcaaggaatgaacgtgaaggccagcagatcctgcactggtagagatgcccactgaaaatccaaaacagggagaa

SEQ ID NO: 154927 - DNA, 411 bp, Homo sapiens
cattcttcaagttgcttctgagctatcaccttggaaaaggaggcttcttcattaatcccatctaaggggagcttggccaacaatagctcagagacatcaagttaatagtcggctccctctttaaattgtagacaaaggaaaccagagaatagactgatttcatccaacagagataaaaacaggaatttatgtaacatgaataaaaggaggaggaagggaaatctagagtctgaagagagtacaccttgatttcctttccttggtgagctgctgatgagctggtcaggaggactctgggtgtgtctgtgcctggacaccgggtcatcacagaggtgagaggttggctgtctgggggtgagactggctgtacctgggtcatctcaggaaggcagtggcttcagcgaccaactg

SEQ ID NO: 154928 - DNA, 356 bp, Homo sapiens
ctgtgtcatcccgggctgaagttcctcacgtgatatttagttgcttgtggccaaaacccgccttcactgcaaatgcatcggttcctcatcatttctcctctggaccagcaaggggctttcctctcgcccatccatctcccaccttttcgttttgtaggtagaacctggagggagcggcagtaattcatcatccatggaacgtgcctgtctgtggcctggacctgtgggatttggccggcgttccctttgcattacatttggtacttggaagcaagcatcacacagactcagaacagaggtccatgctgctctctatctgggatgacttatgaggtcttgattgcttactctgtagt

SEQ ID NO: 154929 - DNA, 379 bp, Homo sapiens
tataaaaataccatcctttggataatgtctgggaatgttgctcatctatgagtggcacattctcctatccaactccctaattgaacttctgctttagaagacattgtgctgtctcttggtagtaatgaccttgtcctagaagagatgtttcctaaatagaaaaaaagaaaagcactcaaataatatctgtagatagtataaaaatgtaatatattttgaaaacaagattttttttgttatctttgtttctgtcatgcattattctgttcagaataagtatagtgaatatttatatttttattttagaattttatattaaaattgcagaaatgtctaactaaatgcattaaaagtaaaattcttgttagctaatgaccag

SEQ ID NO: 154930 - DNA, 261 bp, Homo sapiens
tgtgaaagcactctccgcagtctccttaacagtcaactctaaacagtttcattaagaaagcagttagatcacatggcagcctgtcccagcttaaggaagttttgaggctgatctgattctttgctttcgcagcctgattctgctaaaagtgcaagccatccttcctagtcatgctatcatccctgctgaagaccccccctctctcctctctcaaagtgtcttcccatgcaggaatgtccgttgatgtagattacaaacctt

SEQ ID NO: 154931 - DNA, 148 bp, Homo sapiens
caggaaagtcacagaaatttcaatgattggtccaatgttccgtttctttttttaattagtcagataccataccctgaacttgtttcaacatcttgctttatttccagaatgtgccttaattgcttcctaatttctgtgcccatttcaa

SEQ ID NO: 154932 - DNA, 419 bp, Homo sapiens
tattcttttctttatttcccaaacatttatgaagtgtttactttatgtcagacatgtgtgagaaaagacactgataaaagatccaatccctaccctcaaggagctgcctatatgattggaaaggcaaaaacagaaagaaagccatcatgtactctatataaagtgcttttcttatctgctgtaagtgtgttatttaagtcagactctcctctggatcccatgcccagctgggtcctggccaaagcaaggaaggcctcagttcccttggtatatgctgggctgaaaaaccacaggagttcctcacacattcttcagccttgaaatagtatccaaaatgccaaagcattttagaataaagccggattctcaaaattaagaaagatggctttaatagctatatttaggattttgatatgtgc

SEQ ID NO: 154933 - DNA, 647 bp, Homo sapiens
cagagtcactttagcctaggtttgagttataggtcaagccacttactacctgttaaccttggacacattatttaaactttctgagcacttgttttctcatttgtaaagcgaagatgttaaaaataatataaattaacttttgaacatggcttgagaatgtaataagttaacacctttacagttatgtagagcagtgcctgaggcacagtaggcacacaataaatattagcccttattataataatcatcttatatagtgagattggtctcctagaagggcagtgaaaatattatcaaaagaatcaccaattgctgctcaggagcattgaaggagcaccttgagttggagaagtgtcaacaattttgattgaagctagatgagcgtgtctatgcctagtgggcaggccttaatttgctgcttcttcacatttcactggcgattaaatgctgagggacccatgtctctgatacctggcttggagcccagtctcctgggatgctatttcaacttgacccagctataaaagcataggaaccccagtcatcagataaagcagtagagcaacgaaggtctgtgctgtctggtcaagggttagatttggatggttagggagctggaagatattggtatgggattgtggggttgg

SEQ ID NO: 154934 - DNA, 336 bp, Homo sapiens
ggataggtccaataataacatggaattcctacaattattttgttttaaaaacatcagagtttaatatagactctggcttttttagtcatgagttgactcgctcttttgggccaaaaattactgtgacagagggcaacagaatagatgttcttttcttagttgagaaagatgagcttcaaatacacttccaaatttttttctgcatgtgtttaaaaacagagagaatgctaccataatagtatgtcaggagtcaggaatgttttaaatctgtgctgtgctaatgcatattttacttattatataacttaattttatttactcccaaaaagcagctgg

SEQ ID NO: 154935 - DNA, 226 bp, Homo sapiens
ggcggcagtctcctgttgcttctcggagcttgactgccctttggaaaaatctctccgcccctcgagaggagagaggagcagaggacgcgcgcgagcacagagcgggaggacggacagggagaggaggagagggggtctgcgcgcggccgctacccagaagccagcggacggcagcacggagtgggctgtcccgagcccagccccgagcgagccccccccccgcccc

SEQ ID NO: 154936 - DNA, 428 bp, Homo sapiens
cctgcctcagcctcctgagtagctgggattacagtcatccgccaccatgcctggctaatttttgtatttttagtagagacgggatttcgccgtgttagccaggatggtctcgatctcctgacctcgtgatccgccagccttggcctcccaaagtgctgggattacaggcgtgagccaccatgcctggccttgtactatgtgttttatatacagttgaccactgaacaacacaggtttgagctgtgcggatccacttatgtggatttttttcaataaatacagttggctctccatatctgtgtgttccgcatccacaagcaagtgtggatggaaaatgccaatatttgcaggatatgaaactcaccaatatggagggctgactttttgtatacatgagttcccacagggacaactgctggacttgagta

SEQ ID NO: 154937 - DNA, 358 bp, Homo sapiens
ctcacctcagcctcccaaagtgctgcgattacaggcatgagccaccacacccagcctttttcttttcttttgtagtaatggggtcttgctgtgctgcctaggctggtcttgaacccctggcctcagtgatcctcccaacttagcctctcaaagtgcagggattgcaggcgtgagccatcatgcccgatctaagaaatattatcttggggaaacagggaatctatggccacactcattactatggtgtagcaaaagtctgaagctaagcagtactttttgagctttggatgggacatgtgctatctactgtgtctggccccaacagctcccttaaccccatgtgagttgccatttatca

SEQ ID NO: 154938 - DNA, 453 bp, Homo sapiens
ctgtaattgatgaacaactactagaatgaattattgtacttgagcacttagaatcatgtcaggagaggcatgaagtaagtagaacatatttgtgtagagataataattttactttctaaagcagtgattttgaaactcttgctgagagtgtgctggaggaagtcaagcatttcatcccggtttcaaccagtgctgttttattttgattaattttaagcgtggaagtttgcatagtatttcagttgagcaaggttctgttgtttaaaaatacgatagcctctattgttaccatatttgctcttatcacttgcctgcttaaatccttgctatttttttattgttattacgactgataagacttttctttccctagctccaactttattctttatctctgatcactttttcctttccatgtaaaccctgcattctaattctacttaaattgtttga

SEQ ID NO: 154939 - DNA, 2055 bp, Homo sapiens
gattttaatgcactttattgtgggtggatatttgagttgcttcctttctggggtaataacactcacttggaaatagctgtggtgaacactcgtgtgggggtgggggtgggggccaactctaggagcacctaatggatcttacgaagcgtgttgtccaagtatagagatgattccaaagtggttggactgtgtttctttctcccagctgggtggaaggagaacactagtggattgctgagacttggtgctcggtatttttaattatggacagcctggctggcgttttgtggtgtctaattgcggagtagcgtgtcttactgtataatggcctcttttgtatgtgggagaccatggtgttgaggggaggcagttacacaaaaaacccagataccgagtgttagttccatgggtgtggctggtcatggtgcgcactcacgaaggatgtaggtgatgccctccactccgcagagccagtcccacaggggtacccattctgactcctaccaccgcagctccctacctcccgcctgccatgggttccacgtgcatggctctgggcagtctgtgtctttgcgtgcgtctgtgtatgtctgcgtgtatctgcttacattcgctcagcatctgagattcacccaggcttttgcgtggatcagcggcagactcctgattgccgcgtggcggcctgttgtgtgggtgtgtgccgcgtgtgtatccagtccctactcaggagtgtacgtttccagtgtgggttgcagtcaggatccatttctcccttaactttcagattatttgctgcataggcttttttctcctaatttggcgcctttgtcagaaatcaactgacctacctgtgtgggtctgtttctgtttgtccttacgctcttgccattgccacactttagacaaggtcttgctctgtccctcaggctggagtgcagtagcgtgatctcagctcactgcacccttgacctcccatactccagcaatcccctcgcctcagtctcctgagtagtagctgcgaccacaggcgtgtgtcaccacacccggctgattttattttttttatttttattttttttgtagagacggggttttactatgttgcccaggcaggtcttgatctgggctcaagtgatgctcctgtctcagcctcccaaactactgggattacaggttgtaggtgtgagccatggtgcccggccgccacactgtcttggctacagttgggtttataataaaccctgaatcgaggtgatgtgcattttccaactcttctttttaaagattcttgtggctgtttatgtccttggtgtttccatatatgttttacaatcagtgtctcaatttctaccaaaaaaacatgccttctggaatttcaatagcaattcccttgaacgcatttttgaataccttttctgaatgtcttgaatacatgttgggaagaatcggtgtcttaacagtctccagtgtccacgcgttgactgccgtgtgtgactccagtcggcgtctcaacagtctccagtgtccacgcgttgactgccgtgtgtgactccagtcggcgtctcagcagtctccagtgtccacgcgttgactgccgtgtgtgactccagtcggcgtctcagcagtctccggtgtccacgcgttgactgccgtgtgtgactccagtcggcgtctcaacagtctccggtgtccacgcgttgactgccgtgtgtgactccagtcggcgtctcaacagtctccggtgtccacgcgttgactgccgtgtgtgactccagtcggcgtctcaacagtctccggtgtccacgcgttgactgccgtgtgtgactccagtcggcgtctcaacagtctccggtgtccacgcgttgactgccgtgtgtgactccagtcggcgtctcaacagtctccggtgtccacgcgttgactgccgtgtgtgactccagtcggcgtcttaacagtctccggtgtccatgcgttgactgccatgtatgactccaggtattgagttcatcttcaacttctcccaacaatgaactggagttttctgtgaaaagtctg

SEQ ID NO: 154940 - DNA, 2165 bp, Homo sapiens
gattttaatgcactttattgtgggtggatatttgagttgcttcctttctggggtaataacactcacttggaaatagctgtggtgaacactcgtgtgggggtgggggtgggggccaactctaggagcacctaatggatcttacgaagcgtgttgtccaagtatagagatgattccaaagtggttggactgtgtttctttctcccagctgggtggaaggagaacactagtggattgctgagacttggtgctcggtatttttaattatggacagcctggctggcgttttgtggtgtctaattgcggagtagcgtgtcttactgtataatggcctcttttgtatgtgggagaccatggtgttgaggggaggcagttacacaaaaaacccagataccgagtgttagttccatgggtgtggctggtcatggtgcgcactcacgaaggatgtaggtgatgccctccactccgcagagccagtcccacaggggtacccattctgactcctaccaccgcagctccctacctcccgcctgccatgggttccacgtgcatggctctgggcagtctgtgtctttgcgtgcgtctgtgtatgtctgcgtgtatctgcttacattcgctcagcatctgagattcacccaggcttttgcgtggatcagcggcagactcctgattgccgcgtggcggcctgttgtgtgggtgtgtgccgcgtgtgtatccagtccctactcaggagtgtacgtttccagtgtgggttgcagtcaggatccatttctcccttaactttcagattatttgctgcataggcttttttctcctaatttggcgcctttgtcagaaatcaactgacctacctgtgtgggtctgtttctgtttgtccttacgctcttgccattgccacactttagacaaggtcttgctctgtccctcaggctggagtgcagtagcgtgatctcagctcactgcacccttgacctcccatactccagcaatcccctcgcctcagtctcctgagtagtagctgcgaccacaggcgtgtgtcaccacacccggctgattttattttttttatttttattttttttgtagagacggggttttactatgttgcccaggcaggtcttgatctgggctcaagtgatgctcctgtctcagcctcccaaactactgggattacaggttgtaggtgtgagccatggtgcccggccgccacactgtcttggctacagttgggtttataataaaccctgaatcgaggtgatgtgcattttccaactcttctttttaaagattcttgtggctgtttatgtccttggtgtttccatatatgttttacaatcagtgtctcaatttctaccaaaaaaacatgccttctggaatttcaatagcaattcccttgaacgcatttttgaataccttttctgaatgtcttgaatacatgttgggaagaatcggtgtcttaacagtctccagtgtccacgcgttgactgccgtgtgtgactccagtcggcgtctcaacagtctccagtgtccacgcgttgactgccgtgtgtgactccagtcggcgtctcagcagtctccagtgtccacgcgttgactgccgtgtgtgactccagtcggcgtctcagcagtctccggtgtccacgcgttgactgccgtgtgtgactccagtcggcgtctcaacagtctccggtgtccacgcgttgactgccgtgtgtgactccagtcggcgtctcaacagtctccggtgtccacgcgttgactgccgtgtgtgactccagtcggcgtctcaacagtctccggtgtccacgcgttgactgccgtgtgtgactccagtcggcgtctcaacagtctccggtgtccacgcgttgactgccgtgtgtgactccagtcggcgtctcaacagtctccggtgtccacgcgttgactgccgtgtgtgactccagtcggcgtctcaacagtctccggtgtccacgcgttgactgccgtgtgtgactccagtcggcgtctcaacagtctccggtgtccacgcgttgactgccgtgtgtgactccagtcggcgtcttaacagtctccggtgtccatgcgttgactgccatgtatgactccaggtattgagttcatcttcaacttctcccaacaatgaactggagttttctgtgaaaagtctg

SEQ ID NO: 154941 - DNA, 433 bp, Homo sapiens
tcacttttttaaaatgtacttttttgggaatagataatgtgtacacattgtttaaaaccaaatatggcatatagtatctaagcggtttaaaaatttttttcaatgggttaacatgcagttagattttaaatcatttaaaattttaaccttaaacatcaggaacacttaagcctgcattaaaaccaactcaatacaacataataacaatatcgatccaaattaaacacgaaagaaaacttaaaactgcttctctggaaatgcaaaaatgacaagtaatttttaaaatttctaaaagcatttcagagatcacacataagtcaaacgaagttgggaggccaggcgtggtggctcacgacgtcaagagatcaagaccatcctggctaacatggtgaaaccccgtctctactaaaaaatacaaaaaattagccggacg

SEQ ID NO: 154942 - DNA, 950 bp, Homo sapiens
aactcctgaccttgtgatccacctgcctcggcctcccaaagtgctgggattataggcatgagccactgcgcccggctggtctctgacacatctaagctatgaaccattagggtaagtttctgaccatctctgagccccatctatgaaagactcatagggaggttgaaattgcaccacatgtacgatatctggcccagtgtaggaaatgtataaatgttagcttcatccctcagggaagcccactgagatccacacgaaacttttgtctgtgtctccccataatgtgacctttagaagttgccaatggcccacccaatacccaaccatgatttttctgagataatctgcccgaggtgtgtgagaggaaacgcgaagaaggcagtcaggaggattcactcttgggggagctgggtaggatcctatctcctcctacatccagagcatgcaggctccatttagatacaaaggggtgggattgggttcctggggagaaattgagcccctttgattctgcggttctgtgggtctaaatctggcatctccttggctatccacccccaggctttgtgattggttggctgtggttggtgggggggcaggaagctgctggtggagctgcagcatccttcagtctcaggcccctgggagggggaggggaaagaaccagggctgagctgtggagtgaaggggagccatttctctccaccgactgcaacctccgtgctcacagctcacggttcaccagaatccaggggcttggtcggcctaggaatccacaatgctggatattttcatcctgatgttctttgccatcataggcctggtcattctgtcctacattatctatctgctctagtggcctggagctgcggccggagcctgctggagaacagctcagaaggaaggatggagatgaatggccgagtgccctgcttgctgacgcaccggtg

SEQ ID NO: 154943 - DNA, 311 bp, Homo sapiens
agaaactgagacctaaagaagtgaggcctgatttttccaacatcacacaatttttactggctgagactggtcccctgatgcctaagtcaaatggtctccctttccataataacacttctgacatcctcctagtttaaaaatctcgattctacattgaatcagttgccagattctgtcagttctctctcccagacttcccatttccccttcttattgcctaaccaaagaaaacccactgtcagcttgttgtgtgcagggtcattgtctcttgtgttccaagcctttttgcaccctccacaagtacagttcct

SEQ ID NO: 154944 - DNA, 115 bp, Homo sapiens
tgaaggtgttgggtgctggcaaacaaatcagatggttccaggcagtcaggatggacgtgctgccttctgcctcggaaggtggtggggtggcccaggtgcccgccgtgcccttcgg

SEQ ID NO: 154945 - DNA, 347 bp, Homo sapiens
cagagctgccccacggggtgcagatggcatctgggcctgtctgcagcagacaacaacatgcagaccccaccatcccctctgctggagctggagaacaagcagaccacccacagtctccctgactcgggctccaacatctgcctgaggaaaggccggggaggtggcacccagaagctgctgggagggaagggggtgggcctgcctgccgtgcctgggcctgcgcccccacatcccacatgacggcctccccagcccccactctgcaaggaagtgacagaaactccacagaatccagagggcctaggaatgttggtcctgcaggactgtgcagcccaaggggcggccgc

SEQ ID NO: 154946 - DNA, 369 bp, Homo sapiens
agaggttgcagtgagccgagattgtgccatcgcactccagcctgggtgacagagcaagattctgtctcaaaaaacaaaaaaacaaacaaaacaaccatgaaaatacaaactaagggaaaggaaacacagatttctagtagtcttctcctttggcacttggaagcaacattttgctcatttccagagaatattttctgaagccatcaattatctgttacatctgttacattatctcatgaagccatcaattatctgtgcatctgttacattatctcatgtcagggcacctggttcttcttgctggggccagagcagcccatctcctcttcaggaatagcctgaagccaggtctctcccggggttctcttc

SEQ ID NO: 154947 - DNA, 555 bp, Homo sapiens
cctttgttcttaactgctctcaggcatctgaaccctgctggttttgttagtattccacgtgagtttagacagaaatccagcccctagggcagcacagtgaaaagccggatgttggttgcacactctactctctccctccaagggagaagtcctaggccaaggtgatctccttggtgctgagctgtgccggctttggggaggggctgacctgggtaaaatgttcttcttgcctgtttcagtgcaactcttcttggttttgttcttgtctggagtacgacaatatcttaattggtttctggacttttcataaaggtatttttgtctatatgtccttgctaaatcagtgtttctgagaagctgtgagaactggaccttcttctagttcagttttgaccttaactattcatttggtctcaagctactgctttctattcttttcattttaaccacagccatgcattcctactattaaatacagtaattcctcaaatgtgccagcttctttcatacctctgctttctacccagaacatcttttcttactctttggatcagt

SEQ ID NO: 154948 - DNA, 333 bp, Homo sapiens
cccctccctgctttgagttgtcctgcctttcaggactgaaccaatgtacatcttacacatattgattgatgtctcatgtctctctaaaatgtataaaccaagccatgccccgaccaccttgggcacatgtcaccagggcctcctgaggctatgttacaggcacatgtccttaactttgggaaaataaactttctaaattgactgggatctttctcagatatttggaactcactctacacagacacacagacacacacacaaacacactcacaaacatgcacacacaaatacacatatatgtatatttgtgttataaacgtattagtccttttt

SEQ ID NO: 154949 - DNA, 251 bp, Homo sapiens
aaatgaagctctgaatccaagctacttttgcacatgcaattatctgtcctgaagagtccttgtatactctgcctgccttggatgtcatcctaggcaaagcagatagagagctatcagcaaaccggaagggagtgcttaagaaaaagataccagccaaagccaaacaagaactgttcacaccgacattttattatttgcatttctagagtgtttaaagtacttttggattaattctctctttcagacactta

SEQ ID NO: 154950 - DNA, 201 bp, Homo sapiens
accttctccgagaaccagtcctagcagcatcaggggatctaaggatccactgccattgtggacaggtccacaaagaccaacaaagaccatgaccagggccttgatttgaccacatctgactcagcagatcattctgaattaatacttcaatttccttttttttttttttttttttttcagtttgtggaagatgaggtttta

SEQ ID NO: 154951 - DNA, 356 bp, Homo sapiens
tttaccatggcctgaaagaatataatgtaatagattctttttaacggcattaaacattttttcatcagtgcataatctaatcacaaatgggattttaggttagacttttccagctacttaaacagccctcttgagtactcaatagctgttctaggcactattttgtagaacactcctaagtttaatggtgaagattctcagatactgaaaccaatagcgacatttacgatatcccaaaatatcctcactattgacgcaatatcaacacacccccactcaaacactgggatactatgacttttttttccccagagaacctaagagctttaattgcacaattcccattaatcatcttg

SEQ ID NO: 154952 - DNA, 489 bp, Homo sapiens
cacggtgctggtgggagtgtagcagagaggacgaccagaggtcactcttatggccattttggttttggtgggttttggccggcttctctactgcaacctgttttatcagcaaggtctttatgacctgtattttgtgctgaactcctatctcaccctgtgacttagaatgccttacccgtctgggaatgcagcccagtaggtgtcagcctcattttactcagctcctatttaagatggtgttggtctggctcacacgcctctgacacctttgcctctcggggcctctgtgttcccgtcaggacatcggaatctccaagggcataaccctggtgctctgggagcctctctgtcagcactcagcctggatggagggctcagtgcggactccgttttgttgggtcatggttggccagtgctaggctgagctgggctggacacagggctggaggggtagcgcccttactgtagggacaggtgggggtgcaattt

SEQ ID NO: 154953 - DNA, 219 bp, Homo sapiens
cttttatttctaaggatgtttggcgtttgtccagtttccttctctttcaagtggaccaaatatgtacacaacaagttttatgacaatagagaacaaatatggtgctattattaatacatagcttaaggatttcacctaatcttccttttcagttattctttttttgagatggagtctcgctctgtcaccccaggctggagtgcagtggcgccatcttgg

SEQ ID NO: 154954 - DNA, 558 bp, Homo sapiens
cacgtttagacatgggtggtatgggcatcgagttctctgaactctaatcctgatagatgccatgtgatgtgtgagatggcttccaaagggcatttaacacactgtgagtaagatagaactcaatgcccttaccacccatgtctgtgatggtcatgcatgcctcagtgacagtgacttcctgactatccctccagtgactacatcaacgtgtggtacctccgagtaatgctataccatttggccacatgctcagctttctgagaggctgaccaaagatgtgggtagtgttaaaataaaatggagaccaagcttgagaatcccctgatcagacaaaatcagttaggccacctgagtgaaaggtagcttaggtgatttcttgtaaatgcctctgacagtcataaatgaaacacgttggcttctaaaaatggtataatatgatcaccttccactaactccctgccatcttgaaacctcagtagcaatagccaattattgtagagattaagtgacttcttcatttttgttttataccccaggctataataccatatgtctgaa

SEQ ID NO: 154955 - DNA, 769 bp, Homo sapiens
atttactgaaattagaaagcctggcgtggagtggcgagtggggaccaaattcgaggaggagtggggaatcaagaattctatttttgacatgttacaattgtgaggcctgttagacctgcagatagaagtgttgaatcagcaaatgaattcatcaagaaaagagtccgggctagagatactaatttgggagttgttgacgtcttgatgatctttacaggtgtgggatttaatgagcttaatgggaattaagtaaaactattttgcttattacttattatgggtaggtcacagcactttgtgcttggagtataccagcaagcaaggcagacacagtgattattctaagtggtttgctccgagccctgcatgccaccaggaatggtcttgacttttgttattgttaaacttattaaatgttggagtggacgcaaacttagagatgaccaagtacaaattccaaaacctctctcaaatttacaactgaggaaactgaggcatggagaagttaagtaatttgttaaaacctagtgtttaaaaaccatgtatactttagagttttcaataatattcagtccaaagcgttcatattcttcctttttatttgtatttttcttatagtctaagaaaggaagttaagttgaggggatagtaaaaaagataattagagactttgcctaaaagacctatgagagattcaattgaattcaataactaattattgaatgcctattgtgcctgccggattcggtccggctcgattctatctgcc

SEQ ID NO: 154956 - DNA, 600 bp, Homo sapiens
tcctgacctaccctcaactaggggacccttttcttcccccttgccttgcggacctcttctatcaaatctttcaggtactggatctccttggccagggaatcccgccctgctcgtttagagcctcgttcttcttttccagctctttgcactcaccagtaagagcctcctgctccgccctcttcttctggcggtacctagtggctgctgtcttgttttgctccatttttttcagcttcttatccagtttctcaccctttacttttgctgctaccatcttctctccaggaggatcgtaaggtttgggacgggcagacccacagagaacacctggagatgggaggctcctatttggagagcccctggtagaggggctgtgctgaggagaccccagataggactctgggctcatacagatgccactatcattatctgaaggggtgtcttcctcctttatgcactgagggatcatggcaacgtaagcagtggagtccggcttcctatcttcttcagtgatatccacttcactgcccagctctaaactaaaggaatgatctggagtggaggactggacccctggggaaaggggaagaagttgcaaga

SEQ ID NO: 154957 - DNA, 401 bp, Homo sapiens
tgttgggattacaggtgtgagccaccatgcccggcttgtgttaacatttctgatagagcagttcatttcattgtttgaaaactaccctcatgggagcaatgacaagcacatgtctaggattttttcaagcatgtttggtgatctcctaaacatacaggctgttggttaaaaagtgaacataaatgtttagaatgaaacctttttgtttaaatggggaagtgaaaggcttgcccgggcgtttccatctgcctactgtaattgatttccgcataaacggtcattactggcacctattgcagcaccagtattaaactgcatatagtaaaatcactgtgtaaaattgtgttataatctaaacagttctaatgcgatcttaaaaaaaattgtagagacagatctca

SEQ ID NO: 154958 - DNA, 658 bp, Homo sapiens
atttgtctttatattgacaatatgtttagcacagtctctggcaaaaagccagttagtggcacatcattcaggtctccccagatggagaccagtgcttctttttcattacagtgtggaggccctagtcatattctcattatacattaaaaactttaatgatgattgactcttcggttaccattttaataagtcttgattatgagtctaagcttttcaaaaacatctttcattgaataactatatgcaaagaatatatatttatatacttatgttgctgctttgtataaaataggcatggatcagaattaatgtcctctgattctatatttgccattagtcttttttctttttttttcttttgagatggagtctgactatctcccaggctggagtagtgcagtggcaccatctcggctcactgcaacctccacctcccaggttcaagcgattctcctgcctcagtgtcccgagtaactacaggcacaggccaccacacccagctaatttttgtatttttagtagagacagggtttcaccatgttggccaggctggtctcgaactcctgacctcaggtgatccacctgccttggcctcccgaagtgctgggattacaggcatgagccaccacgccgggctgccattagtcttatattaaag

SEQ ID NO: 154959 - DNA, 189 bp, Homo sapiens
cgtgacatctagaggatcccgttactgagcttggttgtctaggcatttgcattttaccaagaagctttccatagccctcatttgttttcaggacagccttgttggtttgtttcccttttcattgtttagaggagaaagagagtcagagctaaaggggtgagtggttttgcctgaggccacctgccagga

SEQ ID NO: 154960 - DNA, 585 bp, Homo sapiens
cagagattttaggaatttcagatttttagtcataaaccaaaatcttcgaccattaaacggtgtttatgaatgtttatgagcacaagggaagaaaatgtccaggaagaggggctcctgagagagtgtcctctgaaattcctggtcttataggagaggcagctgcagaagggagctgcagagggcacacacatgcctgtgtcagcgtctcatgccgacatccacactggctgaatccaacatgttcaagggtgctgcatgctcatccagagcccactcctccggggccccacagtgctaagccatggggctagaagggccacatgtcaagatcacaacttccaaacagacagttgcagaaaggggatggggagaagagcccagaaacacagaggcagcaacctcccaggtatgccaagctttgcactgacactgctatggtacctacagaaatccatgcactaccggccgggcatggtggctcacggctataatccccgcactttgggaggccgaggcgggcctcctgaggtcaggagttcgagatcagcctgacaaacatggagaaaccccgtctctactaaaaat

SEQ ID NO: 154961 - DNA, 321 bp, Homo sapiens
gagaatgacaggctcgctcctgcagccactcaggtacaggcagttcatccaggaagcagtaagggacagagggagaagagagaggacagggatccaagtcccagaaaggagtataagatggagactttgtcttagaaattgacatgaaagcttacttgctaggacaaaggcaagcaagggtctctggagtgttctcaattctgtgaaggcaggatcagcccagagctggttaagatgtggagcctgatggtgccaacaggtcatgaggccattcagggaaaacaagggttaggaaggaggatggggacccacgtacatgat

SEQ ID NO: 154962 - DNA, 366 bp, Homo sapiens
atgaatttattcagggtcatctagcaaggtcagaacacaacaaatacaaacatcccttcctggtccacatccttaacaccacgctgtagtcattcaacaaacatttatcaggcagagatctgctgggcatttcacttggtagatgggctcaactcagctggttcctgttttcaagcagcttataatttaaggaggaggagggagggagggaggaagacagaaaggagagagagagatctttaaacaaacggcagagccaggcttcagtgcctgaccaggcttcagtgcctgaccaggcttcagtgcctgaccaggcttcagtgcctgaccaggcttcagtgcctgaccaggcttcagtgcctgacc

SEQ ID NO: 154963 - DNA, 139 bp, Homo sapiens
catgctctgtggcagggtctgggttaaacaagagagttgaggaatgctctcggggagtgtgcagggtcattgttgttattgtagaacaggaattaaaagaaattttaaaacgtgtaagcaaaaactcagttctatgtta

SEQ ID NO: 154964 - DNA, 531 bp, Homo sapiens
tcagtggtcgtatcatgcttatagcgtttctatttgtaccaaacatcctgtcagagcttaactgtggctggcttaagtgccttttggctagtgctacacttatactgaaaacattaggaatccttaactttgggggtggcaggtgtgatgaaggcactaattgtgttccttttccagagagtgagttaggatgctttggcattaaagctggggtcaaaatagggcttggggtgttggcttcactcgatgaagatgaataatcgagtctctgggattgaaattttttattcagttcatccgaggaactatcttgttcctttttacttaattcagaatttccctttccaagaggactatttagagctttccactgtgcctcctgctgccaagaatatagcttcttgtgttctggtctctttatgccaaaagtctcttcctcaaatatagagctgctgtcatcagatgctgtcagatacatttcacttcccatcctgctacactggaccccttcctcagatgtgtgactggaga

SEQ ID NO: 154965 - DNA, 595 bp, Homo sapiens
ctgcaccagaggaatggaaaaatgagataggaaaaaaagccagcagtcagcgtgggtggagggggcttctggaagccagagtgtggccccggggcgtggaactgctgtgtgtcagcaggaatcccctgcctcctggcctggtgcgcacgtgcctgcggggcccatcgggcagcagttctgaagtggataggaagggacaggcccactgcctcaggactccaccttggggcgttcgagccacctctgcattggagaagagtccttccatccctctgccagtgcttaggccacttccctaccaccagaccagctctgaggcctgaatggcgtgcagatggcacttagcattccagagaatgcttgtgctggtgggagagccatgtagtcacatgggcgtcttcatcagggagcacgtgagctgggatgacacagcatggggagatgaggaggatgtatcttctgggtataaaccccttaaatgggggtcatcaccacccatgactgtcagcccggcgctgcagctgctcccaccacctccccaaacctggctgctatacccaggaagggtcctggcttcccttctctgtgcctggcc

SEQ ID NO: 154966 - DNA, 565 bp, Homo sapiens
tacaccccgcttattcagcagccaagatccctgacaactcaacatttggaactcaggtatgatttcccaaactatactcaggagcttaagggagtgtgtctaaaattaaagttaatgagttgaacaagcttaattattttgtttcctctggcaaacttccagtcttcctgggtttaatccaatggaagaaatggttattgagtgcctacttgtacagggcaccctgttaggctgtgagaggggtacagggagagctgagaacagatcataattccatgggaagggaggaagcagacatgctgaccgcagcaagatggaaggaaacagaatgatcgccagctagaaaagaataaaagcctctgagctctcgaattagcactaataacaccagaaaatcaaatagcccccaaggctggagtacagccacgacagtgcctggggtttcataacaatgactgagtcggaaaattaaaagaacagaaaaagttaagatgttactaactcaatttcctatggcacagaatgatgtcagacattttagaaaaaagtctaatcaaaacaagcg

SEQ ID NO: 154967 - DNA, 196 bp, Homo sapiens
attatttccttgggataaatttctagaagtagaattgctaaaacaaagactatttaatatttaagctacttaaaacattggcaaattgtcatctgagatgttgtattgatttatagtccctctgtagcagattgtgtttttaaagacggctgcacctatatgtcccattccacatgctcttcttattgtgtgactt

SEQ ID NO: 154968 - DNA, 483 bp, Homo sapiens
taacaaatgcatgacattaattttaaatttaacaagatagccttttaaaggaatatattcccctacccagccccaaaaagcatttatgtcctgatgaccacaatgaataactgagctgaagaaacaacttgtctttgtcagggagataaaattcttctgccacgtttttaccttccattccttagcattgtgtctgtggctcttcctaatatcactttccccaggagtgggaagaccctcttataattattggaacatttccactgtagaacctgtgacaagttaatctttttggaatggcagtcagatagctggaggtaaagccttacgtgccagatcttctactttgacacctttgctacactatatttctaaaatatccatgtacttggctgacttcttaaatgctgagcaaaatttatccttgatggctcagaattattgttatgagggtatctattactattatgtattaaaatgtac

SEQ ID NO: 154969 - DNA, 532 bp, Homo sapiens
aatggagtcatgctgagaagaaggaatgctatcggtgaaggggaaaattgacattaaatttgtgagcagtaaactgtgaccagagcatagggttcatcatgcttgtgagttctggccctggcccttgtatcttccattgtgcttccctgaggcatcctgtctgttcatgctactttcccactaacttcagtgaatcccaaattcatgggtctagccacagccagcgtactgaatcccagtgccatattccagaccccaaatatcccatgtgcctctgaacctgcaatcaatgtgtataacactcatgtccttctggaaatttacttgttttacacactctattctgagttctcttggttggcctaaactatccatgatgccttcctctccctcacccattatttcttattagttgcaagttctgtatatttggccttctgtgttcatgtgaaatctctgcacatcccctacttacctgagatcctgtcctctcatcagtgtcattagactcccagccagtcaccctacctct

SEQ ID NO: 154970 - DNA, 675 bp, Homo sapiens
gtggcaggcagaatctaataacatagccccaatgacctttgtccccagtgttattaccatcctatgttattgcatggcaaaagagattttgcagatacaattaaagttactaatcagttgaccttaaaacagcaaaattatctgcgtggccctaagctaatcactcaaattttcctgtcttgtagcagaagggaagtcagagagatctgaggcatgacagggatgcaacatgagggaggttctactgctgagatgaagcagcccacaaaaaaagaccaaaagtggcctctaggagcagacagcaatgctcagccaatagccagtaagaagacaaggacttcagttctgtaactagaaggaactgaactcggctaataacagggttcagtctgacagtggattcctttcagagccttcagataagaacccaacctggccagagaaccctgtcaagcacacccagtcttctgacctaaagaaccatgcatgaggtaataaatgggtgttactttaagtggtgctttgttacgcaacaacgaaaaactaatacaactgggaaacactgatgtacaggtttaaaaatcacccccacagaaaccacaggaacggatgacctctcccatggaaagtatatctgaaaaagccttgaaggatgcctacagttagagtgttttt

SEQ ID NO: 154971 - DNA, 557 bp, Homo sapiens
tgctacaaagaagacatgttttagacaaatactcatgtatatgggcaaaaaactcgaggactgtatttgtgactaattgtataacaggttattttagtttctgttcttttgtttaaagcattccaacaaaaggttttaatgtagattttttttgcacccatgctgttgattgctaaatgtaatagtctgatcatgatgctgaataaatgtctttaaaaaaaaaaaaagttgcacacacacacacacacacacacacactaaatatatgcatgaaagcatcaaataacttgaaagatagtaaggtatcagagagacaggatctaaagagggacaccctacatttataaccactttggtccctgagagcaattgccaagtgttaaggaccagctgagaacttgacagcttggtaagattaggagaaaagaactaaaattcggaaaataccaaagggggttacagggggactggtaaactcacctcccttcgagttggaatcctgaattgctgaacttaagaaggagggaaaagggaagctgccaggctctaagacatgt

SEQ ID NO: 154972 - DNA, 311 bp, Homo sapiens
tgctacaaagaagacatgttttagacaaatactcatgtatatgggcaaaaaactcgaggactgtatttgtgactaattgtataacaggttattttagtttctgttcttttgtttaaagcattccaacaaaaggttttaatgtagattttttttgcacccatgctgttgattgctaaatgtaatagtctgatcatgatgctgaataaatgtctttaaaaaaaaaaaagatcatttctttctgtttttcgattctatattattacatacttatagattttaacttgtttcctcatctagctgaataatctcaa

SEQ ID NO: 154973 - DNA, 490 bp, Homo sapiens
ataatatttattttaaatagtggagatagggtctcactctgttgtccacgctggtcttgcctcaagtagtcctcctgcctcagcctcccagagtgctgggattacagatgtcaaccacttcacccagcctgtgctgtctttattgaaaatagcaagcgatgattttccaaaccagaaggccaagcaggaaagcccagcgcgtcccttgccctcaaactcagctcttggggaggtgtccagtgacgtcctctctgctgtacaggatgatcccaccccgatcgttaggaagatgtgccccaggaactcgggatttccttagtgtggtgattaggggtgaaatggatcctttgatagggagtttcttgatggaacgaagggcgagagtgtctctgagaagtgctgcagaccaaggagggccagcctgtcctggagcacctggggctgttcttggagtaaggctgaagggccagacactgatggcttatggtgg

SEQ ID NO: 154974 - DNA, 400 bp, Homo sapiens
tctgcctggaatgctcttcctccagacatctttcaggcggattcctcaccattcaggggtcaaccaaaaaaagatattgccttagagaggaagggctatccagcccgaatgaggaatcctactcttgtagattgaatcgtccctcctgaccctaccaaaaaaatatattcaagtcctaactctagatcctatgaatgggaccttatttggaaatagtgtctttgcagatgtaatcaagttcagatgaagtcatactagacttaaaggggtccaggctaatgacagctgtccccgtgagaagaggaatcaacgcacatgcactcgggaagaaggtcacatgaagacagaggcagagatgggagtgacacagccacaggccacagagggccaagggtctcca

SEQ ID NO: 154975 - DNA, 509 bp, Homo sapiens
caggcagtctaggttcgttcttgcttgatttttccttataatttatttgttgaaagaactatttctcagaatctggattttcttaaaatgcatcctcatggtgttaataagttcctctgtcttctccattttctgtaaattattagttgggtttagagcagtgattttctgactaacagcatcagcatcatctgggaattgtaggaaatggtaattcctactcatcccagagaagctggccataaaagtcaccatcttggtgagacctagcatctcaattctgtgaagtcacccattgaaagagatcaaaacaattggagtggagaggggtgaaatattggatgaggtagtggttggtctcttgatggtatggcatgcctgttatttctatgttttcatttcatatcaatcaaaaattggggtttttgcataacagatggaatgcaaaaaagaaaaaaaaaggagtgttgaacttatggttaaacagttaacttagctgatttaatgta

SEQ ID NO: 154976 - DNA, 167 bp, Homo sapiens
gggacagaggtgtaagaattatctgacaaagaattcaacatagctatcataaagatgttctatgagctcaagaaaattgttcataaacaaaatcagaatatcataaaaaagaaactataaaaaattaaacagatattttggagctgaaaaatgtaataactaaaaca

SEQ ID NO: 154977 - DNA, 472 bp, Homo sapiens
aattggttggtcggttgcctagttttgagacggtatcactgtgacccaggctggagtgacgtggcgtgatctcagcttgctgcagcctcgacctccctggctcaagagatcctcccacctcagcctccagagtagctgggactacatgtgcacatcaccacacccatctagtttttgtattttttgtagagacggggttttgccatattacccaggctggtctcaaactcctgggcttaagttatcctcccacctcagtctcctgagtagctgggaccacaggtgcaggccaccatgcccagctaatttttggtatttttgtagcattggtggtctcaccatcttgtccaggctggtcctgaactcctgggctcaagcaatttgtccaccttggcctcccaaagttctgggattataggtgtgagccaccacacctggcccgctatccctgtttttttagcattcatggtaa

SEQ ID NO: 154978 - DNA, 377 bp, Homo sapiens
ggcagaggcgtgcgtcatggaaaacttggaggctggtgattgggccgtctctgctgcaaagtcaagtccccgaacgcttgaaaaacaacataatgtattcctgtctgcagctctgagcgaaagctcattttgtgtcctgtgtttccatttcctgaggattaataagtgtggaggggaactcgggcttcgtgccgaatatttatttagtcaatatacgcatcaatttagcaaattagagatcgcaagccatttctaagcaatgctgtaaaaataatagctgtactttaaacttgtaatggattttggtttggtgggaggtggtggctactacgtgcctggtacttgataaacaaagaagtttagttctccttaaactt

SEQ ID NO: 154979 - DNA, 275 bp, Homo sapiens
gtctaacactggacctagcacatagtaggtgctcaaaataagctggctgatgaacaatcttttcaactttccagaaaacatctcacccttctccttccttctcagctctctctgcacagcagctctgttctctatctcttacagctgttcttccattatttcctcttatactcttctttccttcttcattgtcagaagagaaagaggacacatttgggaagtgaagaaaaaccctagccaggatttctcactaataacttgacactgaaaacatt

SEQ ID NO: 154980 - DNA, 367 bp, Homo sapiens
attcacactcctctcactgtgaccttggagaccctcgctctggcccacccctcctgtgcctcaccttgctccttcttccccgtcatcccagccttgttttctctgagcctgttgaggtccttgccttggtggctcccaacggatgttcttctggccagtgctgtgctgccaatgccaccaatcccttccaagcaggctgatctgctgggagctgtagccctggcgcgtcccgacatggattcccacagcgtctgcctgtcccgtcatgctttctctctggagtcctccctccttggtatggtatgtttctgctctgttcttttgtgaccaggaaagaatgtcttgtttcttccatccagccctcctg

SEQ ID NO: 154981 - DNA, 488 bp, Homo sapiens
tggccatatttctgcatccccatcttctcaccttcccatatgagggtacttaccccaaggacagttaatccatggccatgaacctatatcctggttagaaaagataatctgtgccaaataagacgtcttgggagtctgaactgaaaatagggaacaacttgagcagtttatagtaggacagaaagaaatgacatggaattcggttgagccatattaatagcagagaaccagagagaagatcctgctatgagctcttaagctgtcatgaatccagagctcctttccagctctggtcttcagggttgtcctatggcagctccaggtgtccctgttatcctgttcttattattccatagacatctacataagtttgctagggctgctgtaacaaagtaccacagactagacgaacttaaccaacagaaatttatttcctcacagttctggaataataagaacaggataacacgttcgcgaggggtaccgag

SEQ ID NO: 154982 - DNA, 540 bp, Homo sapiens
ctgagccttcagggtcaaggggtgccagcccccagggagctggggaaagggcacttctggcagaggagagaaaggactcatccagggccttcgtggaacagaaagaggggcagtgggctggcatgcacaggctcgcttcaggtgcagtaagacctgtcacctccaggagggcaagacatcatctgtggtgctcatcgttgtgtcccacttcatggaatagtgctgggaatatggtacacactcaagaaatatttggacagctacagtggctcacacctgtaatcccagcactctgggaggctgaggtgggtggatcacttgagcccaggagttcgagaccagcctgggcaatatggtgaagcctcgtctctacagaaaaatttaaaaattagctgggcatggtggaacgtgcctgtggtcccagctctcaggaggctgaggtgggaggatcacctgagcccagggaggttgaggctgcggtgagctctgatcatgctattattgcactccagcctgggtgacagagtaagatcctgtctc

SEQ ID NO: 154983 - DNA, 398 bp, Homo sapiens
tttgtgtatttagcatatttacatttatgtgtaaatagccagaaggtacattcggttcccataatttaatatttactgttcaggcacatctaagagcataatggtttcagcaaaataagagaggctttgtaaatcttatatttaattttgatactgaaataggcaatgataccattacttggtgaattattttaactttgaacatctttgaggcacaaaaaattcaagaatttttacaaacacaaactttaccttaaaaaaagaagacacttacactctgaaagaattagtcttggaaagtcctcaaatctagactaataaaaggtcttaaacatctcctgggaccaaaacaaaaataccaccaaatgatctctttcagaaggacgaatagatagttg

SEQ ID NO: 154984 - DNA, 282 bp, Homo sapiens
tcagacaggagagaatccaaaaacaatgaaaacggaaggaaaaaacactgaagtcaagaattctctgatttttttgaagctataaaatgagagaagcggagggaaaaaatcacataacgctcactctaaatcaagcaagatcaaacagtcttggaagggatattgccgattcatttcaacccaagagtcatagggaaacaattaatgggtactgagtatcttactcagccttctgcaaatctatcaatgtcgtcacggattttttttttttttttttttttt

SEQ ID NO: 154985 - DNA, 647 bp, Homo sapiens
ttagatcatggacaacaccatgacccaggcccctgtggctggtgagacttctgggccctgggtaccacagactatactctaaacatggtctttactatctcagatcctgccctgagtgtcctttgcagcatgttgagtattagccattttcaatgtccagttcaagtgccattgctggtaaggcttctgtagttcttattggaagaattgtcactctatgtcccagtaatagtactaatttggtttcttattttaacatatcatttaggaatcataccatagtttgcataatggttaattttatgcctgcttcttctattatttacaaatccctttagtttgggctgtgaaatattcaattcccaaaacatcacccaatatctatatgttaaaggcttgttgaattgtattccatctattagttcagagttatttgctattcttgtttaaggacaatgtatgtattaaagagcaactaaaaactcccattactgtttgccaacccagttgtcttttgatttctctgtcaacttacaagtatcaaatatctaagtcacagaacccagagacacatcaaataccccaaataccccatggtagttttcggatgaactctgacagctattggccatttctggtgcaagtca

SEQ ID NO: 154986 - DNA, 613 bp, Homo sapiens
tagaggacccgtgctgttgcgtaggcagatgagctgtataatatgcctcatagggatagtacaaggaaggggtaggctatgtgtttgtcaggggttgagaatgagtgtgaggcgtattataccataagctactagcttgggtgaaggagtgaggaaacttccaggcaggaaacaagacagaagttaacaaaggtgttatggaagaaatgtcaccatttgagcacacctgagctagatctttaggatctatgaggggaggtgggatgaggactgtcataagaatttggggaggaaaatcattgtgtggcagtaatggtctgggcataaagccggcagaaaagccctggggaggtgaagaacaagctagaaacaagcagtaaatgccagcattttagaggtcatttagtcaaacacatatacccgtactttgttgatgatgccccgctggcaatgggtaaaaaagttagttcattttttaagattacatcttacaaaccaaaaactgtatcagcgatgatttctacttcgcttagtttttgtttttaagactaacagatccttcccttgttttgtttttgtttttagacaaggtatcactctgtcatccaagcta

SEQ ID NO: 154987 - DNA, 280 bp, Homo sapiens
gacaacattgtctaagatctaaacctgagtatctccagcttttcctgatgataagaatcacttgtacccacatctgtaatcacagattcctgggccacctcctccccaggagcttgtgatctaagtgattgctcctgctccaagcaaggaggttgagttgcttccttgtagctcattggtcctctctttcctctgtgaggcctattcacccaaagtacctctttcctaagaggcttctcttcccaaacccctgaggctctcagctctgctcaccattcag

SEQ ID NO: 154988 - DNA, 461 bp, Homo sapiens
cctgattagaccagtacaaagtacaccctgtctttttgtttggggctagaaagattcatacagatactgggagacatgctttgatcgtttaaatttgattttcctatttaaaagtatttggcttagggatttcttacattttcaaggcttaaaaaaactggatccttcccagcctctgagtttgttgggtgcttggagtggtgtcctttgtgagtccttaggacctaacaaatgaggctggctcctaaatggtgtgttgtagaagaaagagtgttttctaatgagtgtgggaagccagaggcaccatcagcccggccagagaaagttccctctccatttccaagaaaaataattaaaaaaaaaaacttcattctaaaccaaaacagagttggattgggcttgcaggctctatggggtatgttatgccacagttgtctacatgttgccaccaacataaaaca

SEQ ID NO: 154989 - DNA, 595 bp, Homo sapiens
ttaataggaaaaaatcctccagtaagctttttgagtgtatttaggtcttttccagtagagagaacatactgctatttggaggtagtaaaagttattcaagtggtgttcctttcaataaatttcttttcaacatccaagttgcaagccttctcttcagttttcttatgtccttgaaccacaaaggacagttgagtccagaatgatatcagtgtgattggatccaggcttataaaccaaataggtttttactgatcatgatcacaaccaattgacactttctttttcaccatgtatactatgtcagtgaggtacccacagaggttgtcttgtcaacagacagacattcaggtccttcttggggaacaaaagactttcatatcacgtttttttgcatgtgatgcttgtatgcagaacctatggactattttctacatagaaggtctatagcacacaatttaaattggcctgagaccagtgtaattacttaacttggttgcatgcccaggtccgtttcatgacacataccagtgacaaatgttctcattgcaagaagcttttgagtattttcccccttttgtttcttaatacattatca

SEQ ID NO: 154990 - DNA, 294 bp, Homo sapiens
accatagaatacacattctattcaacagtgcatggaactttctccaaaatagaccatatgataggctataaaacaagccttaatacatttaagaaaattgaaattatatcaagcactatctcagaccacagtggaataaaacaaaatcaactccaaaaggaagcttcaaaaccatgcaaatattaggaaattaaataatctgctcctgaatgagcactgggtcaaaaacaaaatcaagatggaaattaaaaacttcttcaaactgaatgacaatagacaacccatcaaaacctc

SEQ ID NO: 154991 - DNA, 437 bp, Homo sapiens
cagagaggacatttctgcaccctgcccccctactaggtcaggcctgccattattatcaccccctccccagtgtcctaaactcctccttcatggcaagcatcacattcaacatgattttgtgtgtgtgcaattatctgtttaaataaatctttctctctgaggaccaggactgtcctccttcgacatgacatcactagcgtcagtcgcaatgggagcttgagggagcacgtatgatgtgcagaacactatcctgggcactggaggggaacgtgacagtgagggacccacctggtccttgggacctcacaggtttgttcatagacctatactgaaacactcatgcctgcagtggccatgacacatcatggggtacaaagtccgttctatagtgcatgtgggcctcggctactgtgcagagcttctgcttgtaaacttcc

SEQ ID NO: 154992 - DNA, 426 bp, Homo sapiens
ataaaagcttttcctcaaataaaaaacacatcacaaatgcccaatctcatcacttgcattcaacatagtactggaagttttcaccacagcaataaggcaagaaaataaaaagcatttaacttggaaagagttattatttatttatttatttattttttaaacatgacatgatcatatgtacagaaaactcttaagaatttcaccaaaaacaagtctacaaaaggaattaaatatcactggaggagacaaatgcaacaaaaacaaattagtaatatttctataatgaaacagcaagctatctgacacaaatcaagaaaacaatcccatttacaatatctaacaaaaaataaaatatttagaattaaattacccaaggaattttaatgcctacacaccaaatattaaaaatttttacttttattgcat

SEQ ID NO: 154993 - DNA, 362 bp, Homo sapiens
ctgaccatgtgactgaggtcggtcagtggatgtaggagttaaaagattaattgcagaaaagaaggagtcagtagggaaagggagagaaaaagaaaaggaagaccgaaggaaaaaagggattgctggcagagaggaggagctggagccccacaacaaaacagtggatcaggcagctggcctgagatgctgattcagcgctttaacaaatcaatgccactagaaaagcacaatgtgagccctcactgggtagatgtcaggggactcagaaaatgcattctcaagtatttcacattaagagggaataatgtgttaatttataacgcttcaccctatacacttggattatctatctgtgtcagcga

SEQ ID NO: 154994 - DNA, 204 bp, Homo sapiens
aacaattttggaaagctgagaacagagttgtaggaggagagccaagaaaaagtgtttggaaaccttgagtgaaggtgagtaacatgaacatttattttcctagagaaaggagaaatgtaagaatataaaaggggcataaatcgaaactatatttctgcaaagtattttggcaatgtatagttaacaaaggcctctaagatgccc

SEQ ID NO: 154995 - DNA, 495 bp, Homo sapiens
  misc_feature (275)..(275): n is a, c, g, or t
  misc_feature (279)..(279): n is a, c, g, or t
  misc_feature (349)..(349): n is a, c, g, or t
ggaatttcaacttttacaggagagcattgatgactccaagggagtaatgtaatccgacttgtattttagaaagatcactctgacaataatgtcaaatggattggaatattgggagcataattagagacagggtctcgctatgttgcccaggctggagtgcagtggctattcacaggcaaattgcctaaaatctgctatgattctacagtaaatagctcagggtatttctatttatcactactaaaagggcaccatagtatgttttggtactttangcantaaacactgcttggtttatcattttgttattaaattagaacaagaacatcaaatggatttgctgcactanttattctttgtactgttgagcaacttggtgtgcttatatgttgtgttggttgaaaaactcatccgttttattgtcttgtaatatgaagttagaatgcctttttatatttgtatattctgaaaatgtctgtggaatgttttggtatt

SEQ ID NO: 154996 - DNA, 412 bp, Homo sapiens
ttttcctgatgtccctggacacttctcctttggaaaagaacgatacattattcaagagatgggaaaagcgagagaaatagggctcagtccccctcacaaaaatctggttcatagaacccagaattttggagctagaaaatgcctgagtagagcccagctctcattctgcaggcaaggaaactgaggcatgaggaggttaagtggcttagcagctagctaatgggaaaatcagcagtcaaacatgagtctctttcttcctctcccagcacatccatcagtaaatcacattttctcttttcttggtggtgcaggccagtgtttaaggtgagggattatgattactaagagactaggcattttaaagaccctttgctaatcacaaatttttgcaaagtttacatcaggctctttt

SEQ ID NO: 154997 - DNA, 327 bp, Homo sapiens
gcacttggcagttgaatgggggaggagactacactttcagaaatctgagatggctgagtcacacaggtttgcaaactgatatgggacctagccatgcctccctccacagagttggtatggtaagggtgtggtgtatttccctaccagacctctgcccaagggagaccagcgaccccaaagacataagaacaacagtagcaacatgacgggcatagtgccagtgattggaggtggccgccttaagtcccagagtagacctggcgagggtgtcatctgtctccccttcaaaccgcatgacacagctacaaacaccagaggagccaaatg

SEQ ID NO: 154998 - DNA, 232 bp, Homo sapiens
gcctcacctggtcgcaagtctctactcattcattgtgtgaagatgacactcaaaccactatctgcctcagattccaaacttcctgatggaaacaaatcaaatctttctctgccaggactttgttaagataaaaagcatccaataaacagaacctagaaggctgggcatggtggctcacgcctgtaatcccacaactctgggagaccgaggccggtggatcacctgaggttcg

SEQ ID NO: 154999 - DNA, 484 bp, Homo sapiens
tcaagttgggagacttttgctttcagtaatggcagtctcagtgaccccaagaaattctcctgctggggacaacaagagaaactagtcaaaatataaatatgacttacagcagacatcaaaaaaaattttaaaggtaaaaaattacacagctggaatccaggggatgagataggtgcatgaagatgagcccagaactgggggcctcttttcttctgtgggcatttgctaataccagacgggggtcagctaagaggctaagaactttcgacaacctcacaaacctaaaacagacaccagaatccagagcccacaaagtggaagaagcctcacaaatctttcaacatccttcccccaacacactttaatttgtttgggaaatccaaagaaccacaccatgggaataagagtgaatcagacatggacagtcagtccctgaacatgaattaaagtgatctgagtattgtataaagcggggatcctctag

SEQ ID NO: 155000 - DNA, 315 bp, Homo sapiens
atgcaggacaggaacgctgaggttaaatacaaactgacaacaaaaatcataagaataatatgtaaaagcaagtatgaagcctttgtatttgcttgcgacttgcagtttgaatagcaaaatgatctttcacatcaggctcagtgtgttaaatccagccttaggcaagaataagcaaatattgtttccatatgacaagcctttagctgctagtgaaatgctttctttgtagtgaactgtaggcacaaactatcagcagatgactgtgtatctgagcatatctttaaccacagttagctacaaattatttatagaggt

SEQ ID NO: 155001 - DNA, 357 bp, Homo sapiens
acccgggaggcagaggttgcagtgagccgagatcatgccactgcactccagcctgggcaacagcacaggactctgtctcaaaaaaaaaaaaaaaaaaagtgggtgtgtagccacacatttgtgtttatctacacccagcagatagcacagcctctgccatgtttctttatgttgtggatgacatgccaacttcatctatgcgttgcactgcagcccccagagaaagcttttgcacacagaggggcactgaggtcagagggactatctctgtccttaggagacggcagccctggggtcccaccatgacactccctggcagccaggtgaccaggccacaccacagtctgggttctttct

SEQ ID NO: 155002 - DNA, 602 bp, Homo sapiens
gatgaaggagaatttccttattgctcaagagctgtgctcacatgtttaggagtaaggtttcatgatgtccacttcgaagcagtttagaaaatatgtgtatgaaatacggcaaaatattaactgttattgaatctagatggtgggttttgggatgttcatgacattatttttctacttttctgaatgtttgaaatgtttcagactgtgtgagtgatgataataatggagtcatctcagggagagaagtactgaggggcatcgtaggtcttcctgagcctgccttgtagtttgggagaaggctttgctggaagagagccacacaggtggtgggtggggtccacaatgaagtggaattcacctgcccggaggtcctgatggctcaccaagccacacagaggcattttcccaggctcgtccatgaatggtctcgtaatagctgtgggagaggacttcccactgttacgcaccagaccacagactcccgttggcagctgtggggaagctcaagtcgccttagctatgaatcccctggaaaacaagtgaggctggatagttttacagtaaaatctctcattgaatatttgctctcagtgtcttgggac

SEQ ID NO: 155003 - DNA, 362 bp, Homo sapiens
tgctgtgagaagtatctgtgtccctagaacctccaggccacacaaaacatcccaccccctgaagcccgggggtctagagcctgtcttctgtgtgcagtcttccaccggcgtcagcctacgtggctggcaactccccacaggtgactcacctggacctcaccggcatcgttttcaatggtggggctgggctggggctcactctccctgccctggtgcaggtgagatggaccctgggggcagagcagaagactccgctttcaaaacactctatccccaggagcgtgcagcatgagctcatacctgcctgggctgcaggctttgtttcatgattgctgtcattttccaatttaagcatcttaatg

SEQ ID NO: 155004 - DNA, 424 bp, Homo sapiens
tgctgtggggacccacagttttagtaaaaatcatcacatctgccagagcaggagttcaccttcaaaccacatgctggccactgtgctgagcccctggcatggctcacctcgatgaccactcacactgctactgtgaggaggatgaacatcatccccattttgcagatgagaaaactgaggcacagagaaggaagtgtcttgaccaaggttgcacagccaatgagaatggtgcccaaatttgaacctccagagtgtatgctttcaatgactagaatgtgcatcctctggacaacaaatataacttgcttagctcagtgcctggcatccgggaagtgctaaataattgttagttcttgttattgttatccataataagataggcagtggcatctacctcttggaaattctgggcgtcagttgtctc

SEQ ID NO: 155005 - DNA, 263 bp, Homo sapiens
ggattcattttcccttgcagccatttcaccctgtggacatggcctaggctcaatgtgtgagtgtggggtggccactcctggcttttggagcaggatggtcctctatgagtgggatgttccacacacggcaggaggttttaacatccttgagtgagtccacaaaatgccagtcatgtggcagtcaaaaattccccccgcatttccacctgggagtggtactgcccatttgagagctggtagggtaataggcaaatgaaggggga

SEQ ID NO: 155006 - DNA, 360 bp, Homo sapiens
tcctgctctccctaccttcacctccttggggtgaccagccattgcatttctctccccgataaggtactctctatctcatcaccccatttatttcctttgatttgttcatttattgacctcctactaagcaccaggcactggaacacaacatgaacaaaacagactaaaatctctgccttgaggagctgatgtttaggaggaatccagcaactaacacattaatgcacaacagaaagaacagctcaccctcaaatgtccaaagaaaattttgttttctgttcagtataacatagaaggatgaagattaagagcacgaagtttggagtcagaaagacccagttctctgcctttttttttttt

SEQ ID NO: 155007 - DNA, 518 bp, Homo sapiens
ccacattgaatttaactgtcacatctccttagtctcctctggtcagtaacaaattctcagacttcccttgtttctgatgacctcaatcgttttaaacaatatagatcaggtatcttatagaatatggctcagtgtggatgtatgtgatatttttctcagagtttgcatgggatcatgagttttggggaggaacaccgcagaggtgaagtggcatcttcatcgcatcatatcaggggtatgtgctgttgaaatgacttcacggatagtaaccttggtcacctggctcgaggtagtgtctgccaggtttctccactgtaaagtcacttttccccactttccttatctactctttggaagcaagtcacctagatcagcccactctcaagaggcactgtaaatagtttttaaaattttatttttaattgacaaataattgtacatatttatggggtacaagtgatgttttgatagatgttgacaatgtggaatgattaaactgggctaattaacaaatccat

SEQ ID NO: 155008 - DNA, 459 bp, Homo sapiens
tttgccctgagtgaattcaaagaaagcacaactttactctgtgccagcagtttcatctacaggccagtcacactttccatttcgtaaaatacagctaaaatgtcccaaataaacatttattttgaacctacttccattttctactcctgccttctgctcagcagatgagcatatctcatacttcatagaaaaaattaaagctatctgtgtgatttactcaaattccaacccttatagttacaaaatctatctaatctgtatttgaaataattcttatttctttcactgaagtttcagaggaagagctatcttttccctgttcaaggataattgttttaatgtctttctgtatctctaataatctatttcaacacttattctgtcttcattctgtttttttcagtcattctttgtatattcattcttttacataatctatatagacatgttaagaattta

SEQ ID NO: 155009 - DNA, 433 bp, Homo sapiens
ttcgagctccgaccctacccacaaaccctctctcattgccttttgttaatgtttttccttcccctaaaacacacaactcgcccaactttacaacacaattgtgacaacgaaactgatgtgaggcttgaggacttgttaataaatagactgacttactaagcttgtactttacaaccataaaacatttagttcttaactatttattcataagcacaaaggtagaacatttgaaaatacacattttgatgttattctcattaccctaagcagagaacttcagtactgtgaaataacactaccatctgaccaactgggagaaaaaaggttaaagcacagtcacatgccataaagtactcagactgcaagaccaccagcaaaaggggagggaaccagtgcaggagaaaaaggcaagtcagaagcctacatacaaatc

SEQ ID NO: 155010 - DNA, 252 bp, Homo sapiens
tcgtgatgggcacagaaattagtttttaaatttcctgattctcgatcttccttgttggtggaagctttaaactggaacgtgaacttttttgctctgtgcttactttataaaagtgctgctgtgtgaaatggagaaagttacggcgtgtaggggagtgagactcaagtttatagtctggcgccatcagctcacaggtgtaggactttgggcaggtatttatcactagaatttctgtgcccacttaggaaaaag

SEQ ID NO: 155011 - DNA, 364 bp, Homo sapiens
gagctgagatggcgccactgcattccagtgtgggtgacagactgagactctgtctccaaacaaaaacaaaaacaaaaacaaaaaacaaaaattagctggatgtggtggcacacacctgtagtcccacctactggggaggctgagacaggagaatagcttgaacctgggaggcagaggttacagcaagccgagattgcgccactgcactccagcctaggtgacagagtgagagtccatcacgcacacacacacacgaaatcatcaatctcatagaaagcaccgatttccacactgtcagttctctgtgcctcagtttccccttctctaaaagaaatctaagtacctactgagacaaagggaaaca

SEQ ID NO: 155012 - DNA, 355 bp, Homo sapiens
ctcaggtcaggtgatgattctggaagacaatgatggcaatgtaaaggccttggaagattaaatcattcattctgctatccacccattcactcaacacttatcgtaacatattggattgtgctggggcaggaattacggaagtaaaaaagtcatggtctctgtccatttagtgatggacagacatgtaaacaaccataccacaatgtgataaatgctacaagagagaaatgtacaaaaccctttggcaatgcaggtgtgaatcattctctctcaaagaatccaggaagctttcaaggaaggttacatctgggctagattttgaagcataaacagaattttggtaggtgaaaagtga

SEQ ID NO: 155013 - DNA, 294 bp, Homo sapiens
tgatctaaaggttcttggaagaaaggcatgtccatgtgtggttccatctgcagcaccatttggagtttaatagcttctaggcaagaagagataaattttacaagaaggtttagaatatagggtttgaatatgaatattaagaatcccgctgggagccaagatggccgaataggaacagctccggtctacagctcccagcgtgagcgacacagaagacgggtgatttctgcatttccatctgaggtaccgggttcatctcactagggagtgccagacagtgggcgcaggtcagtg

SEQ ID NO: 155014 - DNA, 377 bp, Homo sapiens
ccagtgagaacaagacttggatcacaccactttaagtgcagattccagcaactcctgaaaggcttggcctccaatttccattctgatgggtcagattagagaatctccagtgaagctgtcagaacattctaatgtttgcaaattgtgaaagttcaagcaagagtcaaccatgtgggaaagaagggagggcggctcttagaatgttgtggtcttggaccacttaagaaaaacaatcaaaaatcactttcaacacccacgccttctttcggaaggagaaaaacattaaaaatcactgcctattggggggaaaagtggtataaatcattttatttcatgctccatcatttactcagcacaaacttcagtgacacctcctg

SEQ ID NO: 155015 - DNA, 264 bp, Homo sapiens
atcacaagccatccctgtacttgcaggaccctgagggggagtgcccccttaagagtgaggtaggagtgccctgttacattttgcatcttagacctctcttgcctcaatctcaccctggaggtgacagcatggctggtgatggctgtaatgagggatataagcctgcctgtagcttggaaagcatgttttgtcctcagaatcctcatacaggctgggcgcggtggctaacatctctaatcccaacactttgggaggccaaggcag

SEQ ID NO: 155016 - DNA, 125 bp, Homo sapiens
caaaatgccacaagcatgcactacttttctccttttctatctttagtaccatagctaatgtctagggaaaaaaaagaaaaaagggaacattccactaatcaataaaattcatgacaacacaaagg

SEQ ID NO: 155017 - DNA, 591 bp, Homo sapiens
attatcaaggtaagtgttgagacataaaattgttatgctaagatatgaaaaaatatcaaactaacaaacctgcctgctgccattttcaactttggcaaccaacaaacacaaacaaaaggctgaaaagtgagtttcaatgacagtttgccatcatgtgacgacatataatgcaaaaccccagatactatgcaggtggcatcaaagtagaatatatctggttcagggccaacacaggtacatcaatattcccatctcataatactattaaacaggccacaatgagaaagatctaggataatttgtgagcttatagaccccatactcatttttaaaaaatggttgtgttagactgggtgtggtggctcacgcctgtaatcccaacactttgggagtctgaggtgggcagatcacctgaggtcaggagttcgagaccagcctggtcaacttggcgaaaccccaaccctactaaaaatacaaaaactagccaggcgtagtggagtgtgcctgtaatcccagctactagggaggctgagacaggagaatcctttgaacccggggaggtagagattgcagtgagctgagattgcagca

SEQ ID NO: 155018 - DNA, 480 bp, Homo sapiens
gtctcttcagaataaaaatgagggtaattagactcaattcatttattcaacacttgggtcaagtccatgaactctacaaagataactgtgccatggattttgctctctagagtggtaagacacgtatatggtttgtctactcattcagcaaacactttctgggcatgttttgtctcctgaggtcagctctggagatacaatggtacatggcacaaatctttgcaagtgctaaatataatacctgatattaataggctgtgagtgaagagcacaaaatgtgtagtgggtgttcctgggatacagtagctctgtgcatgtagaagggattagtaagggcctcgtgaaggagacagcatttgttctgggacttgaaggaaagacaggattggaaatgtagagatgctaaggaaggttgtcctcaatagagaaaatgccatagctgaaggcccctcatatgctattcttatctaactatgtgat

SEQ ID NO: 155019 - DNA, 252 bp, Homo sapiens
ctcggaccccctttgtctgtaagtattatatttcactctaaaaatgtccaagaatgctctgcttctccctctccttgcctccacctgcttcctttctctctcccttccccctcttggcaaaaataaaaaataaaaataaaaaaaagaacgggcgcagtgcctcacaccagcaccttgggagatggaggttggcaaatcacttgaggccaggagatcaagaccagcctggccaacatggcaaaacccagtctc

SEQ ID NO: 155020 - DNA, 369 bp, Homo sapiens
tgtgtcatttttttagaattagaaatgacaaagtggtatattccttttggaaaatttttacttaaatgacatgcagcataaatgaagaaaaacctgagtaagaaaactataagataagcatcattgaatagcattcttatcagttattaaatcagtaattagtaatttaatcataaacatatttgagtactatagttagtttatgttcttctggtctggttatttggtttaatgttctgaaatattttcttagactattttgtcaatatatttgtaccctttgttaatatttctttgacgtataactacaaatatagatgagtcatccttccttccttttgtttttttgtttttttttgtttttgtttt

SEQ ID NO: 155021 - DNA, 379 bp, Homo sapiens
aaaagaagagtttgacatgacagataacaccaaagacagcttattgcaaggaaaaaaagtaacagaaccagaagtttaaaactgaaagataccttttaggttcatgtatctcactttacagatagagtcaaggtaagaaagataacccctggtgcaatcttattagtggtcagactaaaacaacatatcacttttcccctactagacattaccataaatatttttttatttttcgtggaagtataaattgctacaatcttatacctagcaacttgggcccacagattttatttttaagaatttactgtgcagaaatacaagtttgcaaagacaattaaaaatggatgtttccttcagcattgcttgtaataaaaaaatg

SEQ ID NO: 155022 - DNA, 164 bp, Homo sapiens
cagccactggcttttcctctccacttcgtgtaagtttggagttctggcctgtaaattaggtcatcaaccacttcaccttgaaaggagaaaaacacgaagagcttaagcagtttatctatgctcttacagctctttagtgtcagagcagtgtgttcacctagaaa

SEQ ID NO: 155023 - DNA, 187 bp, Homo sapiens
gcagactcagcggccggctctaccggcgtcccggctcgggcagcgccgaggggcgctcctggtccagctctcctggctcgggggttccttgccgaggcgcccgcgccccgggctcccagcctcggccgccgcggccccgatgccgaggcatggatagagcagcgctgcgcgcggcggcgatgggaga

SEQ ID NO: 155024 - DNA, 450 bp, Homo sapiens
tacttaagagtgtgaagtggccagtcatggtgtctcacacctgtaatcccagcactctgggaggccaaagtgtaaggactgcttgattccaggagttcaagagcagcctggacaacacagcaaggtctttttctacatacatgcacacacacacacgcacacatacacatgcacacaagggaaaaaaatttaaaatatataaaaagagagttaaatgggaaagaaacttgcactcaggccatttgtggttataccaatatgaccaggcatccaggtggcaaatcacactgggccttaatttttggccttacactacatcgtagctgacaccatccagagtgtatggcccattcaaaccgatccaatattaccacagaactgcaattctattggatcctaaaaggagcggtggtctcaagtaattctgtgaggacctccttgcatggctcc

SEQ ID NO: 155025 - DNA, 357 bp, Homo sapiens
agtaagtgttgaaaatgaaggctgcagtgcaaaacgaggaaaagaatagaactgcttttcacaaagacttttttttatactttttaatattatgctacaaaagatttttctagacccagagcagtggctcacacctgtaatcccagcactttgggaggccgaggcaggcagatcacttgaggtcggcagttcgagaccagcctggctaatgtggtgaaaccccaactctactaaaagcacaaaaaattagccgggtgtgttggtgcatgcctgtaatcccagctactcaggaggctgaggcagaagaattgtttgaacccagaaggcagaggttacagtgagctgagatcacaccac

SEQ ID NO: 155026 - DNA, 1604 bp, Homo sapiens
gtcattataaaaatattagatcacattttcaaaaattaacttttgaagaaactgctgtgttttaagaaaatgaaagttagtaggataaattctctgtaaaacgtccagaacaaatgtatgaacataatatgtggttattaccatgataaatgtgcacaacagcttagaaaaatgttaaatagttgtgaatgtagaaatggtggtagccatgaatatggcccaggccagttataccaatggctaggtaatagtgagaaattataatagcaatctctaagatgatactaaaacaaaatgttactttctaagaattaacattactaggattatgaaacaactccaatttaaatgggaatttaggttctcaaatattctagtataacaggtgttcctttcattagtatggctgctcaaagaatatgaaatggatttctatctggtagtaatattcttaaattcacacaattaccatgcttcggtggaaattgaaggaggtcattattttgaaggtccaacatggttagattttctgtcatcttcattttcggagggtccacaagatacaatctgatcgttactaatcaaaactgttttaaatgtgaatgtatgttgtagaacttaaggtagtattttgaactagatagttttaactggccgcctttccagactgcctttaacagcccctgggttatggaggtattgcattctcttctattaacgttgaaacttacctggggaccccaccccactcttctactgccatatgttcaaacttttatacagctttttttctgttttaaaatcttgtttttgttgtgattttattaggatctaaatcctaataaaaaccatattactgagttttcataattttttcttttttccgtttttcccctattctaaccctaatatatgatatatcttaattatatcgtattaaagagacaggatcttgctatattgcccaggctggactagaactcctggcctctgccttgtgagtagctgggacgacaggtacacaccaccgtatctatcttcagattttttttttttaccccatttcttaaattgttatgtcatatttcattgttttatccaaacatgacaattagttgccatttactagaatttaacagaatgtttagatttctcaggatttctatgatgttgtagaacttttctggttttgcctatttcttaagccatagtgagttttatttggttataatctgtgaaaaaattttcgtatcctaaaatagatgatagtttggaatcatttcttgattccttgacctttccattataagtatttcctatatctattcatctcttttgttatacttggaattacttgggattttcactttttcattattgtaattcaaaacagccaagaacagcaagccatttaaatatgaagggtgttgattccatttttctcctgtccagaaatacagttgccacgtctacatgtgttctaatttgagaggttttttttttttttatttagttcttgggggctggcaggggaagtctgttttgggtactaaaagtgcttgcttttttatgtaaggagtttgtctctgtgtgtgtgtgtgtgt

SEQ ID NO: 155027 - DNA, 287 bp, Homo sapiens
cttcctttagatcttgacttaaatgtcacctcctcagaaagacctttgtcagcagctctcccacagtataccctctcccatgtttctggtcccccgtgagttttctttccatagatctacatgagttgcaaatttatatatttgtggttgacttgcttcttgtctctcttccccattgggctttaggcttcagaacaggtgagacattgtatcactcatcactgaatgcccagggtctaacacatagtagatgctcaacaaatcacccactgaatgaatggttggtg

SEQ ID NO: 155028 - DNA, 1031 bp, Homo sapiens
ttactacatgttatccaacagcctttttcatttcctcttttgcaagctgtcagctcacgctgcttgcccatttaccttctggctaaaccaaacactcgcttgggaccagctcatgatgagcatactttacttctaccatttatttttaggaaatgagaaaaattccattccaaagccataaagctttggtttaccaacatccttacattaaaagagaagtggacagtcttcttatgttcgatatttagaaacgacaagggtaagggcctgcagcaagtgcccagcatggggccggagaaatgcgcacatcttcacgtttcccacaccaggcagcctaagaacgaaggtcactcagcccagacgcaggcctccagatgacgccccaccctgccacctgttccgcctgtgtctctctacacagatgcatttctgccagctgctgagaacttcttcattaaaaggcatgtgctgggtgctaagattttcatattttttcaaactatgcttggaattcaaaaattatacgtcattaaactacatgcccaactcctgtcccacacagatgaaagtgttagtgttatgtccgtgattcctggactatgtggtaatttaaacacttcttagaaagaaaaagcctcatcacaactcagtcagcagtagaaaagggtgagtcacattctgtttttagtgcatgatgtgacaagaccctactaccacagaagtactcccgcaaaaattctttgagatacaaagcaaaaaccaagggaatgattcaatagatatgaaggaaacactctcctagagaaacatgacaagctgaatcgcaaaagggaggcaggaaattaaaacagcaaacgtcatacatgcgagccagggaactccctaaatgatgctgcagacactttcccctggagagaagatactgtcaaagtcatgtgagtgggtccccaaaaggactcaactttctaaaaaccaaagggaatctataaaaagggagcaaacatccagtgtattaggctctaaaggaccaa

SEQ ID NO: 155029 - DNA, 167 bp, Homo sapiens
gtatatatcaccacttaatcatcactggaaattctaactttgttagtaatgttcttatgtgcacgtggaaaaatttcaaacaatcgttcagatatttataatgtggtaaccgaaagtcagccgtgtttttaatcactgatcagtcttctatacattctttcatactt

SEQ ID NO: 155030 - DNA, 310 bp, Homo sapiens
cagcctgggcaacagagcgggctccgtctcaaaaataataataataataaataataataaaaggacagcccacagaatgggagaaaatatttgcaagttagttatctaataaaaatctagtgttcagaacataaaaagaacgttttttagctcagggctaaaaagacaaataaccctaatttaaaatgggcaaaggatttgaatagacacttctccagagaaaacatacaagtggccgaaaagcacatataaatatgctcagcatcattaggtcttagggaaatgcaaatccaaaccacaaaatgctgca

SEQ ID NO: 155031 - DNA, 141 bp, Homo sapiens
atgtggaaactggccagcagaatcaacatgacttggtctttcaagaaagtaagtgtctaggatgacttagatttctgacttaagtagtgtcatttgctgagatgaaacatagaagaaggaacaggtgtgaaggtagagggt

SEQ ID NO: 155032 - DNA, 1037 bp, Homo sapiens
ggacacagactgagcagaagagatgagtgccccatgccagcctctttggaagccactgtcaacagagagaggtcacaggacaagcttgggtaaaggcagtccaacccaggcagaagaggaaagtgggaaggcccaggaagaaaggggagaaggcctgaccctgtctaatctggtggccactcactgcatgacactgaattgaaataaataaaattaacagttcagttcctcagctgcaccgttattccagattccacattccaaatgcccggtggccacacatgattaatggctaccacactggtcagtgcagaatggacgtaaacatcgctgcacaaagttctaatggacagcgctgtctagaccatggcctggagccaccagcaaaggggaggcgcatacaggggctggccacataggaagagataggtagagatagagtataactcaggaaaaagaccaggcaaatccttagcagaaatgaggacgtggctcagtctgccaacacagctacccggagcaatccctggtgaaggaaggcagctctagagaatgccagccacaggcacgcgcacggcttgcaaaggggtactttggggaattcccagaattactagtgatgggagccctggcaggtttccttcctcgaagagaggagaactggatccagggatgggcattcaacagcgaagcggcacagctggtttccagaaccgtctcccgggattagacagttctgccgcctgaaccctccgacgatgggcctgccaaccaggccaagcccactgggtcaaagccacaggctgtgctacggccccaccccatggcctcaccagaacacagaaaccagagcccagcagcactggctgggccatgtgttggtggccccccgggactcgctaagagtagcaaaggggagagggaagctctgacacacaccatttctacgacctaaatcagtggcctccctctttcctcctcttgtgtataggtaccgagctgtggatacaggagagaatgaataaaattctaacaca

SEQ ID NO: 155033 - DNA, 239 bp, Homo sapiens
aatactttgatgttatttctattatatttaattatgggagaagtagatttttttcaacttgtttaccaattttcatctatattttagaaagataaaattccttcagcattctgatagcaaacatacaggttttgtcaagagactcacatgaacacctacaaagaactgaaagccaagttcacaatctttgatagtttacatcccagagaacgttcaccctgaacaggattcagaatgag

SEQ ID NO: 155034 - DNA, 669 bp, Homo sapiens
gaaatggcctcccaccttcagcgttcccagtactgacctgctttgttccttccactccaccgctccccacagctttgcctgcctttccttcacatacacacaccattttaatttcaggagtcattaccccacacaccttattgctgccaaaaccacatgggctgggggccagggatagatggacagacaccttcccccacccatacccctcctgtgtgtggctggaaaacttttttgttttgatggatttcttatgaataaaaaagattctactaaaaaaaatgaataactgtacatatgtgggcatattgtttgaatctgtattctttcactttgatatatttatgaatacttacaccattactactgttttaaaattactgtagctttaaaatcaggtttgaaatctagcagagtaagtcctccaacttattgcttcttcaagaccgacttgcttattctaggttctttgattttcaaatacattttgaaactagctttcaaatttctctaaaatctcctactagaaatattcaacgatggtcctcagctctgtgagcgtcgtctcagcagctccaacctcagcagactgtgtggtgaccactgtggtgctctcctccatctgctgagcccagtacttgtctagctcctctcggttcttcgaggcag

SEQ ID NO: 155035 - DNA, 168 bp, Homo sapiens
tacgtttcttttctacagactttaccccttatttgggatgtgtgaaaaatttttacaggaagtagacttttttcagaggtaagtattttataactcttccggcttataaaatcttggttacacggagtatagcacttgcaggcaataggaacaatcacaaatcacatt

SEQ ID NO: 155036 - DNA, 241 bp, Homo sapiens
caacagctgttgctgatgaagagaaaaggaggcccagtcacttggggatatgagcctacaaatctcaccacctgcctgcttctcagggtgacttatgacctcagtggcagcaggcgaggggccacaatcccatgtggccagggcctgcctctcccctctgtgtcctgtatgccactctctggtccttggccatgcttgcctctcacagctttgccctttgatgtctgcacctccagtcatg

SEQ ID NO: 155037 - DNA, 162 bp, Homo sapiens
caccaggggtatcttattgagtaacaacaaaaatttttagagatgatagtctagaagacattaataaaacaatcacacagttaatatgaagttgtgatggggacgggtgctgatgaggagagggccagaatactttgagaggacatcataggtgaatttgac

SEQ ID NO: 155038 - DNA, 223 bp, Homo sapiens
gtaaaataataataatctataaaccaaaatactgacttcacagaaattgagatagatcaagctgtgagtttaagaaactgaaagaagcaaaggagaggccaacttcaaagtcggcttatgcagtgccttcacaggcattaattgaagcctggtcctgctgttctttaatgccctcttattaatgtcttaagtaatcaacatctccagtaatcccttctgcagc

SEQ ID NO: 155039 - DNA, 217 bp, Homo sapiens
tgttctcctctcatttccaaagatcttactcttccctgctccatctttctcccacttccatctgcattcttcttcattgcctcattgagtagatgaatgctattaaagagtagttcaacagggctacctttccttacatttaataatataaaccacaaataggcactcattactgcccagcaataccatatatttaccctaggaaactctccatccc

SEQ ID NO: 155040 - DNA, 188 bp, Homo sapiens
tggagtcagttctcaaaaacaagaggttcattctgctctgctaaaaccagagggacaacttcactttccatatttatccaaatgtattgataatttggaggatggatctggttgccagaaggaaggtctcaaatgaggaattaagagatgcagatcaatttccaattggtaaataaacactttttttt

SEQ ID NO: 155041 - DNA, 308 bp, Homo sapiens
agttccatgataacagaactgatgactgaatgactttcacaagaaacacgtggagtccagtgagcaccagcaatgaactttcgcaactgcagaaattagtgattgtagctgagttgacacaacagtagctgaacttattaattttactggaactttgaacccagtttgtgattatctcttgccgtgtcactgaatacattgagtacattggaattagattgacatattaaagttacttgaaaactcctgaacctacctgaacaatgaatgaatgaaaataatgaatgaatgagaaactgaataaacat

SEQ ID NO: 155042 - DNA, 338 bp, Homo sapiens
caccgtgccgggccaagttgaacttttctcttgggggaataatttccctgctcaacatagacctggtggaattttcttgtctctctcttccctggcattttctctggtcttaggcaagcatttcctgccttttctgattccctctctgtgtgtgcatgggacttaggggaggaaggaggagggagttttctgttaagggagccgtgaatgagcaggaaatggctatttggtaccagttattctgcagaattagggagtgctgatgctgacaaggagtcagaaggattcagtcatcatgacatctgcagtcacaactgggtgggttagtgagcgcccct

SEQ ID NO: 155043 - DNA, 258 bp, Homo sapiens
atggcagtgtcctgggggagtgttcacagaggatatgcgattggtaagaaccttccaggacagaaaagcaaggcatccccttaacaggacttcctattcatgcagcctttagatcttatgtgacctcatgacaactggctgagccaggaagggttttccttctagggtatgaaggaaaggagaggcgaatttgacctgcccctcatgccatgtggaaggactgggatgggaggacaggccatctgctcccaagatcaa

SEQ ID NO: 155044 - DNA, 196 bp, Homo sapiens
catctgcagctcccaaactgcctacatctcgaatgatgctggcagtgcacacagagcctgcagctcccgaagtgcctttggctccaacaaagccaacagctcaactgatggccacagctcaaaaaacagttgtgaatcaaccagtgttggtagctcaagtggaacccacaactccaaaaactccccaggctcagaa

SEQ ID NO: 155045 - DNA, 370 bp, Homo sapiens
gtgagcaaacctccagagcgctcccagcacaactttctttttctgggagttctgctctgccaattccagccacattagcctccgctgacttgcagctccatctccccagctcagagagaccacgggcctccacctgggttttcccttcttggaaactctatcctggggcaatcatacagctcaccatctgtttctcctcttgcaaggatcactgtccatgcctaaggcccaatgtcttggaaacctagttttcaaactgtttcagctgggagggtaaatccagaccttgttactcagtcttggccagaagtgaaaattccactgcattggttcatttgtaatttttccagagcatgggctaacagcagct

SEQ ID NO: 155046 - DNA, 344 bp, Homo sapiens
gctgtatacatgccccacccgttagtcacttcgttctcagttctcagatagaaaatccaagctagtacagctctatcatggaagagtgctttcttatcctgagctgcaatccttctcactgacttctaaccctccagttctatttcttcagctttcagatatctaaaaatctcttttccaggctaaatccctttccttcaaccaactctttttttttttttccacccaatctggagtgcagtgtgtgaggaccagccagcacctgcttcatgcagtgcctgtgaattgtaaacagaggtaaatttgctgtagcaagttaaacttcttggcctacagaaagttga

SEQ ID NO: 155047 - DNA, 372 bp, Homo sapiens
cccaaaagagtacacaaaagagtagagacgaagggcctagatcctgaaggctgagagaagactctacacattgagaagaccttgactttctgtgtcacagtttcttaacgcaattgccaacttctaagcagcacataggtaggatgagacacaacactgagaaatcaagcagaaagtagctgctaggagccttaaaagctaagcagagatttttttttgcagtctcacaaggccttagggacaaaaatttgactggagggccagccgagaagaaggtacctgggaaatacccctaagctttcaattgagatcccagaaatgctactccttaggaagagtaagaacaaacaagggatagactagtctcaacac

SEQ ID NO: 155048 - DNA, 723 bp, Homo sapiens
ccctcctcacgaaaaagggaataaagcttcctcccagacaaaatgtactgcttgagcagcactcccatagcacttgatcactttgataagattgcacatttagttgcctgtcttttctgctagaccttcagctccacaacatcatcaaggacaggaccatgtgtcttttgctcaccagttacctcaggattagcagagacaggctcttaacatgcacacatcaaaataaaccatcagtcgattaatgactcattcttctgttcattccaagggaaatcgtctattgctaacataaaaaagttacttgaataaggacgatttatagagttgtcacgcttaggactcttcggataggttggctgagataatttaagacttttaaaaacctgtagaaaagaatattactgaatcttatttcaataggtgagtgttattcatattggttatatttctttattttgactgaggcagagagcacagaggaagactgggagaggggaggaggtagaggtgagagggagaggaaaaagtaaaaaagaattgattctcgaaaggtataaaatatatggttagcagagattaaacagactcttaacttaggttttatttgtaaatatcccaaataacttaaaaattgttagcagggagactttatttctatttgacaactcacgcacacacaattcccgagttattttgtcctcagttcttcaggagatatag

SEQ ID NO: 155049 - DNA, 203 bp, Homo sapiens
ctgcgcagcagcagcctttaaacccggacccagccggggaaaacctgattgacacggacgcccgaacacgtgggatagcctgggaaaccaaacccggcgtggatgcggagacccagccccgagagaggaggaattccttcggggtttctccctttctcgggcgtccgggaaagctcctgcggttcacttgcgcctcctccagg

SEQ ID NO: 155050 - DNA, 506 bp, Homo sapiens
ttgtaggctgttcacccttaaggctcccagacttcgagggaggaatcagaggcaactgcaataaacggcaagaaccttcctgtctgggggtgactgcaacctggctgagtgcattcctgttttctttcttgcaatgggctactgccttgcatttctctttttggttctaatattaagctcaaaaatgatcttctcttgttttgtaaaggctcattaaggggcaatgtctcttcagtttaggaaacctgcatgcttgcatctctaatactgatggtgatgtttttagctttttcttgatagtgacgttttacagtaaggaattaatggctttaatagcaatagattccagggaaattcaaaaataaggttcataaaatgaagagggtttataatttttatttccatacattcaggttgaaaaacagtcatgaaatttaaatatgacaatctcataactagcttattaatgaccattcctgaaaatattgccgccatcctagttctct

SEQ ID NO: 155051 - DNA, 314 bp, Homo sapiens
tgctatgtgctggtgccctttgacttgctgggtgttgggagctgaaggactgtgtgctttcctcagcatcttctcaagctgcaattccttggctacaatgtgggctttaaaaaacaacaactatttattttgtagagatagcatgtcacctaggttggtctcaaactcctggctcgagtgatcctcttgcttcagcctcccgagtagctgagaacacaggcatgcagcactacgacctgctaatttttgtgtttttgtttgttttgagacagagtcttgctctgtcgcccaggctggagtgcagtggtgtgatc

SEQ ID NO: 155052 - DNA, 461 bp, Homo sapiens
agccagaagaaaaggcaagtctcaagatgtatgagacagaaaacactgtaattcctttttatcctaccataataattatgatacaaataaattataattataggttgaaatcttttctcagataaataaaagccacaacctgtccaaaatgtgacaagatccaaaagttattttctataactaagacaggacaaatattgattgatctttggagaaaagcaaaaatagtgaatagccttacatattctgactctaaggaaaaggtgaggttcctcaccaagggtaaagattaaaattgaggcagcaggcaggaggtgccacctgctggtaaaacacaaattctcagtattttgactgtgacagagatcagtcttaataggaatttcaactaaccgaattagaggttacttatgtctccaataatagcttcttgagacagatacagaatctgagacttccca

SEQ ID NO: 155053 - DNA, 380 bp, Homo sapiens
gtgagactgagctattcacaaaggctgatgggaatacagacaaaaaggaaactcggggtacaaagctgctgaccttgagttgagcagaatcttaagtcacctgatctgagttcaaatcctggacacgatatctactgaatgcatggttcacctcatgtttctttaccactgtgagcattcgttttctttctcatctcgaaaatggagattataggcgtgagccaccatgcctggcatacataacagttttgaaggaataagaatgacatatgtgggccgggaggctgaggcaggagaattgcttgagcctgggagatggaggttgcagtgagccgagatcatgccactgcactccagcctggccaacagagcgagaccct

SEQ ID NO: 155054 - DNA, 311 bp, Homo sapiens
aatgagacagcattttacaaccactggttggcaaaccttgaagtttaaatgacaccaagtgggtgtacccttataccctgctggtaaaaacatgaaacaatttagaaaataatttggaattagccagtgaagcagaaaaatatacatagttaatataccactcctaggtatacttcctagaaagattcttttgcatgcagccaggaaacatgtacaagaagtttcagagcagtattattttggatagctaaatatccatcacagataaaaaaattctgataaactcacaccattgtaaactacagagcagt

SEQ ID NO: 155055 - DNA, 442 bp, Homo sapiens
ctagaatctaaagctatccgccctctctctgaccacccctttccccattcttgaaatttctttcatttttcttactccgaggtcttttacctctttgccagtatttctcacaaatacttattttacctgcttctaaaatgtttgtgtccacaaaaacacaattccccagtactctccttgcctgctctatgatcttgaactcctggctttaaaaaaataacgaagttggctgggcatcagctgcacgcctgtaatcccaacactctgggaggctgaggtgggtggagcacgtgagatcaggagtttgagaccagtctggtcaacatgctgaaatcccatctctactaaaaatacaaaaaattaggcttggtggcatgcgctggtaatcccagctactcggtaggctgaggcaggagaatagcttgaacctgggaggcagagg

SEQ ID NO: 155056 - DNA, 367 bp, Homo sapiens
catggtttgaggatgagagggccctgcttcaagatgctgctgccattgcttcgcaggcctcttcctgggcccctctgagtgctgccccatccctgggggtctcctgggtctcagaagcacccctcccaacacctcccccaacacacacacacccacacacacacacacacacacacacacactttctctgttctccagcagccttttagctgctaagatgctctttgatacttaggcctttgtttcattttgcgtgtggcttccccaggctgcagtgtgttcgatgactctcccgcccagccatacatccaggcttctgttcccttctccagatggcctttcatccctcccagcctccccctgcacc

SEQ ID NO: 155057 - DNA, 531 bp, Homo sapiens
gataatgaaaatgctctaaaattagattatagtgatagtggcacaactctaaatatactaaaaatcattgaattgtacactttaaattggtggactttatgatatttaagttgcatatcagtaaaattgtatgtcagtaaagtttaaaaaaaaagtggttgtcaaaaaatgaggactgtatgctttttccatctctaatgccagttgaaagaattttagatctaaacaagcaactcaaatcactttataaacttttgccagaactcatcttttttatttggtatgagttcttagaaatagatatatagaatgatatttaacactatttattattattattatttttagagacagggtctctgtgtcaccccaggctggattgcagtggcacaatcctagctcactgtaacctcgaactcctgggctcacgtgatccccccatctcagcctcccaagtagctggaaccacaggcatgcaccatcatgcccagctaatttttgtattttttgcagaggcagggtctcaccctg

SEQ ID NO: 155058 - DNA, 208 bp, Homo sapiens
tatgtaattaaatgaaaatcacatgtagtttattctttgaaccatcattatggaaacgtactacacatgctctcgcccaacatatgagctccaacacagcacttttccagtggtgcagagcagaaatgattcctgatacagcaaacacttccagttagcacctctttccagtaaactaaactaaactgtgcctgtgttttacctgatt

SEQ ID NO: 155059 - DNA, 358 bp, Homo sapiens
tctgtttcatagctttgtaagaattctgtgtctttataagacacagaagcaaggcaggtgctacataaaaaagtaatctcagccaggcacggtggctcacgcctgtaatcccagcactttgggaggctgaggcgggtggatcacaaggtcaggagatcaagaccatcctggctaacacggtgaaaccctgtctctactaaaaatacaaaaattagccgggcgtggtggcgggcgcctgtagtcccagctacgtgggtggctgaggcaggagaatggggtgaacccgggaggcggagcttgcagtgagccaagattgcaccactgtactccagcctgggcgacagagcaagactctgtc

SEQ ID NO: 155060 - DNA, 458 bp, Homo sapiens
atctcatgtagctcaatctctcacttgaccatgtgagattcatttgccaaggctagaatgaaagtctacaaaggaaattcaaaaggcattgccaataaaggactagttaggccattaagtatatttgaaagtgtaatgaggatctaaagggaaattttgtcttattgcatacagtctctcaaagatgttgtatatacattccacacatttataaagcaagtaccatttgccaagcactgtattacaaagtatgtgtcacctgcacttaatctttgtttatgcacaatcatagtgcagtgtctgaaaattacatttagatctgattcttcaaaccataaattaaaataattgaaattccatagtttagaataaaagggacttattaaactaaatatctggatctatttctctgtatttcaaaaccaaacattctttggtacctaatccacatagagtat

SEQ ID NO: 155061 - DNA, 580 bp, Homo sapiens
aggaagaaggtaaaatttgatgtttgcgcttcaatgtgctccgtgttgtttgattggattgccttgtataattccatagctgcttcgcttattaccagttacagcttatgtttgaagtcacaataaactcttcttcaaacatgaaagcttgatttttgaggaaaattattcacattatttacagattcaaagatgtttatgtcctgtactctagaaataaggagaaagtgggtggggatggggcagtcaggtggaatggagtgtcttggcagtgtaaaggaaaaaaaaaaaaaaaaaatttttggggcgccttgggcccctgaaaaagctttctaaaacacatccgtggggcgcggggccccagataggtcaagcacacctgggccaaagcgggtccaaaggaaaacccgcgcaaggacacgggctgggaattcccgcccaaataaaaaaaggccccgggggcgaaaccagaaggcttccgggacaaactccgagaagggacacacgggagggcaccagagggaaccatcacagcggagcccagaggaaccgaaattcaattagccagcacaccgtggat

SEQ ID NO: 155062 - DNA, 225 bp, Homo sapiens
aacatctttcatagcaacagatatttttctaccgtatagttattaatgattagtataccattgagtaaacattctaaaatttatttaatttatatcccttctaactggacagttagccgtttctaatttttttgcctttttattttcttgagatagggtctcactctgtcacccaggctggagtgcagtggcatgattttggctcattgcagcttccacctccaa

SEQ ID NO: 155063 - DNA, 297 bp, Homo sapiens
agaattgcttgaacccgggaggcagaggttgcagtgggctgagatcatgccactgcactccagcctgggtgacagaacgagactccatctcaaaaaaaggaaaaaaaagtatttccattatgttctgagaggcctatttgctatttcttaacaactgtaggtatttataaaataaaacatgtgcacatcccgatatattattcagcattcaattcctttctcctagtaaaaagaggcaggtagagttttggctacatagctaccattaggaaggaacagaatttgtagttgaaaatt

SEQ ID NO: 155064 - DNA, 911 bp, Homo sapiens
tgaattcctgagcttaagcgacccgcccgctcggcctcccaaagtgttgggattataggtgtaagaccacacctggctgtatgttagtattcttacaacaaaatgtaatcagttgtatggtatttttgctaaatcaactttgtaagcctacttataacagaaatgtccacattattgtgggctattctttgccagacaaattgatggcaaattcataggtatctaatgtcactgcttaattcctgccgtttcaaaaagacagcaaataagcaaaaccacagcattaattcttcatgtaatttaagaaaaatagtgtttctctaactccattaatcatttaaatcccatatggttctcttacagcagtgtgatctagctgcatttcttcactgttaagaactgttaggcgcttctgttggagatagtttctaatgttgaaattatcagtgaatgttcattaattcttcatgttgaagctgtcaccatggaaacttaggtgttatagcaactagttatatgctataacttacttagcattaagatgattaaataacatactatatgtaaagcagttggaagaatcatggaaagcaatgtcatttcttagcagatactactatcattttattcttgttttttggcaagtgtgaaaattaaattcaaatattctttaagatgtatacttctggtcttgagatgtaacatcactttgtgatcttacctaagtcctctgctctgtaggaattacaattgtttacataaagatgctattactatctttggtatgaaactcaaatatttatcaatagatttaccatgatgttttgaaaatcagtgggattggggacagtgacatgtcaaaatcatctaggaattaaaaaagaaaagcacaacactgcttatttaaacac

SEQ ID NO: 155065 - DNA, 259 bp, Homo sapiens
ttaaatgtgtatttggtatttaacattgactttccctaataaagcccttgatcaaacttgatacatttgccaaacacataatgtaaaaactaatagtttaatgtgcccatttttcctctagtgtttgattgctacagtttctaagtaaaacctatttataaacttgtctgatttccaaatgcaaacatttttcttttaaaaaccttaacaatctaattaaagccaagcatgagcacgacttgaaaatgataccaacagt

SEQ ID NO: 155066 - DNA, 233 bp, Homo sapiens
cgtccatgcagattttaggtgtatcctgaatgcggctgaccaggagagaaaagtcagtctgttttctgggctatgatctggataccaagttaatataattacgttatctctcaggccaaattcccccataggagtgtgttgctttatgccctggtaagggacaatggcttctctccatccagacatcgtgggtactttagaaactttccagctctcgagtgaaagcccatgag

SEQ ID NO: 155067 - DNA, 336 bp, Homo sapiens
ccaacagaaaacaggagaaaatctaagaagccagtaagtgtaagaaaagatgatgaactttaccagtaatcagagaaatgttaattgaaacaataagtacataccattttcaatctacgtaattgacaaacgttttaaagtctgacaatgcaaatgatgttgagaatgtggtgggacagtaaactggtccaatcattctggagagcaatttgaccatatctggtaaagctgatggttgtgatactctgaagcatcaattcataatttgtttcaattatagatacattctctagagaaactcaaacctgcatacaagatgactcacagatgactatc

SEQ ID NO: 155068 - DNA, 624 bp, Homo sapiens
tgcttctgcttaggcatttgagttatgcctgggtaacatagggagaccccatgtctaaatagaaataaaaacaagacacatagagaagtttgagaataaaatatagacaacagaataaaaccccacattaacataaatcttggaattctctgaaagttgtataacagtaaatgttactacatatatatagaaataaattcaaaggtaaataataccagcataacaatataaaatattttaaaatattaaatgaacattttgcaactaaaaatacactaactatagcgaattgcttaatgaatgggtttaataccagatatttcatagctaaataattcataaattggaaaataaatgagaaaacaacatacagtcttaagaaaaaaatatagagaaaaggcaatgaagaagcttatagagcttaggttgaaattagacttcccaaggagagataagatagaatggagaagaagctattgaacagataaacacctggaatttttcagagcagattaaagatattgggttacatattggaggagaactatgagcctgaaaccagatataagaaaacatgtttaggcagaaaatattcaaaagactataaaacacatattaaagaaa

SEQ ID NO: 155069 - DNA, 548 bp, Homo sapiens
gtagtatcattatcattattattaaattcatgaaaagacattttcctcttagcagttcataattgcttgataacagtgttatgagaaagtgaactatgtgtattaataaaagatgacagattttgtcattatgtgtatgggaggacaaaggaagcagatgacatttactgttcccctatgatgcaccagacactgtacttactagccaccattgtgtacatgatatctgaacaacattgtgtgatgaaagtattattcatccccattttatagaaaaggaaacaaactcaaaaagattaagacagtatttccatttcataaagcaagtattttatgtagccaggatagaaaaccaggtgtttctgtgtccagaattcataatttgccttttcacctatgaaaataattgataaaaatgagactttgcctcaaacactgcatttaagttacagtattaagatacttgcagcttttctttcctctttattcaggaacaaaaatttagcatttctaagggtgtcacatttaaaatatatttaaaaaagaaa

SEQ ID NO: 155070 - DNA, 195 bp, Homo sapiens
tcagtggctcccgtccccacgtcttcctacacagtgctgccgcagcattcctgttaagcaaaacaacacggtggctcaaatctaatatcttcctgttggaaggcaaaggccacctgcttaccttggccctgctctccacagttgacacctggcttctgtttccagcttctctccatgtaagcaggtccccaaatg

SEQ ID NO: 155071 - DNA, 194 bp, Homo sapiens
taatggtcccggggcgcaggtggaccaatttgcagcctcatcagctctccctagagctttgcgctcaccctgccctattgacggcaaacaccgaaaggatgggaggagagaagagacgtatgttttatatggatgtgcatattgcagtaacttaaaatgaacaaaaatctggaacaaccattctgtgtttatag

SEQ ID NO: 155072 - DNA, 479 bp, Homo sapiens
tggctgtggacacctagtgacttatcaggatagtggcacaatgacatctaagaattatcccgggacctaccccaatcacactgtttgcgaaaagacaattacagtaccaaaggggaaaagactgattctgaggttgggagatttggatatcgaatcccagacctgtgcttctgactatcttctcttcaccagctcttcagatcaatatggttatttcaagctgaagtgtcttcctggagcagttctttgttcttcaaagaggcccatgtaatatgaaactttgaaaggactcaaatataaggtgttgcctaaaacattcatttctttttttgtttgttttttgagacgaagtctcgctctgtcgcccaggctggagtgcagtggcgtgatctcagctcaccgcaacctcctcctcccgggttcaagcgattctcctgcctcaacctcctgagtggctgggactacaggcacacactagc

SEQ ID NO: 155073 - DNA, 372 bp, Homo sapiens
gacgattcctgagcctccttctcagcctttgtgttaattctttgcattgatgacttctctctctttacccttactaattagctctcaaaacctctatttaataatgatgctatttataactttcctccttctggtttcttgcttgccctttttgtggtgtttgcttgtttttcttttttctcaatactctgcccagcgttgcgtgttggttccggagacttaagtgatccagtgggcactgtcaggcaattatttcttttgctcattaattaagtgttcacagatacattcagcagccaaaccttgtggcatgccttctgtcccagacagtgagaatctacttggaacttggatatttctgtgagccttgat

SEQ ID NO: 155074 - DNA, 216 bp, Homo sapiens
ctttttggaaaattaatgtgaaaatataaaaatgtaattgctaagcaaactgtgcattaagcatcattttcaattaattttagctaagaattgggttattaattttaatatcttgcaatcacatttataattaattaaagttaatctctttaaaactcactttagagactctgtaaactacagtgtattcttattttttaaggaatttctcttctt

SEQ ID NO: 155075 - DNA, 396 bp, Homo sapiens
gtcctcttcctggtatgcctttcccacttctctatgtgtggttggctcctcatttttctggccttagctcaggtgtcacctcttcaaagaggccttcccagactatccagctaaagcagtcccagccacagacacactccatctttatttaaaacctcccccaggccattttcaagttcatccaggttaaaagatcagcattttctggatctgtgccaccttttcatagtcagcagatctctgtctgctctcaggggtatgccaaaggccactgggtcattggtaagcagccagggatcctgaggctcccagagacctagatgcccagtgacattagggatggcaaaacaagctgggcatggtggctcacacctataatcccagcactttgggagg

SEQ ID NO: 155076 - DNA, 539 bp, Homo sapiens
catctgtctgacttctgtcctagtttcttctctcctaaatctgagaggtgacttgtttccagtggccaagacatcaccaaaagcaaccatttgattgtgcacaccaggaaaaaaagtggacttgaggaggcgaatgattgggaacacccactaatttatgttaaagtcaaattatttgatggctgagtgcggtggctcactcttgtaatcccagcactttgggaagctgaggtgggtggatcacttgaggtcaggagtttgagaccagcctggccaacatggtgaaaccccgtttctactaaaactacaaagattagccaggcgtggtgggcagtgcctgtaatcccagctactggggaggctgaggcaagacccaggaggtggaggttgcagtgagccaggattgcaccactgcactccagcctggatgacggagcgagactctgtctcagaaaaacacacaaaaaaaacaacaatttgctgtttgacttaaactggccacacctttgttgaagtgctttaagcaaaccctggcaatg

SEQ ID NO: 155077 - DNA, 551 bp, Homo sapiens
caaagttctgggattacaggcagaagtcaccacacccagccagccagctttgagtttcatttctttcattttcttgctcatcctcagagagagaggtttaagaagagaaataaaggggaaaaacgggaaacagaaaggcgaaaggtatagatgcctcaggaactgacagggagtagcagtcaggctcctggaagaaacgagaaatgtagcaaggcatggtcaggaaacacatgtctatccatgctcccactctctctgcctttccctctctttcccatccctcttgccaagaagtgagttggcaatcttaccaatgacaaacaaaatagataaagcctccacactgagatttagaaaccccactttagccaaaactaagtcacttacatcaaattgtaccatgacaccaagcattcctgtcccctcccctgcaatggcaatcaagtgtcatagaaaaatagccttttaaaattaccatgagccttttatttttatttatttttacacccaggctggagtgcagtggcgtgatcacggctcactgtagcctc

SEQ ID NO: 155078 - DNA, 354 bp, Homo sapiens
gcaagttatttccctctctttgccaagggggaaaaaccaaggatctggtaaattgcccaggatttcccagcctcggatgctatcttgtgggcggctctcatgctcccggctgcatgctgtcccttccattagacgtgctttggccgtttgaggaagggcctggtcagtaacctcagcccacattttcatggatttcatggtcttcctctggaaggaggaaagcccaattcagagaaccatatactgttagaactgcaagttttcaagacagagttctagtccaaaccaatccttttatactcgggccaactgacatccagagagggaaagtgatttgcttaaggtcacagccca

SEQ ID NO: 155079 - DNA, 395 bp, Homo sapiens
ccatactttcttcctgggaaacatattcactcttccccactacgaaataataaccaagtctatagccctagacatgactaacgttttttcctgagctttcagcagacttgaatttcaagtatctgtaaaatatttataaatattctaccagcaactcaacatcaacatcccaaaacctgaatcattatttccctcttaaaaaaaaaaaaaaccggcggggctcttccaatattcttaacagcatcctcctaagctagaagcctcaaaatctaactattctctcacattccagtgataattcagttttatcgattctactttccaaggcttggtcacggtcctagtcatcttttaccaaaactaattaagtagtcgcccagtatggtataaaggct

SEQ ID NO: 155080 - DNA, 517 bp, Homo sapiens
ctagaacatcgtttttccttaatagcataccctccacactgtgtggtctaaattcaagctctaccacctactagccattaagcaagttattaaggtcttcgtgcttccattttcttacgtggaaaatgaggtggcaatagtatgtatgagttcttcggagggattaaacaagtcaaataggccaagtgccatggcttacacctgtaagcccagcactttgggaggccaaggcaggaggactgcttgagcccaggaggtcaaggctgaagtgagctgtgtttgcatcactgcactccagcctgggcagcagagtgagactttgtctctcaataaataaagaaatagtcaaattaaatataactggcaaactaaaacaactccatagtccttagctacaatttgtctcatttctccaaagaattaaatcagatgattcttaactaactcaaagctctgcataatttgtcttctgctacacatacatctttatagtaaaataaaataaatctgtcccctc

SEQ ID NO: 155081 - DNA, 586 bp, Homo sapiens
ctagaacatcgtttttccttaatagcataccctccacactgtgtggtctaaattcaagctctaccacctactagccattaagcaagttattaaggtcttcgtgcttccattttcttacgtggaaaatgaggtggcaatagtatgtatgagttcttcggagggattaaacaagtcaaataggccaagtgccatggcttacacctgtaagcccagcactttgggaggccaaggcaggaggactgcttgagcccaggaggtcaaggctgaagtgagctgtgtttgcatcactgcactccagcctgggcagcagagtgagactttgtctctcaataaataaagaaatagtcaaattaaatataactggcaaactaaaacaactccatagtccttagctacaatttgtctcatttctccaaagaattaaatcagatgattcttaactaactcaaagctctgcataatttgtcttctgctacacatacatctttatagtaaaataaaataaatctgtcccctctgtattgagaagttattctggtaaatatttgacctcttcaaatatatgaacgagcacttgccttctaat

SEQ ID NO: 155082 - DNA, 440 bp, Homo sapiens
gacatacatgtattcaacactcgaataacacatcttagaaggaaagagcagagcacaaaatcaggaatcaagatgtgggaagaagaaaaaattcctttaaggagagaataaagcctgaagacaacatgcagcaggtaatggggtgaccagcagctaaatcaagagatatgagctataacccctcattacacccaccaagctggtttcctcggtttccttccgaatgttccttaacttttctaagtcttagaatctttaggtttagtttgaacagggaagatgatatgatatccaaaggtctcctccagctctgataacagactgggagtttgtttagacgatgaacagatacgtttaaaggggaaaaaataggctacttttatttcagtgacttgaagttcacaagaatgaaatttcacagaagggagccaagctgtcag

SEQ ID NO: 155083 - DNA, 563 bp, Homo sapiens
cagtgtccatgatagtgaatccattttggttgtgttggatttgaggtggcaaagaaataaggaactggcatgtgactgcgggaaattggagctacaagacaggagttcaggtgaaaagataggactagagttggatgctgaaacttgcagtcacacaaggacttgaacctagagcttttctaaagcccgtactctttccagtaccctgagccaggggagccagcgggcagaaatgacgtgtgaggtaccctctctctcttcacttccatgtgatctgttactcattttgtcaagacatcctgggtcccagagaccactcttattcccaggtgtgtgacctcctcctacagactacagtgggaaagacaccatctccaggtgccaggtgctacacaagatactggctatagcagcgaacaggacagcccgtctcatcctcatggaggtcacaggacaatgagaagaaagacttttttatttttatttttttgagacggagttttgctcttgttgccgaggctggagtgcagtggtgtgatctcgactcactgcaacctccgcct

SEQ ID NO: 155084 - DNA, 398 bp, Homo sapiens
tcagtgtttctgggtctgggtttcttgggaatgttacctttttagggggttgttcaaaagacgagattagatggcagaggtgaaaagtggtgtgactgaagttgtctgtctgactaaagctgaagtagtccaaagtccaaactctgaagcctggagtctgaaatccagggtcaggagtctgaagtctgaagtcagaagtctggtctggagtctgaaatatgaaatctggtctggagtctgaagtctaaaatctgaaatctgggtctggagtctgaagtctggtctggagtctgaagtctggagtgaatctgaagttcgaagtctgatctggagtctaaaagtctcctgttgtctggagtgtggagtctcttgtctggattgtggagtctcttgtctgg

SEQ ID NO: 155085 - DNA, 551 bp, Homo sapiens
agggggtatgtgtaaactagtactagacatacttgcagcacaagggaggttgtcttgcattctgcataaggaggcagagatggtgagagaagcagaggagaaacctgagagctggttcttgtagaatgagaagtactttgctcaagaaatggatgtgtgtgttagtatgtgggtgggaaaaagaaggagtatcctttgaggtacatggtaattcatagaaaagagaccatctgtaggaaatataacaatcctttcaggagaatatggaaatagagacttctggttccaaaatggtatcatagaagcaagttggctacactccccccaccacagaaaaccaaaaataaatatatagcaccaagatttatcaacagtaatatcccagaactgatatacaaggagacagttcccaaggcacagagaagtggaaaaactccaagcaggtggtaagagaataggacttccattctgtgatgctcctcctccgaatctgattggcaccaaaaatgcagaaaatttcttcccaactcattgtctctacactagaaaaa

SEQ ID NO: 155086 - DNA, 530 bp, Homo sapiens
ggagtcggacctacttttcacagggaaaggccatgtgaagacacagcaagaggtctgcaagccaaggagagtagccttactagtaactaaccctgtaagcatattcatcttggacttccagcctccagaactgtgagaaaataaatttctgttaagccacccataagtccatggtattctgtatgacaggcctcgctgactaatacagagtgccataagttctcctgtctcaaaatggaaatttagggggatttggaacaagaatcattagataacaacagaattataaggatattaaataaactccatcctcatcccttgggccaaatagcagcttttttgtctagtgagaaactaaaatataactccatcatggagcaagggtaagaggaggataaaattgtccatagtgaggtggaggacaagcaggaaatctttaaaaggagaagatgaaagtgagaaagttttcctctaacctaaggaagtacctctaccctcatacccctgtggaaagtaccctgtgaaaagta

SEQ ID NO: 155087 - DNA, 283 bp, Homo sapiens
actgactaatataccctgtgacatctaatttctccttatacaactgtcttatgctattccttttaggcaaatgtctgacccaaaagaagctatggtagaaaacacatatcaagatatatacctgacttcatttcgctcggaaataaaatatattcaaacaaagttggagatttccccaaattagtaaatgctatttccccatcaaattccatatacaaatcaaggattcacagagacccccaaaaacctcctatgagaaagatactgcaacagaagtcagccc

SEQ ID NO: 155088 - DNA, 138 bp, Homo sapiens
acattccaagaaattcctttttaaaggttacacaagagaggcaggcctgtggagccctaattggtgttcttcagttgccaagcccaggcctaggttctttctctctccttgaggtcaggaaatctttttttttttttt

SEQ ID NO: 155089 - DNA, 257 bp, Homo sapiens
tgaaacttcctccacctgcttgaggagcgccaaagcccaggtgctggctggacaaccccttctggctgcctaagcaggtggcagaagaaggaaacaaggtcagaggcagagtgttgaaccctgcctcccaggtgggtggaagatgcctgtcgccaaactaggtcccagcttgccgggtgagatgggtgaactggtgatcccccgagagagtggacgtcagaactacatgtttccggacttcaccttggccagcgaag

SEQ ID NO: 155090 - DNA, 630 bp, Homo sapiens
gctatgatcacccatgacaccagctgggtacagagctagaccgtgttcaaaataaatagataaaataaaatttaaaaaaatttttaagtaaaataaagtacctgccactctagtctttatcccatcacatctatcacaatctgtaattaactggtttgcttattgtttattgcaatgtaaactccaagacaagataggctaccttccttgtctgtttcattagtggctacatccccagggcttagaacagtgccttgttctgccataatagtctagcacaggcttttaaccaacatggatttccacgcccccaaaaataattgtttatttttctttagaacaaatgttttcttcagaaataaatgttgttttactcaccattttatctgttactctaaggtactgctgaatcctgattagaaaggtctaacatgggccatgcacagtggctcacatttgtaatcctagcattttgggaggccaaggtgggcgaactgcctgagctcaggaatttgataccaggctgagcaacatgtgaaaggacttattgaaaaactttttggaagttttagcataacttggcaccagaagtaggaacgataatttgaatgcacaaagagaactttaaat

SEQ ID NO: 155091 - DNA, 534 bp, Homo sapiens
actcaaataactaaaaccagaaatgggacttggaacattactaccaaccttccacaaatgaaaaggatttaaggtgaatcctatgaacagttgaacaccagtgaattagataacataaataaaatggacaaattttttagaaatggacaatttacctaaatgccccaagaagaaatagaaaatcttacgagacctataacaagtaaataaattaaatccataatcaaaaaccttccaacaaagtccaggactgaagacttcactagtgaattctatcaaacatttaaagaattagcactagttcttctcaaactcctccaggaaattgcagaggaaggaacacttcctaacttgttttgttttgtttttgtttttgtttttgtttccattttcattttatttgctttattttatgagacagagtcttactcttttgcccaggctggagtgcagtggcaccatcttggctcactgcaacttccgcctcccaggttcaagcgattctcctgcctcagccacccaagtagctgggat

SEQ ID NO: 155092 - DNA, 1940 bp, Homo sapiens
taaactattaccggtgcttccgtgcagtaatatcaccctagcacagacattgcatttagtggaaaaaccttctgatgtccaaagagattgattttaaaggtctcttccaggaaaactacttattttcataaatgaataccttcttttattcttttttttttttttttttttttttgagatgaagtctcactctgtcgcccaggctggagtgcagtggtgggatctggctcactgcaagctctgcctcccgggttcacgccattctccagcctcagcctcccaagtagctgggactacaggcgcctgccgccacgcctggctaatttttttgtatttttagtagagatggggtttccccatgttagccaggatggtctcaatctcctgaccttgtgatctgcccgcgtcggcctcccaaagtgctgggattacaggtgtgagctactgcgcccggtctcctttattcttataactagaaatatgtagcattcagtcattgtatgcatccaagcaatgataaaagtaaatatcgtttaaaaagtgattgagctgcatgtggaaatgtctgttcttcattcttttaggagcaggaatacatatagatataaaaaacatcccatattttaaaaggaattcttagggcttgccaatcttgtagtaaaggttgaattagcagtatatgtcttctacataaaggaaaagagaaaacagtaattgggggaaatttcttgaccatgcctttcttctgtttgttcctgctttcctttgttccttctttgtttcatcagcaattttttttttttttttttttgagacagagtctcactgtcacccaggtgggagtgcagtggtgcagtcttggcttactgcaacctcgaactcctggactcaggagatcctcccgcctcagcctcctgagtagctgggactacatgtgtgcaccaccatgcccgcctaatttttttgattttttgtaaagacagggtctcgctttgctacttagtctggtcttgaacttctggcttcaagcccttcctcctcagcctccaaaaacgctgggattacaggcatgaactgctgtgcctgggcctcagcaatttttaaaagaacttttcaagtaattcagtcgttgtaaagtcatttaatgtggagcataattaacactttccttaaaaagtgtgcctcttgaggataaagcaaactttaaataaatttcttaaagcatatactaacaatcagaaactgagtgtaaagacctattatgggtacctaagtattagcagcacgcaatagagatactagatttggaccaggaaacagaacccttagtcccctacttaaaataatgataattcaactctcttcctggataaatgctttcatatcaccttgacttacgttgaacaaaactaaaattaccttttgcagaccaactttgatacccttgaagatgttaagttttttttactttttattgccagttaacatagggaccagatagtgaaaaatagctgaagtgtttttccagagaaattggagatcaagacaagatagaaaattacaggggaattgctgatctgtatacccaaaaccctaaattcctgcctcttcagtgttaagaataagacataagctttgtatacaagtttaaaaccatatgatttccagtttcttacaaatgaaccatatattcatctaaaaataaattctaagtttaccctaagcatgttttacagttgtaaatttttgtggacgtgaacttagttatcttttacttacagttatatcaaagcccccagcttattttaaaattattaatgcttaaaaacagtttgctgtttttagtcattttgttgttgttgttgttgttgtttttttttttttgctttgttgccttttaatgcacttttgtgatttaaataagaaaaaaacatattatt

SEQ ID NO: 155093 - DNA, 395 bp, Homo sapiens
ttagtcgcagtccagttcagttggtagaaatgaatcaagcacttacaaaatctcacttccactctttcctcatctttagaagactcaacaaatgcctccattcctacttggcccccttggtcaagtaagttaacctcactgtggctccactccctcatctgtgaagtaggcacagtgccttgtaggtgctgtcgtgaggcaaaaagagataacacctgaaaagcacttagaatagtgcctggctcatgctagtgctccatatatgttagttagtatcctaaagccttttctcttacctttgcctgctcccctggacctcacagcagcccgtgcttatctcctcattctttccctagtctgtcttcctctctggtctcaaagatgcttgccaaggg

SEQ ID NO: 155094 - DNA, 564 bp, Homo sapiens
gagctcaaacaatcctcttacttcagcctcccaagtagctgggattataggcgtgagccactccacgtggccttttgctggtttttaaaaatcaagttttttactttattattgatttgtagtcattctttatatattctggatataagtcctttgtcagctgtatgtattgcaaatattctctctcagtccgtggcttgtctttttattttcttaacagtatcttttgatgagcaatagttcttaatttgaatgaagttctaattaatactttttaaaatacttagtgctttttgcatcttctctaagacatctttgcctgccccaaggttgcatgatatttaccatattttcctctaaaagctatatagcattaatttttaaggttgtttgtttgttcatttgtttttgagacaaggtgccactctgtcacctaggttggagcgcagtggtgcattctcagctcactgcagcttcgacccctcaagctcaagcgatcctcctacctcagcctcccgagctcgagcgatcctccctcagcctcccgagctcgagcgatcctcc

SEQ ID NO: 155095 - DNA, 607 bp, Homo sapiens
gattgaggtcagtacccttcgccggttctcgttgcatgctaaaaactgcctgctagcctgatggctcactcctgtaatcccagcactttgggaggctgaggcaggcggatcgcctgaggtcaggagttcgagatcagcccggccaacatgacaaaaccccatctctgctaaaaatacaaaaattagctgggcatggtggcacacacctgtagtcccagctactcgggaggctgagacaggagaattccttgaacccaggaggcagaggttgcagtgagctgagatcgtgccactgcactccagcctgggtgacagagcaagactccatctcgaaaagaaaaacaagatttaggatgcttaattgggaaggtacgtgatacaaatattctaaaatccagaatccaaaacacttctggttccaagcatttcagacaagggatattggacctgtatctatattttaaatgagtgtcattaaagaaagagaacagcacatttattatgatataatattataatatgatatacatctgtttgctcttctagagtaggtctttagaaaaaagtttatatcttattaaaaccagatttcaatcacttaatcgag

SEQ ID NO: 155096 - DNA, 270 bp, Homo sapiens
tgactttttccttggctttcacgtcaaaatgaggaacagtccttcacatactggctcctatcctcactataattcacctggtgcaagtcacagactaccaatatctacatggattacaaagtcaggtaaactgaaggtaattaagaaatgtgatactctgttattacaactgtttttatagcataatatctcctgcaaaaattacttttaaggcagtctcactgtgctcatgcattcttttcctaaataaagaacagatgtaatttactg

SEQ ID NO: 155097 - DNA, 576 bp, Homo sapiens
ataaataaatacacattggcatcttgagtccatttactgtgtaacattcaagaaattactcaacttcgtgtctcagtttcctcatatacaaattggggatagtgggaatatctacattatatgtttatgagactaaaataaaaggcatttatagcagtgcctgccacagtaagcacacaataaatatcagcttcttttttgtagctagtgtaacttcactgctttgaaaaacaggtctaattctatagatttttttcacattcttaagaagtgctaggatatgtagcagatgcaaccaaaccccaatctagacatacagtcagcgaatgtcctctcaaaaaatgggcattccctcaaccagtgtacttccctcaatcagtctgtcttcacttttgcaccggcaactatactccaaaaaggtatctctcatgcctgtcaccacatataaatgtaaatttcagtttcagtggaaatttacatctatacatccagactatcagatgacagatataagcttggcaaacttaccctttggaatcctaacatgatcagctcagtcctgtctcactgcctatc

SEQ ID NO: 155098 - DNA, 293 bp, Homo sapiens
gcaactttgcttatttaaatcctattcatttttgaaagctcaagttttgttttccctggatgcttatgtgattattttggctcacatttgccctgttgctcagaacttctttcaggaggcagtactatgtggtagcttaaagccaaagacttggtttggaatccaaggtctgccccttactagttgtgtgacctgaggcaaattacttaaccttactgaaactcagttactttagttataaaatagaaatacaaatcagctttttttttttctttgagatggagtctcgctct

SEQ ID NO: 155099 - DNA, 448 bp, Homo sapiens
cccagatccttgaaaggaaatattaggcccctacatcagttgagactcttttacttacacttggcagaaaacccttcataaactgcctcaaggggaaaagaggatgcgcataatggcaatgttctgaggaactggatttgagcttggcttgatccagagttgaaataatgttaccacctccaacaccatccttagaccagagcaagggggcctgcgctgaaccctgcactggagggccctgatatcacaaatctgaaaatggagaaacatttatctgtcagtttaggaaatttttttttcgagacaaattctgactctgtcactcaagttggagtgcagtggtgtgatctcagctcactgcaacctccacctccccaattcaagtgcttctgctgcctcagcctcccgccctcccgccccccccaggcggcagccgcggggccgccca

SEQ ID NO: 155100 - DNA, 494 bp, Homo sapiens
ctcaaagctgatgtctgcccccctaaaaatcctttctagaaaaaacagtctttttacacagcctcagttaatcagctctgcccccatctccattacgtctgaataatttgcccagtaggaaaataggccaatagtcaacaacataccctctgatatacagccttgcagggttcatttcaggccgcgggattgcgccacgggcgctaattcaactgcattcgatgcggcttttaaacccccatgggacacctcggcgagctgtttgcctgcagtatctggagaaattaaagacggacggacacaagaaaattaaaaagattacttgtgatcctgcaggtttcaagaaggactacctgaaaaagctcgagtataccttctagcttgattaaaggacagtgatacaccctatcaagaggaggccaggatactctaaacacatatgcctatcctatggccccttggcttagaaaacacagcaaggtttactactatta

SEQ ID NO: 155101 - DNA, 134 bp, Homo sapiens
caagtggcaattttaaatacccaaaaaaggaaggtgcataaaaaaggagctgagtgttttacacaggtcgccacaatgacaacatatgccaaggagaccacatctggactagtgtcactcaaaaaaactaaatg

SEQ ID NO: 155102 - DNA, 496 bp, Homo sapiens
tactggcaccctgtaaacttgaagtttctttttccagtgagagtaatcaaggtgtgaagtagccaccatgttctaagggatggagcgaattgctggtcctatctgttttggctgctgcgggttttgcttatgggatatcctcgtgccctcagtaactcctttgctcaaggtggtgatttagggggctgagaatttgtggttgaaatacagtgctttgcaaagttgtactaaacttctgcagtctgatttaaggtttgtggagacttgagtccccagtctcactttgttgccatactttgctgtgaggcttgtggagctggggtacaactcggaaaagcagcccagcatcctcactccagctgggcggtccagtgcggtcccagcatgaaaagtcagtgggatccataccaaacactcccacgcaagaggaatggggggtcccaacaacggcttcagtgcctcgtggctgccagagctccctccctccatggcatct

SEQ ID NO: 155103 - DNA, 457 bp, Homo sapiens
tactcaatatacaccatagaaatttgggaaatggtaaggatgttacagagggattggtgagtccaacaaggttttatgggaatagacttcgtaaaacagatgtaatatttggagaaatgaaaggagaaagcaaggctgaggaaactgcctgaataccaggtttattgcagggagtcccagaaaatgaagaggaagggtgggactatcttatgacgtctaaacctagagcaggttctcatttggagagtaacatcatcccgctggaatttttgtccaactaacctgccaactgtgtataagattgaagggggcaaatatggaattataaaaaaacgtcatagagacaattacagaaatctaaattcacaatgatcattggtctagatctgtcctatccaatacagcagccactaaccacatgtggcctttggcacctgaaatattagtagtctgaact

SEQ ID NO: 155104 - DNA, 376 bp, Homo sapiens
ggatcgtgctacccaaaggatttcccaacactgtggtatgtaatatgcattttagggcagtgtctccctacccatcacattccccattctcttgtcagtcccataaatgtgtacaattgagaaggaaggaatgaagaacaagtaagggagtggggcgctgtttactttttgtggggagccctctcagcaactttgtcaaatctagcccctttacttcattgccacattgctttctgtggcatcttagtccagtgggagcctgcagataccaagccaaagtcctcatgctgttttggttactttgataactctgtcagttagcaccctggttccactggtcatgaaagtgagttgagtcaggaacttccagatttga

SEQ ID NO: 155105 - DNA, 561 bp, Homo sapiens
ggctcagctgtcatcactagtgaggcaaggagatggagaactctaaattagaaatgatcaggttgccatttggctccaaataccagagatttttaagcacagattgaaagacttctgaactaaatttgtaacttagtaatttaattactttttgaagggccagttaagtcttaaggattttatgagaaagttaagtttatatttctgaagtaaacttggaagtttggaaataacagctaatatgctgttttctttctcctcttcttcatgtggctcatcccagatcacactcctagttaatatcaaagctaggactagaattcttatttctcattactagttagtgtacttcctaatagcctgtgctatcttctatacatatattattaggaggctgatcaaaggtgtcataaggaagcaagtactgctaatgagaatggcaattttttattaatcagaattagacaatataaccagcagtttttcttccaaccatttctatgtcttggagactttgaacccatgctgagatgtaattcatttgcatcaatagctatgtcc

SEQ ID NO: 155106 - DNA, 328 bp, Homo sapiens
tcccacatcccaaaatgacacctccatgcagccagattctgagctcccaaatacggacaggatccctgatttccctcctgccctctgcgctcccaccagacccatccacaggtcctgttgattctagcttgaaagcacattccagctgggcacagtggctcatgcctgtaatcccagcaataggaggcgcaggcaggaggatcacctgagccctgggagtttgagaccaaactgggcaacatagtgagaccctgtctctacataggcgggcagatcacgaggtcaggagatcagaccatcctggctgacacggtgaaaccctgtctct

SEQ ID NO: 155107 - DNA, 507 bp, Homo sapiens
gaaaacaggcacaaagagggatttaaagcaaaagatactgtactttgcaagtgtaattcatgattacttaatagggaaaagaagcaggtacttcaaaagaagcataaacggaaaatgaaaacaacatactaccaacaatgaaataaaatcggtctttttagtttctgatttaaagcatacatagtaggcatgggtttcatttagcattcccagactcagaataatggctctgtgttgaggcaattcagagaatctggcaatcatgtaactctgttgagatgttggccaattctattgcaatccttagtcaaatttttgcagtgcagtatctgtgtgcttttgtctgtatcttttcaagtgagagttgggaagttcccctcatgcccttgagcatttcaggttccctcgaaacagcttccacaacattgttttcctttatgccaggtacaaaatcctagagagatcctgattatacgatttgccaatccaatgttaaaaaacaagaaa

SEQ ID NO: 155108 - DNA, 593 bp, Homo sapiens
tgaggatgtaggtgaggacaggactgaacaaaaatcagtggtgggggctttgagccgtaaataactgtaccaggcttagccccagttagacacataacaaatctgcaagagagaattttgcctaacttgaatcaccaaaggacaactgtaagtcagcatttcaggctctggaatattacttgcatacccacttggtttgagaacttgtggagtctgagagatggcaagtcatgagactaggagctcggttttctcaaaatgtgtcagcggtcacctgctttgtaatcactgtgaactcctcattaaaaagtaaagttctggactcctccccagaatttctgcacaaggagacaggaactttgcatcttttgcaaggctcctgggacagcagggagttgggaggtaaatttttatgcacagtcaagtttgaaatccactagtctgtacttccagtcaagctcatgcaaaaattggtcccaaaatatgtttgcattcttaactcccatcagctctcctacacattctttttacaacacttgcccaaggtgaggactcttctcctggacattgatatggaggtttctctgtctatt

SEQ ID NO: 155109 - DNA, 493 bp, Homo sapiens
caaaaataattgtccagattttgtcaactctctttctttcctttcactgcctttggggaagggttaggagttatgcctcagctttctgtcccaccaggatcttctgagatttaacttccttgccctcaatttttcaacctttctattagctgcttttgatttttgtcttaaagcacgcgtgcacacacacacacacacacacacacacacaatcgttttattacattaggaaagtgagattctgatagtgcttccttcccctgtcttaaccctgtagtaatcagaatatgtattttttttaaaaaagtcctttccagattatctttgctatcagccgtgtttgggaacaattgtgttagatgacacagaattgggccagtggagaaagccatcagagctctcctttggttaataccgcaccgttcataaattcacctgctgatatttttctgtaatgttgggcaatagcttttctgctataatcaagaacacc

SEQ ID NO: 155110 - DNA, 379 bp, Homo sapiens
aaggaaatactgactataaaacaaaagcaaacaaaatagtggcctgtatgtcttcttgctctgccagagttgtttttaacaaaagacttaaaagccaccaggtatggtggctcatgactgtaatcccaatcctttgtgaggctggaggaacacttgaggacaggagttcaagaccagcctgggcaacacagaaagaccccatctctacaaaaagaaagtaaaataattggcctggcacggtggctcacacctgtaatcccagcactttgggaggccaaggtgggtggatcacctgaggtcaggagttggagaccagcctggccaacatggtgaaaccccgtctctactaaaaatacaaaatattggccgggcacggtag

SEQ ID NO: 155111 - DNA, 179 bp, Homo sapiens
catgctgatgccactcatgcataggggatgaataggaaacagagacctgacactctatatccagtgacctattgggaaaatgctacagtaaattagggctgctaaagtgtttaaatgtgtgactcagaagtgccccgggcaaggagctccgacttcaatattcctgcctgcctcctttc

SEQ ID NO: 155112 - DNA, 308 bp, Homo sapiens
taatttttgtatttttagtagagacagcatttcgccatgctagccaggttggtcttgaactcctgacctcaagtgatctactcgccttgccctcccaaagtgctgcgatgacgggcgtgagccactgcgcccggccgatttttttcttaataggcttctgccttgtctaacttcccagagtgaacatggctagctttcagaactgaatgagacctccgtgaatgctatttcacaggcaggagggtgtgaatgtatttgcagggagctggtgggggctcagcctgcaggacacagcctgaggatgggct

SEQ ID NO: 155113 - DNA, 235 bp, Homo sapiens
tgctagtggggagcagccccacagccaagggctggccctgccagcgtgcctttgctgggaagaggtataagtgctgagctctgcagacttggaagcaagggaagccgagctgcctcacggggaacatgctgagctgttgcttgagcaccaatgccagccccaggtagggtcggcccaggggggtctgcggagctgtactgtggctctgacatctatgaggcggtggcaagcagag

SEQ ID NO: 155114 - DNA, 242 bp, Homo sapiens
ctaggaacagtgcagcattatttggagaaaaacatctacctttcaattctgtgattactaataactggctgaatactctgagcttaaaatgactagtaacaacaaagaacaatataaacatgactcaaggtcacaaattctgtatacagaatagaaagtaaaaattgtttgatgtgcacagtaaggtttcacagagatttccaatgtatctttttttttttttttttccggccacggagcac

SEQ ID NO: 155115 - DNA, 168 bp, Homo sapiens
gacgaggctgggacatctggggcatctgcattactagacagcactggaggttgggtgagggaataaggtgacaaaaaaaatgaagaagctgtatgaagttaattttcaaaattatttttattttatttacttttgtttttatttttttttttgagacagagtcttgca

SEQ ID NO: 155116 - DNA, 184 bp, Homo sapiens
gagagagacaggacacaactcaagatcgagaaggatgctatttgctcgctttgcaataggcctgtgccaccaacatagcgatgtctgcttttaacaatgtcctggagtagccctggaaggttccagatttagaagcctgctgcagcgtgatctcttttatctacactcatcaagggttccgctg

SEQ ID NO: 155117 - DNA, 386 bp, Homo sapiens
cacggagaattaaattccattttttgttttgtgacatatttccgaaaccatataactaaagggttttaagaaaaggaagcctccttggtgatgttgttgattttacctgacttggaaattgttcaatcccacaattctttccattttgcatttctggatgctggactttctaataccgaatatgtgttaaaataatccccaattcactacactagaagcctacttaaattaaccactatggcaggagagtgttgtcggggagggctgttttctttttttctttttggtggaaagcagtcccaatcaataggatttaaatctataatgatgcattaaacctacaaaaataagctttaaaacataaataaaattaagtcaacaaacat

SEQ ID NO: 155118 - DNA, 468 bp, Homo sapiens
ggtcttgaactcctgatcttaagtgatccacccgccttggcctcccaaagtgctgtgattacatgtgtgagccaccgtgcccagcccatattttcctatttttaaactaatatcctttttctgttcaaggattctatccaggataccatattatgtttagttgtcctctctctttagcctcctattttcctttttttaagactgttacttctgttaaagtattttttgattcctcgtcaataggaccaaaattaggcttttctggatgttttgtggttgtgttaaagtattaacctttcccaggtgactcctaaataaataggtaaaatcattatagagttcagcaaacagctgtagtggtaattgagaacacctattgggatccctgttacctttggagttaaaagtttcaaacaaaacaccacttagaaacttccctacattaagaatttacacatttaagcgtga

SEQ ID NO: 155119 - DNA, 148 bp, Homo sapiens
catggaaactggcccaagcatttactcacagatgactgggcaaatccctggtcctatgggtacaaactattgatcaaacccccaatctcattcctacccctaaaatatagcaacgtgaaagatcttattacctatttggactgagatt

SEQ ID NO: 155120 - DNA, 472 bp, Homo sapiens
gaatataatgtaatttccttctctgtgtctggttgtcatgactccacatggagatactggccaaaggtagaaactgtcatttaaatcaacagagatttaacacagtaaggacagaaactttagtgcaactagatgaaaaatcatggttccaaatgacacataaccaggaggtaagagaacagttcattactttcctagactttggaacctaagcactaaataaatgaatataccatcaaatgttgatctatcagcatagacaagcttccctctgcaatctctgcatatccctaggccagtgaattcttaccttgtaatggttttggtggatggggcttagtatattgaattgaaggttcagagtagcaccttaagaatgttcaaatagaaaaggatggtttcaaaatataagctcttagaaattaggaacaatctcaattttcttaaccacatgatgcttagatgtaacctg

SEQ ID NO: 155121 - DNA, 261 bp, Homo sapiens
tccctcgtctgtgcggaccagcgggcacgtgcttgtgaccacgtatgttctcctctgcagtttttaccaagtatgttggccgtgtccatctttccctggtagtgaacgctgttctcgccatctgaggagcttctcagggtgcggctccactgccctgttcctcgtagcccagtgcccggtgctccctcttcgaggcggtgccctgttcctcgtagcccagtgcccggtgctccctcttcgaggcggtgccctgttcctcgt

SEQ ID NO: 155122 - DNA, 312 bp, Homo sapiens
gagcatcaacctccttggctgttcttacagtagcctcaagtctctcagtttaatgtgtttcagtgacatatctttcttccacccacttctgttttactaaaataagacagttataggaataggcctgtggtttaatttcagactggaaatggaggttaaactgttgctttagtatttgtgctgggaagggaagttaaaatacaattttctatttatcttaaagtgagtttgggttaaaaagtaagtctttcttctccccacctcattccccagaggtaaccatttatgtgtgtgtgtgtgtgtgttttctag

SEQ ID NO: 155123 - DNA, 333 bp, Homo sapiens
aactctaataaccagtgtcagaattttttaagagtaaaatttggcataaggtccaagacagcagtaacttatgtacattttctagaaaacagctgaaagtgagtgctaatctgaagaagtatgctgtctcaaaatgggctgtagtcaaattacactgagttttcactatattttgagtatatgaatgaaaccaagcgtctttttggagtctagcatacatgaaaatgtaatatggaccttggagataatttactacagattctcttatatcttagggcttcattttcttcctctatggagtaagagacttattaaggtcattcaaaaaggcta

SEQ ID NO: 155124 - DNA, 355 bp, Homo sapiens
acaatagtgggaggttacaggttatgatgaaaaaatgggggtaggtggtaggtggataaaaatatcatgggaggaactgaaggacttttaagagcagggatttctaattttaggttttttgcatccttaatttaaaaccacttatctgctccaaaccttctaaagagttggctatagaaacaaccaaagaaaaggggctgatttcgaaattatgtgtcagcaggagtagagagaggagagttgtaagaggtgatatgtggagaggtctaagtgttcaggaaaagcaagaactgagagccagaagtgacggtgcaatccttgagaggacattggccgtggggaacaccacaaggtg

SEQ ID NO: 155125 - DNA, 235 bp, Homo sapiens
ctccacctctgcccaccctggctttagtcacacatacccatggggatggccaggcagagaaaatgcccacacctctactgtgggagggccaggagagggtaggttggttttactggcctgtggtctaattgctccatgataactgtgggcaaatgggcaaatccattcttgatgggaatgtcaggagtcaagctatgctaagtagtgagtgacataaaaacagctgtgttcccaa

SEQ ID NO: 155126 - DNA, 529 bp, Homo sapiens
atcagctctgtcacttacgaaacgtgtaatcctgaataactgaagaaaactttttgaagttcaattttgagataatgatggatgatttcagactttgtgagaatttcagaggtatcggcagtaggttgaatggtgaaccctccaaaagatatatctatgttccaaactcagaatctgtgaatgtgacattatttgggaaaagggggttttgcagatataattaagttaagcatcctgagatgagatcatcctggattttctagatagggcctaaagccaataatgagtgtctaagacagaagaagacacaaagaagaagagacgggaatgtggtcacagaggcagagactggagcaatgcagccacaagccaaggaacacctggacccaccagaagctggaagaggaaagaagggatttctttttcttctagagccttgggagggagcatggccctgctgacaacttattttcagacttctagattctagaactatcagataataaatttatattgttttaagccaaaa

SEQ ID NO: 155127 - DNA, 376 bp, Homo sapiens
tgctcccgatgctctctctgtggtggtgcccacgttctgaagttgaaggtccctcagggctctgtcctgcccaagctcacacccccactgagggtcacgtgttgctggggaaggtcaggtcccgggagcaggtgcgggcagcgctgggccaccttctgcgagctcccttctcatcctgacatttccctttcctgcagtcttgggctcatggccagccgtcagccagcaccctgtggcgctctcctaggaggctgatctggtgagcggggacgtatagggggtcagcaagtggcccaggtggaacgtggctccgggccacgtgagtggagggcttgagttttgtgaccacaatgtggatgccctctgtgacctgctg

SEQ ID NO: 155128 - DNA, 107 bp, Homo sapiens
tccctttgcagccttgagtgcagcacctatctttaggtgatgtagggtcaattagggctttaatgtcccacaactgtggcagatttgctgattaaaatatagcagtc

SEQ ID NO: 155129 - DNA, 588 bp, Homo sapiens
caaggtagaggacatgtttgttgtaagctttttttgtgtaaaggatggattctttattcctgatacacataatcagtgcacagcagctctctgatacatccggttgatgccttaagtctccctggcttcttacaagtatcttctgggccttgtgtgtccctgggcgcctgtccctggtcaattcccgaaagctactgtgctcctcttgcccatctccccttgcaaataatatcctccatctggggaccggcttcctccaattccaggagaggtggggctgaaggtacagacttgggcatcactggcacagatataagtaaatacagctggagtctgcagagaggctggactaagtcagggagtcaggaaagagaagccacacacaaggacaaccaatcatgtttctcataatcttcttaacctagggaataggacacaatcattttttctttttaaaacatctttatcccctgatcagcctcatttcctcaaaaactataaaggaaaatgctgctgacttgtttttgtgtagtaatttcagctgtcacataataagctaaggaaggcagtatatagtaaataaggacc

SEQ ID NO: 155130 - DNA, 517 bp, Homo sapiens
caaggtagaggacatgtttgttgtaagctttttttgtgtaaaggatggattctttattcctgatacacataatcagtgcacagcagctctctgatacatccggttgatgccttaagtctccctggcttcttacaagtatcttctgggccttgtgtgtccctgggcgcctgtccctggtcaattcccgaaagctactgtgctcctcttgcccatctccccttgcaaataatatcctccatctggggaccggcttcctccaattccaggagaggtggggctgaaggtacagacttgggcatcactggcacagatataagtaaatacagctggagtctgcagagaggctggactaagtcagggagtcaggaaagagaagccacacacaaggacaaccaatcatgtttctcataatcttcttaacctagggaataggacacaatcattttttctttttaaaacatctttatcccctgatcagcctcatttcctcaaaaactataaaggaaaatgctgctga

SEQ ID NO: 155131 - DNA, 259 bp, Homo sapiens
tgtaaaaatcagtagtaacctgacagtgacatggtccaggtactttaggctgtcttatcccttaatgtaggctattaccatcaagcacagttttgcaaatagccagtggaatgtagttcagatacatgactttgtgggtaatccaggggtagagactaaaacagtactgtgcagtatgtggttatttacagttaattaagattaaataaaatttaaaaattagttccttgactaccaaatgctcaatagccactagtag

SEQ ID NO: 155132 - DNA, 483 bp, Homo sapiens
taaaaagatcatttatttccatacaaataaaaagccacttggctctcaacaaagatcaggagattgaaattgaagaaaacaaaatgaataaacatggaaaggatatctggggtcaaaaaagaataacactgttccccaaattgcaaagacaaataaacttaaaaatagaaacatgacactttaaagagcaaatcttatttatccaaaggaagcaaagactcaggagggggacctaataggagatctattagagcatagcagagacctcattgctgtgtcattttttaatgtttttggagtggtagcctaaaatatgtggtggcattgcccccttctcttgctgtgacattgcctcccctttattatacaccactctctccccttggagactaaaggggagtaggttggtcaatagctgcatttgccaacatcagttcactccctgaggctactcacagcactagctttgtcttaattgatagc

SEQ ID NO: 155133 - DNA, 565 bp, Homo sapiens
cacagaacgtgcttcccattttaaaaggtagaatgaggattaaatatgacgatttatgcaaaattacctaaaataatgcctggtgagtagtaaatgctcagtaaatatgtgtgcctttctagtatcctttccaatattaggtttgccttgtaaaaccgaccattttaataggagcaatagggttaaataaagtgaactgttgtggagatgagtcctagcacacaccaagagaaagttctagctcagcatccatccagtgcatgggaggaaaagtaaacctgactcgatttttcagtattcttatacttagaacatcaaaaactagattctaacctaatcccgatttgaggcatatggattacagaagacaaattaaagacaaaaacacataaatagtatttattcccttgccctaagactccacagctacgtcttgagattcctccttaaatcttcgctgcattagaagctggggtgctgaacttgaacgggccccgtgcttagagattgagtcaggagctgcatctgtgcctcccgagcacctggtgtgcgccttgctggggag

SEQ ID NO: 155134 - DNA, 205 bp, Homo sapiens
gaaaaacagaccccatagaaactctctggcacaaaaactctggaatcactgaccccagacattgttccctgccatccactctgccagacatttcttggatttattcaagctgacttgtattccagaacaattgtggacaagatttgctagtaatgcttccaacaagttaccgtttagcaagttcagaacttgaagaatccctttt

SEQ ID NO: 155135 - DNA, 582 bp, Homo sapiens
gtaggtaccattgttagatggggatattgctattggaatatatgaatgctcagagtgataaaagctagtttttaaaaattcacttccagaatgtcaacacaagaggagttatttcagatagcttggagtccatttcttattacagcagtaaaagtatttccaggaacaattagcttctcatcttagagttcacatttacaaacaacattataaaagcatctttgaaatatgcttctctgttttaacttcaaataagatattcattcatgagcttttataggatttggtgaattctcaaatgtcaatactggagcaatatttaaaaggaacatttaactaaactttttaaataagtggttcacaaaattgcttgacatgtgctgtgataattttattcattttaattaactgcactataaattgccaaattcagtcactagcaggataatgcatgctgatcagatcataggagtcacacaaaactgtgagggaaacggagtcagattaaagctataattaagtatctcttcagtcatagaggacaaatggaaagataaggtaaatcattcagtcaaatgccaa

SEQ ID NO: 155136 - DNA, 83 bp, Homo sapiens
tgctgggtacaggtgtgagccactacacccggcctcccctctttttgagaaaaaggtttggctcaagttccatccccttcccg

SEQ ID NO: 155137 - DNA, 248 bp, Homo sapiens
ccccctgccatgcccaaataaaaacttttctgttttgttttcataaaataccactgtttcaacaaagtaaacattagcagaataatttaacaagaatggtggttgtttttcttcctagtaaaatgtacaactacaccggctattctttagagttttagaacaaacaaagccttcacaattgatcactctttagaaaatcattccaaatatttgtttccctgatttgtatgcttcctctttctaatagt

SEQ ID NO: 155138 - DNA, 358 bp, Homo sapiens
aagaaacactggctaacacaataataagtaaaacagcgtggcagtgattcaaaactagaaatttatactgatggctagaatgagaagcaggtttggagccagaataaaaccatgacagccccagcatgttatgcagaatacggccttgagagtctcagagatgagtgaaaagtgccaagggcaagggatcacccaggagtcagaaagggggtgactcatgcaatttgcaaaccctaatttcctctccttggtcacacacttccttctgatttctttcttctgatgattcattaaaaaaaaattctccttttaaattcacatcagaaatgtctgagtacctcggctcaccctgccctaa

SEQ ID NO: 155139 - DNA, 335 bp, Homo sapiens
gaacccagccctgctgccaccttgactttgtcccagttaaaatcactgtggacttcagacctccagtactgtaagataataaatttgcactgttttaagccactacattcatggtagtttgttacaacagcaatagaaaattaatacaggcacatgttacttttcttaaactttattttttagagcacttttagattgatagcaaaattgagtggaaagtaccaagaattctgacataggcctacctgtccccacatacccaaaactttccccactatcaacatcacaccacagtggtacaattgatacagctgatgaacccacactgatatggc

SEQ ID NO: 155140 - DNA, 296 bp, Homo sapiens
ggctgtgggtagcatcactttttgagcctggagtgcagcccctatttattatttctgtggatgtaggctgcaatttttgtgcatcctgagattcctgtgctagtgatgttttagtttcattatgtcattatttggggagaatacctaactatactggggatctttgttaatacccataggtgactattttccatttcatgtcttctgagttcttcctgttttatcataaataattatgtgtacttaatattcacgtgaaatagtttcataaaatggactcagtaaaaatttcgatt

SEQ ID NO: 155141 - DNA, 417 bp, Homo sapiens
tatagagtacaatgaggtttaagagatgatgcagtttgcttgtttgtttgtttgtttgtttgtttgtttttgagacagagttcactcttgttgcccaggctggagtgcaatggcaccatctcggctcactgcaaacttctgcctcctgggctcaagcgatcctcccacctcagcctccagagtagttataaaatggggcaaaaagtgaatggttcaggttactgaaagttgctgacccttcttatctctgtttgctattccctttctcctgctccaacactgcctacattcacataaatatttctaccttcccatcatcttcttccaaattctacaccctttagaatctacacacttctgcatctcacttctacatctctctctctgcctagaacctgagagtccaagggcagacta

SEQ ID NO: 155142 - DNA, 670 bp, Homo sapiens
ataatttacttctcttgggaatacatgtgaagtgaaattgctggctgtatagtaactttatgtttaactttttgagaaacggccaaactgctcttcaaaatgactgtcccattttacatgcttaccagcaatgcacaggggttccagtttcttcacaccctcactaacatttgtcattgtctgccttttaatttgagccatcccagtgggtgtgaagttgtattctttctgcttttgattgcacttttctaatgtccagtgatgttgaacatcttttcctgtgtttactggccatttgtatatcttctttggataaatggcttcagttataattccaaggccagattttgccctagggacagtactgatttatatagttaggctgactgcttcctaattgggagaattggtagttctgaatttcagaaacatctgagaagggtggatattgaagctttatataaaatatgtagcagttttcttttaatgtgattatgatttgggaactttttagttttactaccatgaaaaacagaacttccaagcatactttgccattcattgttagaataatataaacatacatgtttatagcagtgttctgttttcagatcatcctacatatattatctcattataaccattacaacactgccgtgaggtaggatga

SEQ ID NO: 155143 - DNA, 391 bp, Homo sapiens
ctttaaagtttttttaatgctgaaatattctaaaaattatagtgaataatgagtacgttattttttaaatatacaaaataaataggaccaacactatttattgagtagcattcattcctctcatttcaatgaggatcttaagtcatgtatcttatctctatatacatgtgagcctgttcttgtgttatttgcctatccctatgtcaatattacactgtcttatttaccgtagctttataataagtgtggatatctagtgtggtgaagcctcatcctccccaaactttgttactctgtaaaattatcttgattattctttcaaatctctcctaacctttaaaattctgtgatttttgtatatagtactatcgtactgcttatactctttgga

SEQ ID NO: 155144 - DNA, 759 bp, Homo sapiens
acaggattcacttagtgatggggagaaagcagatgacgcagaacaggcctgctgcttccacaaggctatgactcctgcatccaggatgatgcccaagacctcccagaagctggccctgcgacgaggatctgagtgcacttgggaggtggttccagaaagcactgggtaggggcaagaaaggcagttctctttgcccagcatttggccagggcgttggcccacctcaccaatgtgatcccatctatgcacattgctgctggaggctgggttgcgagtcagcatctcagggaaaggtggatcagcacagccgccctcctggccccagaccacaggctacattcccagactcgctgccattgcatgacagagaatccgtcagctcggggaactggatgaagcgggctgggactgatactccaaagtgctgtcaagctagtgtcctttgctggtgttacagttggattttctactttgccatttgactgtaaggtcagtgtcagtgttgggtctgcacctggaagccactgagggaggtacatgtcacatcccctggcatcaggaacgtgacggaccttgtcctgggtctgctatggggatggtgacaaggcaaatccctcctgcagcagggcatgctgctcaccctgtgcgcagctgtgccctgggccaggccctgcgctgtcagaatcaggagctaataacatcaaggcaatagcatctgaggctcgccactctttcatcttctgcacctgtcaacctacg

SEQ ID NO: 155145 - DNA, 252 bp, Homo sapiens
gggtataccactgcacagttctttccactccatttggaaataatcaatataaaatattagggacttcatgtaataagttacaaggtaaggaacccctagttatgaaagatttcctccctggtagttagaatgacatggcaacatacaggattcaagccacacaggtccgaccagtctctagagaaaagacaggagtcgactcccgtaagtaggaacaccgcaatcttctttcagtaactaaaaacctgccca

SEQ ID NO: 155146 - DNA, 505 bp, Homo sapiens
ctaccaagagaggttaaataaatggtgaagatgtgcattgaatgcccagcttttctttccaaacttaagaattagttattctattcctccagaagggaaattaataaagggaagaacaaaggcccacagtgtgcttagagaaaatatattttatggaaattaatatcttgggaaggggttttttatttgtttgtattgatgttctggtctctttcattttggtgcctaagaaatctgttacacactacacaaacccctccacatacttactttttcaacaagggctctattgattcttgtcataactgtgctgtgaaagctgtcaatactgacgacaaatggaggcagccagtactgcatgcattcaaacctccaaacagactgaactattttaatttcctggagatatcacccctatccttatcacactattgagagtacctgttattgtcgtttattttcttcctaagcttttaaaatcctattgactgattctccaaggctc

SEQ ID NO: 155147 - DNA, 541 bp, Homo sapiens
agagactcatgttatagtttaattttcaaatgtcattataggacactttggaaatcctttttcactgtttaaacttcagatgaagaaatgattaagatgtcaagttaaaaatgttccaggggacggggctgggcgcggtgactcacacctgtaatcccagcactttgggaggccgaggcgggcagatcacgaggtcaggagatcaagaccatcctggctaacacggtgaaaccctgtctctattaaaaatacaaaaaattagccaggtttcagtgagccaagatcgcgccactgcactccagcctgggcaacagagtgagactctgtctcaaaaaaaaaaaaaaaaaaagttccaggggaaacacagtggctataattcttttagtaagcatgcaaaaacaaaacaaaacaaaacaaaaaaacaaaccaaaaaacccactttttaaaacattgagataaaacatcatctagtgaaaatgagagaccagtcatctgggagtagaatatggacgtgagacagagccttaaaattggatggtat

SEQ ID NO: 155148 - DNA, 83 bp, Homo sapiens
catgatggttatggggaccttgctgatgtgtttgaactttatgagtgtgagtcctgatccaggacaggacagaaagaagtgga

SEQ ID NO: 155149 - DNA, 234 bp, Homo sapiens
gtctagagggtcccaagtctagcttgtcttcccacaacacttgctcggcctatccggaagccccgacgttactcggactaccccgatgcatcaccatagctcttgtaatttcagttttactacttttattttgctgtgcatgtgaatattatttaatcatacaattattggttttcatttatgtgctttgtataagggactacacgtctctaagtgtggtttttcttgaggtca

SEQ ID NO: 155150 - DNA, 183 bp, Homo sapiens
gcagacatcagaactccaggttctggggctttaggactcagggatttacaccagtgcctcccaccccccagattctcaagccgttaacctcggactgagaattataccatcatctcccccagttttcaggcctttagactcagactgaattatacctttagcttccctggttctccagcttcc

SEQ ID NO: 155151 - DNA, 366 bp, Homo sapiens
ctgtttaaagtgatggccgggcacagtggctcacacctgtaatcccagcacttggggaggccaaggcgggtggatcatgaggtcaggagttggagaccagcctgaccaacatggtgaaaccctgtctttaccaaaaatacaaaaattagccaggcgtggtggcacacgcctataatcccagctacttgggaggctgaggcaggagaatcgcttgaacccaggaggcagaggttgcagtgagttgagattgcactactgcactccagcctgggcgacagagtgagactctgtctcaaaaaaaacaaaagaggagggtaacctcttcttcccctaagtggcctcaggtgatctgtgaaaatggtttgc

SEQ ID NO: 155152 - DNA, 118 bp, Homo sapiens
gaggccaggagttcgaggccagtctgggcaacaaagtgaggcccctgtttctacaaaaaaaattaaaattagctgggcgtgatggtatatgcctgtcatcccagggaggctgaggcaa

SEQ ID NO: 155153 - DNA, 343 bp, Homo sapiens
aagctgaaagggccaaatagtccaataccttcaggaatgattctctcctaaatccactgagctaaccttaaaaatgcagtctggtgaactgtgctgagcctgaaacctttaatggctatttaaaaagtctcctgtttttgtacaattaagacaaacccatcagggtttatatgggagctgtgaaggaacagtagtttgtgctctctgattcccttctgggtctacctgtagcagtaaacaatcaaaaccactcctgaggctgtactcactttctgtgtcttaggagagaacacaagactagaagtagaaaatccacatttgtttcagctcctctgtaatgccc

SEQ ID NO: 155154 - DNA, 302 bp, Homo sapiens
ctgctctaggacaaatcgtgcatatgtctgcttctgcagctgtgctcacgcctttcacctgctctccaactcttctctcctctccaccatggcctctgctcattctctcatttccaaacaatccttcatccacaactcaaatcagttttacccaagaagccttccaaatggtctcaattcagcataaattctctttcagatttctaccaaacatattctcttttttttttttttttttcacaagggtttaagggatgcaaggggatccccctaaagtgacccggagggcttgaaagtggggc

SEQ ID NO: 155155 - DNA, 124 bp, Homo sapiens
ttttgtactgagagaagggggagactgaaaaacattaaaataggtggagcatccccatttatacttgtagaaataccttttagcttggtacatagtagagaacaagaaattggtggttatatgg

SEQ ID NO: 155156 - DNA, 670 bp, Homo sapiens
gatttctaaagtctaggatatttatattgaatgtgactagatttttaagtttcagataacttttaatcaatgcaccaaagttaacaaggaacacaacgttattgttaagtggtatgtgtgttttagatcccaggatgctttatgatgtatacgattggtgggaaattgaaattcgtatttcttctctataagcttgtattgccctttctttcagtgaagattaggagctctgattttattacaggtctgttcattttatggcattctcaaggaagaaaacatgtcctgtaggtaaatattttagatcaatgaagcttagcttactaagaactaatgtttgttttactttaatcatttgatgaaagtattaaatggattgtacacatgtgctttcttagaatatattaaaacactttaatttttccttggtaatttaggactatcatcataaactatttcccccccattgtaagtggctgccgacctgtatttttctggaattgtgtttttgatccttttcatacaactgagtatttgtttctagcaccccttaacttattttgtttccaagttgctgacttacagtatattaggaagagtggaaagtggtcaagaaaaaaataaggcaaccaagcttattaaatcaattatgtaacatttctgtacacag

SEQ ID NO: 155157 - DNA, 850 bp, Homo sapiens
tgatgttccccttcctgtgtccatgtgttctcattgttcaattcccatctatgagtgagaacatgcggtgtttggttttttgttcttgcgatagtttactgagaatgatgatttccaatttcatccatgtccctacaaaggacatgaactcatcattttttatggctgcatagtattccatggtgtatatgtgccacattttcttaatccagtctatcgttgttggacatttgggttggttccaagtctttactattgtgaatagtgccacaataaacatacgtgtgcatgtgtctttatagcagcatgatttatagtcccttgggtatatacccagtaatgggatggctgggtcaaatggtatttctagttccagatccctgaggaatcgccacactgacttccacaatggttgaactagtttacagtcccaccaacagtgtaaaagtgttcctatttctccacatcctctccagcacctgttgtttccttttcagggtattgtacagactcaaatggattgaggactgcttcaattaggacaatcattttttgtaattcaatgtttacaacttagtatgtatgcaatcgtactactgacaaaatacagaatgataatattttccatctcttagtaatcttgtaatggaacagaaaaatatcctgtgtttgcatttcttgcaggaatcagctgttataaagaaacattagggcttgtttcttctgtcattgatatctgaatgcttttaatatactcatcctaagagttgaataatggcctactctgtttacctgggatgtgctacttcttaaacatgagctgatgaagtgtagcctttcaaattaatgg

SEQ ID NO: 155158 - DNA, 295 bp, Homo sapiens
tattaactaggagaagggactgaggacaagtctcaactcaaccactgatttgcagtgaaaccttaggcaaatcgatttatttcattttcccttttctcattgtctctcataagggaaatgaactaaaaatacctacattctttcctacctctaaaactgtgatttcaacaggctgccagagtatgttctacaaaatgctggctcttctcactatggaaaacttagtccccttttgaagcaaagagtaatttactgctttttgtttgcttgtttgtttcaagacgaggtctcactc

SEQ ID NO: 155159 - DNA, 474 bp, Homo sapiens
tgggtgtggttccccccaggctgttcttgtgataatgagtgaggctcatgagatctgatgtttgtaagtgtctgacatttcccctacttgctctcattctgtctcctgctgcccagggaagaggtgtcttccgccatgattgtaagtttcctgggacctccccagccatgtggaactgtgagtcaattaaacttcttttctttataaattgctcagtttcgggtatttcttcatagcagcgtgagaacagactaatacacactatttcttgctttgtgtctgtggacatgtctaatatgctctgcatactacactttacactggctttgtaaaggtctcgtcagtttccctgcttctccttgttcagcgaagtttaatttcacaaagtaaagataaaccatcccttaactctcagcacatcacctgcaggccacattccgcatttcagcaactacctcagagccaggcagcaga

SEQ ID NO: 155160 - DNA, 673 bp, Homo sapiens
ctcactcccttggctgcctcaaatctcttctaatggacctttacagagaggccttctgattcagacctctataaatggcaaacccacccatactttagcaccccaatgattgtatgatgtcactgacagttataataatatagtatataatgtactatgtattataataattgacaattattgacagtacaattgacaatagtaatacttgttatctactcccctcaccactagaatttaagctccctgatatagcgctatcacccagcactgtgcctaacagacagcagacactcaagtctttttttaaaaaatgaacaaatgaatggctgtcagagatgtgactggagaagctggagccaggttacaaagagttttttatagactgcaaccccatgttttagcgcctctttgataatgacttaagatctattcaagaattttaagcagaaaaaaaaaggtatactggaaagaccacaatttcacattttaaaaaattaaaacaaaaaacaattcattttggaaagagtgtgagggtaatctatgagaagacgtgagactgcagttaagtagaatatttaaaagacctctctaatacttcagcagggaaatacaggccccaaaattgtcttctggcaggtggaggttgaaaatgataaacatttagaagata

SEQ ID NO: 155161 - DNA, 322 bp, Homo sapiens
tgatgtggttgctactgctgcgtgccagtggccattctggtagtagagaggcccaacatgggtgattcatctaccaaactggcctgtgaaactccacgtgtgagtgattgcagtagctaaaaatagtctcagctgacgctgatggctgagtgttcagatgcctggccttctggcacagggtgaccctatttttcttacaagaggggaggctttcacattgtctagacactcttcctagctgacagattctggggcacctccttccttcctctgttcttcgtaggcctgctgttttctccttagcttttagaagtttcaactg

SEQ ID NO: 155162 - DNA, 318 bp, Homo sapiens
agggtaggtagataaagtaagactgacaaatattgacaattattgaagctgggtgataggtatgtggggattcattaaacctatctacatttttgtgtatgtttgaaaattcctaaataaaaagttaagtaagaaacacctttttttttttttttttttgggaaagggattctccctcggtggcccgggggggggggcgggggcccattctcagctcagtgcaccctctccgcctcccgggtccacacaattctcgtgcctcagcctccccgagtatagcggggaggctgaaacacaagattcattggaccccggggg

SEQ ID NO: 155163 - DNA, 359 bp, Homo sapiens
ggctctgcctcttcatcttttttactctttccattctgtttgtttcctattttttgcaatgtagttttattggaggccattttttattgcagacttgaggagctgatattcaccacctccaagctgctctgggttataggtctgcagtgttctgtaaaaaaaaaattctaatcctgtcagcctctccctctccatgtcaatgattttattcatgggatggcacatataagaatatttctcaaatacatttatagtggctgcgtcagcagcacatatcctaaaactggaatgaggcagaggagtttagcatggcccttgctcaaggatgacatggaaattgatgaagtattctatattta

SEQ ID NO: 155164 - DNA, 369 bp, Homo sapiens
gaaaaggagagtagaattgtagaggaagaaaagcaaaaggataagcaggtagaaagaagggccaagagagaaagacaagaaagggaaaagtgatagggagggaagaaacagataagaaacaaaaacaaatgtcatcataccatcatctgtctggcaaatggttttccaatacctgggccccaccagtggtgaatgctctggctctgaactggtgcagccataggcttaaattccacaggcggcatcctcaataaaatctctgccttctcatagctggctgtatttcctgggactcaagctaacacagaacctacagcctgctccgagtcaccattttccatgccttcctccccacttactcctgtcaca

SEQ ID NO: 155165 - DNA, 999 bp, Homo sapiens
atagcttgaacccaggaggtggaggttgcagtgagctgagattgcaccactgcactccatcctgggcgacagagcaacgctctgtctcaaaagtaataataataaatatcatctccacactctgcatgcttgacattttcccatttttacaatgattccataggcataggttttatgaccataatcagatgagtaaactgaggtttgaggggttaagtaacctatcttaagtttatatagtgggtgaggggtggaactaggatttaaactcaggtggttctgctatagtatttttttcccattgtattacactatttttctatatcaaattgggtttccccacaaaatctaggtggaccaacttctgaatgtaaacattgctggctcagtcccctttgtctcacaggagtcaggcatcccctccctttgtcaggggtgtgtgtgtgtgtgtgtgtgtgtgtgtgtgtgtgtgtgtgtttgcttgcagtaatatctcctgtggcattctgtagagaggttacacatcagtcacaggtctgtgaactgccttaatgaacaaggttccctagcctagaataatcaatggaacaaaatccccatggacgctgccatttccactgttgccaaagacctacatggagaaggttcccaaggtgtcagatccgacacctgagttttctttataggtcacagttagcctagaatgtgtggtatgggtattgcctggacgcataaactagattgcttctaatatggatgtggtccaacaatctctgatgaatggaagtaaacatatcaaaagcttcagaggctgggacattaacatttttttgaggctactagtgttttttataaataatgaagaagggccaggcgcagtggctcacacctgtaatcccagcactttgggaggccgaggtgggcagatagagtgagctcagaagacccgcttgggcaacatggcataaaccccatctctacaaaaaatacaaaaaatta

SEQ ID NO: 155166 - DNA, 350 bp, Homo sapiens
gggggctgtgaatcagagggaagggtgataaaaggaatggtatacacatgaggggccaagggtggagcagagggagcatggagttaccggctggcccaaagtccccagaaacctccatcaggctcttcctttctggcagggtggccttcaaaggaggactcagaacccagggaccactgcatttcccaggccctgagccccagtgtgggaatcacatcctccaaacccacagtgcccctcaaattcctattcaggtaagaaggcaaaaagtaacagccttccaagcctacgtggacccagcatcggtttttctggtttcccctgcgtcagaggtatggaggtctatgttc

SEQ ID NO: 155167 - DNA, 659 bp, Homo sapiens
ggctgcttctttactgactgcagcatgggctgtcggggaagagagacctgggttcaattcttgaccttgcccctcactggcccttggccttgcccaagcctgtgtcatcttggacacagcaccgagcttcttgagttcacgtctgtgggtggaggggagtgacaggccctacggctgtgaggaaggaaaaaggtcctgagcttcagtccccagtcagtgcactgcctgttataataaggaggctgtgccagagcctccaaaaatgcatcgtttgaagggattttagaaggctggagtgaataatgtggaatgctatgaacagacaattctctcttcatattatttcaaagcccacgtttaccttaacaaaatccaatgtttaaaaatccggctggacatggcggctcacgcctgcaatcccagaacgttgggaggccaaggtgggtggatcacctgaggtcaggagatcaagagcagcctggccaatgtggtgaaaccccatctttactaaaagtacaaaacttagccaggtgtggtggtgcgtgtctgtagttccagctactcaggaggctgaggcaggaaaatcacttgaatctgggaggtggaggttgcagcaattctcctgtctcaacctccggagtagctgaggaccatcgttg

SEQ ID NO: 155168 - DNA, 791 bp, Homo sapiens
ggctgcttctttactgactgcagcatgggctgtcggggaagagagacctgggttcaattcttgaccttgcccctcactggcccttggccttgcccaagcctgtgtcatcttggacacagcaccgagcttcttgagttcacgtctgtgggtggaggggagtgacaggccctacggctgtgaggaaggaaaaaggtcctgagcttcagtccccagtcagtgcactgcctgttataataaggaggctgtgccagagcctccaaaaatgcatcgtttgaagggattttagaaggctggagtgaataatgtggaatgctatgaacagacaattctctcttcatattatttcaaagcccacgtttaccttaacaaaatccaatgtttaaaaatccggctggacatggcggctcacgcctgcaatcccagaacgttgggaggccaaggtgggtggatcacctgaggtcaggagatcaagagcagcctggccaatgtggtgaaaccccatctttactaaaagtacaaaacttagccaggtgtggtggtgcgtgtctgtagttccagctactcaggaggctgaggcaggaaaatcacttgaatctgggaggtggaggttgcagtgagccgagatcgtgcctctgcactcccgcctgggtgacacggcaagactcttatcttaaaaaaaacaaaaacttgtgaccttaaaagcatacggtcgcatgcatttcagtccgtgaattccaagggcatgtaaggccgggcacagcggctttcacctgtagtcttgggtgcgtaga

SEQ ID NO: 155169 - DNA, 290 bp, Homo sapiens
gaggtggcagcagctcatccggatgcccagttctctaataaggtttgagagtcattcctggaagctcaacctagaccctgtttcttcagctccctctgtcacaatgctttcacaaacctcttaatagccaaatatctttcagcttaaacaggccagactcttatctaaaactgaactctggctataacaaacatgaaaaactactgtagaccatattcactggaaaaaataatttggcaaaaatagttctaatggcatggatattttaggtaaagctcatattattgtag

SEQ ID NO: 155170 - DNA, 285 bp, Homo sapiens
gaaatcagccttggtttttaactaatgtgtgggaagtgaggttcagagaggttatgtcatttgcccaatctcacacggccagttacaggaagagggcaggtctgaaaacacacacactctcaacacccaccgacacacacactcggaatgtacactcagtgcacctagaaattcaacacccacggacacacacactcagatatgtacactcagtgcacctagaaattcaacactcaccgacacacacactcgggatgtacactcagtgtgcctagaaattcaaca

SEQ ID NO: 155171 - DNA, 904 bp, Homo sapiens
cccgccactacgcccagctaatttttgtatttttagtagagatggagtttcaccatattggccagtctggtctcaaactcctgacctcaggtgttccgcccgcctcagcctcccaaagtgctaggattacaggcgtgagccaccatgccccacgagcatttccttctttttttaagggtgaatagcattcccttgtgtatatacaccacattttccttatccattcatctgttgatggctgggctgttttgaaaaatgctgcagtgaacatgagggtgcagatatctcctcagcatactgatctcatttcctttaaacgtgtatccagtagtgaggctgctttttaatttttcaggaaacctccgtagtgttttccataatggcaccactaatttacattcccaccagccgtgtgctaggatttctacatttccacatccttatcaccacttaccttttgtgttttgatagtagccattccaacaggtgccagctgtcatcttactgtggctttgatttgcatttccctgatgattagtgacactgaacattttttcatatctctgttggccatttgtatatctccttttgagaaatgtctattcggggctggctgcaggggctcatgcctgtaattgtagtgctttgagagtccaaggaaggaggatcgtttgagcccaggagttcaagaccagcctgggcaacaaagcaagatcctgtctctacaacaatttttattttttaaaaccaactagctgggtgtggtggcacgtacctgttgtcccagctacttgagaggctaaggtgggaggattgcttgagactgggaggctgctgtgagccttgattgtaccaccgcatccaccctgagtgacagagtgagaccttgtctccaaaaaaagaa

SEQ ID NO: 155172 - DNA, 240 bp, Homo sapiens
gagagcaagtgaggctgctcacctcaaacccctgatcctatttccctccatgagcctcttccttattgggaagcccggccctctccatccccactacctaggctgggccaggagtttgaagccagctcccaaacagccaaggaacagagaagtcagcagcctccagccactccctcccgctgcccaccccagctccccaaattccccatcacagccacgcaccccccccaccctcagacc

SEQ ID NO: 155173 - DNA, 493 bp, Homo sapiens
tggctctttctcccttgtttttcacatatttgttggcttacactaggcatttagagtcagttgtattcataagaaattgcactagtcaccagaagagtagctgcaggaaaaagggagagagatgttccaaaatttaatcagatttgggcaacacaccttgctttttgcaaaagcaagcaaacaacccaaaatcctgcttaaggcaaagcctgttcctttctgtgaagcagaaagagaaggccctgctaaagctggatgaaagcaaaaagagatgaggtgtagaggtgtgtcctgctcctgattgagccactgtgggtcatgccttttcccaaagatggatttgttagtgtacggcaaaaagtcaactgaatccccaataattccctagagttcccggcagggtttggagggctaaatgtatacatggtttgttcctaaaattatctagttggtgccacagtgtttctggctgtggcttcctaaactaccttct

SEQ ID NO: 155174 - DNA, 279 bp, Homo sapiens
cagggtggaggtggtggcaggaggggacccaggctgtgaggttcctggtgcgggggagtgagcagatgtgtgtgtgtgtacgtgtgtgtgtgtgtgtatctgtctgtctaggtgggtggttgtatgtgtgcattcccatgtgtgtgcaggcatatttctgcatttaattaatcaaacttttaccaaccatctgttgtgtgcaaagtaatggctttgagggtgactccctctccctgcctccaaggagctcacaacccagttagccgggcaatgtatgtg

SEQ ID NO: 155175 - DNA, 536 bp, Homo sapiens
aaaacctcttgtttctattcctgctaactccttttgccccatcttatttttctccttcactgacaccctcctatcacacacacattattggttagttatcattcccatctctgaggttcacatatgcagtggaccaccctgcctttagctgtccagactttgactgcaacctgtctttctattccactcctcctcccctcccccaaatgatttgaaatggagaggaaaggaaatggagtttgatggttttaactcttctgtggctgtggcttagggagcagaatgttttgattgcttgatttaggggtcttgaggtctcctaatacaatattctttttgttaatagaaaggccccactccattttttttttctctgagtattttggactcaaagtcttgtgttgaaatgtcggtacctgcccccgaaggggaaaagatccctttcagagtttatttttcccccccattcatggggaattcttctcattatcagaagatgaagattactggtcctttgaacagagtataaatatagc

SEQ ID NO: 155176 - DNA, 209 bp, Homo sapiens
gtttaaattaattttgagtggcttcaagttggtttagaaagtaatttttaaataaatcagaggtggactgggaaagagagctccaaagactaacgtgcagaaagaaacttcagggccaaatctggctttagttccttgagaggaatgcgagcatcacttaggttcagacaccgcgcctgctatccgaagaacagggccagcagagggag

SEQ ID NO: 155177 - DNA, 1216 bp, Homo sapiens
  misc_feature (2)..(2): n is a, c, g, or t
  misc_feature (5)..(5): n is a, c, g, or t
  misc_feature (7)..(7): n is a, c, g, or t
  misc_feature (9)..(9): n is a, c, g, or t
gncangngngcgcggcctggcagtgctgcaaccgctacagcagccgcaggaagcagctcaccttccaccgcaggtgagggagaacacacacactgccagtgagagaggaaatgccagctcttctcagaaagaaaaggtcctccctgaggcgggggccggagaggacagccctgggagaaacatggacactgcgcttgaagagcttcagttgcccccaaatgccaaaggccccgtaaaacagatctcgccacggagtccgcaagcagcagagactgttggccggccggccggccctgcaggcttgagaaggccccccgacaagcagccatctgatcacagctatgcccttttggacttagattccctgaagaaaaaaactcttcctcactctgaaggaaaatgaaacgctccagaagcgcttgcaggcccagaggctggtgaagcgaaggatgtccagctgcctccgtgcctgcaaagggcaccggggactccaggccagacttgggccagagcagcagagctgagccccacaggctccggacgcagaggcggcagtggcaccagggccggcagggctttggagctctggctgtggacatttttgtctgctgtggacattgagaaagttggccgtgaggcctgccgggcgggggattgaaacagtaaccaagctccctggcgagagccccgacgccgtctgaaggacgtttagaggcatggtactaggactgagcatgacaagcttatcctcccatagtaacagaagtccaggctgaggctgattctgaactctgtcctttcagcacgcgcagagcgaaggtcgttggaagccccagtatgggagatgctcctcagggaggaagccatgtgagggggccggctctgtggcagattgtaatagcataaaatatgtaataacaataggctgggcacgttggctcaggcctgtgatcccagcactttgggaggccgaggagggcagatcacaaggtcaagagatcaagaccatcctggccaacatggtgaaactccatctctactaaaagtacaaaaattagctgggcgtggtggcatgtgcctagtcccaggtactcaggatgctgaggcaggagaggatcacttgagaccagtgggcggaggttacagtgagtcaagattgcatcacttcagcctggcaacagagcaagactgtgtctcaaaaacaaagaaccaaagg

SEQ ID NO: 155178 - DNA, 184 bp, Homo sapiens
acacttaggaccaataaagtttagatggagctcataattatacaaactcatctcgttcacaaatccctagggctcaatgttaaagtcagccattgtttaaggcagaaattcaggtttagatatagtgtagcaaagattttccattatatgagatatcgatcctattaaacataaaacttttctc

SEQ ID NO: 155179 - DNA, 394 bp, Homo sapiens
ggtctttcagagacacctgctgaagctttacagttgaaatgtcacgatgtctacaacttactttcaaatgattcagcaaaaacaaatgtgcatatatatgtatgtgcatgtactagagagaaagaacatgaatgtgactggcaaaaactggtcaatataggtgaagagttattgggtgtttttgtactaatctttccatttaaaattttgagtgattaaacaaaaatgggtgacagccaggcacggtggctcacacctataatcccagcactttgggagcctgaaaataagtaagtaaataaataaatgggtgagacagagtcacaaacggagcccaatggcacgccactagagacctccatcaaggttagaacagatcaatatgttttttgtt

SEQ ID NO: 155180 - DNA, 440 bp, Homo sapiens
accagggaagaagcgggtgtgagggctgctgatcatctttgtgaggggaataaagcatcccttcttcaatacatccacctgtcacaatttctcgacgtatagcattgttattaagtgaagatacttttaccactgtccacttaaacatgatcataataaatgtacgttacataatgtcttcagtgagaagcatgtctcctgagacctgcagaaccctacggggtgaccctgggtgcctcaacatcaaagctcaccccaaggacaagaaagcctcttcatgacatttcaaacaccacaataactatgaagcgagtactcagttacgatgatggatgttttacacaacttatgccatttcatgaccatgataatcttagaggaaaggagttttatccctgatggacagatgagaaaacagacctgggaaggttgagatttgc

SEQ ID NO: 155181 - DNA, 255 bp, Homo sapiens
atctagttagggtcaagtaaaacgaaataggttttcaatcaaatactaagaagctcacaaaatggaatttaggtgaaaacacaccaaagtagtattaaagttcaaattccaaaagaaatacttgcattaaaaaagaaaagccatgcatggtggctcgctatgcctgtagtcccaacaattcgaggtgggaggattgcctgagcctgggaggtcgaggctgcagtgagctgagattgtgacactgtactccagcct

SEQ ID NO: 155182 - DNA, 1132 bp, Homo sapiens
agcggtgtgcctccccaggcttctggaatcctaggccccctccagcagactcttctttttgcccatcatccgggccgttcggtaaatcatgatcgactcagtaatagcgtgccagtggtcaaggggttggttcttgtgggtgcaaaggaatgtatcctccttgcccacttcaaagtttgtcgtgagaagctgttttgtttgagacaggccttcgatttgctgattctggactgtcagaaattttaggttgcctcccacccaacatggttttctccctttgtttatggagctatatatctttatttctctctcttccccctaccttggcattttaaattttgaacgcataaattgccctcctcccttcattgctcacatacagatcccatcttgactgcaactggttgtgattttgcctgccaccaggttgtttcttttttgtctgctttcagtaaacttagaatgttagatttctgaaagccacacagtagaaatttgttggtatttgatacgtagaacagttaaagtgacttctcaacagccgatttttgtttgagtagagatttgattttttgcttgttttaagtagataattgctaatagtaatgtctcatcttgatgactgtgactaaaaatagtattatgatttttatggtaattttatcttagtcaatattgaccatttctttttgccttgtcagctgaattttttgtttaattctaaaaaataatgtgactgagttgacttttaagcaacagtaaatttattattgaagactaatgtgaacactgacattttaacatttaatagccgttttaaactgggtagttggccaatattgttgatcgctctgctattaatatgaaaattgtatacattcagttagaacacactgaaccaactttgtgctcaaaatgatatacgtatcaatgaaatatttgcctgtgaaataagctcacttaattccattggatcgtaggctttttaggacaaaaattcagataaaaaaaacgagtaagatttctcttggctgtataattatctaacaactgcatttgttttcagaatttacaatgttgtaattgtaataaaatcaccacctatcatttatcataaatccccaaaaaagta

SEQ ID NO: 155183 - DNA, 418 bp, Homo sapiens
tattttaaatattaatatttttatatgaatatttagtactttaaagatttaaaaatattgtttaatattttaacattataaaatgcaagtaccaagcctatcacctgtttacattaagactttttatgaaaaaataacttttccaaaacaaaaatgtactgaagacactggcattattctacattttgcaaatctctttattgtatgactttaaataagccacattctgcgtttgatctgttgttgcattgtgttgtttgggttaaagtaactgaagaactggacgggcgaggtggctcacacctgtaatcccagcacattgggaggccgaggtgggaggattgcttgaaaccgggaggtggaggttacagtgagctgaattcacgccacttcactccagcctgggtgatacagtgag

SEQ ID NO: 155184 - DNA, 268 bp, Homo sapiens
cagagatcgcgccactgcactctagcctgggcgacagagctagactccatctcaaaaaaaaaaaaaaaaaaaaagagggtcatgctctgtcgaccacactggagtgcagcggagtactgatggcctagggaagaaccttttctttgaaggggaaatggtgaaggccctgagcagggcctgctttgctcaggaatggccgtaagtcctatagcatcagcatcttagagatggggatagggtggccaaagcgtgtcagtgggtttccctc

SEQ ID NO: 155185 - DNA, 210 bp, Homo sapiens
aagcagttccaaccttttcactcttcaaaacctttcaaagccttccttctgccctgagggtaatgcctaaaccctctaaaatagcttaacagactcagcttgatctagctctccagccatacagctcaccattcactccctaattgtctttagccatattaactaacctacatggaagtccataattagaccatgtcgtcttcaagtgag

SEQ ID NO: 155186 - DNA, 403 bp, Homo sapiens
  misc_feature (391)..(391): n is a, c, g, or t
tgtcagaacattcaatgctttctggatatgagtttcttccttattctgtgctataatattttctcccagactgttgcatacctttcttaacagagagttaaaacttttatgtagccaaatttctctttctttgttgtttctcagttttattcttacttcaggtctttcttattactatattataaaaagtattaaactagctggaatttctattttacacaagaagagataagattagagctttcccccaccatcaaatgaacaaaccctcaaactttctgttgtttgcaatatcctatcatcaaaattagaggaaatccctgtattccccatcatttgaagtttatatatcatatgtacaaaacatattttcccagttctttaccagttnttaaattttgtt

SEQ ID NO: 155187 - DNA, 562 bp, Homo sapiens
ctttattctgtttttcaggattttagttggtaatactttctcatttatcaataacaattttctttaaaaactgagtgttacagcaattaattttagcattttcagacaaatgggaacagttggcatgtgtcccaaactggctatcagctgttgttttccatcattatctaaaatagtgtggccagcattgtgtattgaaatgtgcctttttcgtacattggaagagaagcctcttactgggtttgagtttctctgatacagaacatttgtagcagctaatttatggaatctggcaaataagctttgggaggaaattcttttaaaagtgttttcttgttaaggaataatctcaacaatggtaaatcatcaagaggttgagaagactcttaggtttgccactcagaaaaaacagtctcattttgctcttcataggtcctgtttttgcttgcacatttaatagtaggtggagatgcaaaacaacgtgaatgttcatttttttatgaatagtattaaagctactagaggtgggcaggcaggtcccagtaaatgttgcctttttttt

SEQ ID NO: 155188 - DNA, 442 bp, Homo sapiens
ctatatgactgatggggagtggggccaggaggtccgagtcccttctcactggggagagtgagcactgcaagaggcgggctcccgtctggcagcatctctacctgggacacactacaggcgtttggcggtcactcccctttgctgctattctgcaagcagggacatgaagaattgccatgtgcccttcacaggctgctccaaggaggagatgagcttatacatggtccttgtattgtaccttttcaaaaggcttttatagcatctctctctgacataaggatttgacaaaggattccaaagcaaggtactgccatcttcaagaaagctgtcctagtgtagtggaaaggggtagggagagcacagaagagggaaaatctgggcacgcattatgggcttcacggagaatgagccagatgcaggtgacactcctcccctcccactt

SEQ ID NO: 155189 - DNA, 211 bp, Homo sapiens
agatggctttatgtcttattggcttgccttgaaaaacctttattacatgaggttcattcactgattcagcagcttgcaagaaggtgctctgaagtgtgaggctcttagtggatagcaaagatgatgagagggttcctgctttgaatttattaatctgcttggttagcaggtattttgaccaacgtgatttagctgatgagcgttactgctg

SEQ ID NO: 155190 - DNA, 216 bp, Homo sapiens
tttctcacttaactcttccaaggggagcagtgcagtcagaagggcagctctgccccccagggactgtcaccttctgcacaatgacagtctgtagtcatgtctggtctgatgagagggagcagagtgcacatgctgaggtggcgtctgtcacttctgctctctccagaacatgtcacgtgcagcacatccaactggaaaataccatccagacagttc

SEQ ID NO: 155191 - DNA, 771 bp, Homo sapiens
agtttccctgcaatgctatgatccaactctagtcgccaggttcccaaggctgcagcaaggtaaatgggattccactcataagcaaggaggatatatatgatgccttttctcagatcagaacatacagagaaaaaaacaacagcctaatcggggaagattacaacagtttctgctgaagagaatgctggcacaaggcttccaacctatcccatctactgacctggagaatgaaagcatcctgtctctgggctggccccttatattggtatccagagatttatactccttcaatgataggcagggcctacacctgtaaaatcatcaggaagcaattacagacggtgggcctctaccctgctacagccctcttaagattcagaaggagtatctattctctgaggatgaagttaggaggtgggactcaactccagaggcagggactcaactttggaccagatagaaaactagctgaacaaaggaagaggagaaatcacctcttcacaagacatgcccactagtgccatggcaacacccagaagttatagcccctttccatggcaatgactcggaagtaccaccctttttctggaagattcagaataacccaccccttaatttgcatgtaattaaaagtgagtctacatatgactgaagaactgcccctgagctactacactgggcacactgcctatagggtagccttgatccacaagcagcagtacctctgctgctgctgtacattgctgcttcaataaaagttgctaccaccag

SEQ ID NO: 155192 - DNA, 411 bp, Homo sapiens
gtatccccaccctcaaatcctgttccaatgaaaaaagtaaaacctgatacgaaaaaaaaaaaattcagttaacctattttgggtctgtaggctgacctcaaccctgtaatataacccattacaatgaattttctttttttttaagacagagtttctctctgtcacccaggctggagtgcaatggtgcgatttcagctcactgcaacctctgcctccccgggttcaagcgattctcctgcctcagcctcctgagtagctgggattacaggcacataccaccacgcccagctaatttttgtatttttagtagaggcagggtttcaccatgctggtcaggatggtctcgaactcctgacttcatgatccacccacctcggcctcccaaagtgctgagattacacatgtgagcca

SEQ ID NO: 155193 - DNA, 625 bp, Homo sapiens
atcattttcacaataggagtggtcccattgacctatcaaaacatgaaaatgtgggggaaaatgtgtcttggaattggtagttacagcggtgtgatcattgtcacaatgggtgggaacaaaacgccattggaacccactggaggaaccccttaatgctgtgtgggaacaccagacaaggctcctggcaggagatagtgttggaatgctgccttctaggctaacagtggtggacaagaggatggtaaagagtccagaggaagcggggttccaggcagagggagcagcttctgagagaggtgggtgtgatgcatattgagagcagctctttattgtctttgtttgtgatcgttatcagcagtggagcagagaggggcttcagtctgaaggggcctggaccagtcttatcacaaagacaacagggaaggagacaggagcactgcagagcaattgaatgaaacatctttcctgaaatttctcatctcttgaaaagtttttatgttttctatttacataagtcataaaccaattgcctaatgcaaaaatgtcgtgttcttgaatagtaagaaaaggcaaacagatttcaatcaatagactcagaatttttcattaaatctgcttgcttatt

SEQ ID NO: 155194 - DNA, 222 bp, Homo sapiens
tattgtatatgagatacctgattagttttagtttatattcagtttatattcagttctgtagttcgatttagcagtgggtttcgtggaatacttggtgttatttgtcctctaaaaccttactataggtctgagagatatcccatatatctaagcttcttcataacttctctatatgtataacctagatttatctgaatccagcttaaagtttctatatctttg

SEQ ID NO: 155195 - DNA, 452 bp, Homo sapiens
tcagagggctctgagcgggctgtgtgccgggcgagaacactgcctgggccggggccactgtggcatgagaagggccgcctgggggcccggggcctagagcaggtgggcaaggagtgggtgctgactatgtctgctctgggccttcggcgctgagtcttacaggcctggccagggggctgtctccattatttcactccatttttgtttattttattttggtttgctttgtttataatattttattttgagacaggatcttactctgttgcctgggctggagtggagtggcacgatctcggctcactgcagccttgacttcctgggcacaagggatcctcccatctcagcctcccaaagtgccgggattacagacatgagtcactgcaccagcctgcttttgtttatttcaaaagtggaacgttttaaatgctgtgtttggcaaatcaggactc

SEQ ID NO: 155196 - DNA, 410 bp, Homo sapiens
gtagtgagcttccattgcatcactgcactccagcctggacaaaggagccagaccctgtctcaaaaataaataaataaataaaaaccctccaatgaattctcatctcattcagagtacacatcaaactctggacaatggcttacactaaaccaggagtcagaagctgtggtgggtgaatcctgcccagtgcctgccagtgtgaataaagcactgctggacaccctgtgcccctctgtgcactgcctactactgcttcggcattgcaggcagagttgagttgttgctatggactgcagagtcgaaaacgtttacatctggcccttcgcagagcaagtctgtctacaccagctcttaaatgatttcccttatccctctgacctcatctctctagttctgcacctcactcactc

SEQ ID NO: 155197 - DNA, 162 bp, Homo sapiens
ttcccaggagagcttacagtgaaaatacatcccagatcctctgtttgaaactaggattctatcttacaacagtaatatgataaaatgtgatgaaaaggaggttcttttttttttttttttttgggaaagggggtttctggccccaattttaatttttttttt

SEQ ID NO: 155198 - DNA, 391 bp, Homo sapiens
tcagtgggaggtcttgggggaccagcctgaatgtggcgtatgtcacatctgccacttcccactggccagaactcagctatgtggccacacctaagtgcaagagaaatataattttgttcttggccccaggggaaaggaaatgggtttgagcaaacacatgtttcattttggcactggtagcaagtggaagacatggatttgaacccagacagtctggctccagaagcttgctcttgagtggcacgctcctctaccttcctctgaatagtagctcagaggtctgggaaaaatgtgtggttgcacaagtttttactcagttttcttcccacatataactattatgtggttgcctggatgctgttgaagtcattgccttttagaaaaagagaaa

SEQ ID NO: 155199 - DNA, 282 bp, Homo sapiens
cctagttttagaagtttcaatagcaaggaaatgggtttgagcaaacacatgtttcattttggcactggtagcaagtggaagacatggatttgaacccagacagtctggctccagaagcttgctcttgagtggcacgctcctctaccttcctctgaatagtagctcagaggtctgggaaaaatgtgtggttgcacaagtttttactcagttttcttcccacatataactattatgtggttgcctggatgctgttgaagtcattgccttttagaaaaagagaaa

SEQ ID NO: 155200 - DNA, 162 bp, Homo sapiens
tgaaaagatggaagtaaattggaaatgccaaatgtatcatctaacggagaaatcaagaaaaacaaattcattctttagtggatgaaatctactcttggcctacctgaatataccactttaaaactaggtatcagaacattacatgttgtgtttgagagcaag

SEQ ID NO: 155201 - DNA, 503 bp, Homo sapiens
gaattattactcatactgtacagaaatgaaaaaggaggttcaaaaagataatttctcttgaaaggctaggattagaaatcttatctgtccaattccaaagactgtgttctttcgactgtgcctttcaatagatgaaagcattaaaaaaaagcgggggaggaataagtacttgggctactcaagagagcacttcaggctatctaggaaattcatttgtttaacaaagatttatttactgagcacccatcatatgccaagcactatgaccagcaatgggtgacagatacaaaagtattagtaacaaacaaggtagaaggatggagggaaaaactaacattatctggcaaagtcaaagaaatcttctgagaaaaaaaaaataacacctggatgagattttgaaaagcaaaattaaggccaggcacagtggctcatgcctgtaatcccagcactttgggaggctgaggtgggtggaacaccggaggtcaggagttcgagaccagctt

SEQ ID NO: 155202 - DNA, 427 bp, Homo sapiens
aggtgtgagccactgtgcctggccccttgctttctttttaaattattttttgtagaaacagggtcttgctgtgttgcccaggctgatctctcaaactcctggactcaagcagtcctccagccttaccctcccaaagtgttgggattacagtcacgagccactgcactcggcctgttgctttcttgaatgctgcttcctgcctccaccccacatatttccctctgtgttcttgaggcattgagtataggcaccagtaatgtcattaattgaatagctatttaggtcagatcttgatattatgttatttctgatttgtgtaaaattttacaaggttgatgtcatcattacccattctacaggtgaggaaagtgaggcttagagattgatcagcttcttaagtttacaggctaacaattggccatgccag

SEQ ID NO: 155203 - DNA, 253 bp, Homo sapiens
aagtttctaagtagaaaaggtgttcagtacatatttgttgaacttatgactaagagaatattcttattcctggaagatatgtgtgatttctagtggagactagaaatggcctttctctgaggcaaacttctaaatcctctgaataaaggtatctctagcccatctgactcagtcccacacccctgggctgtggaataaccagtttagggggtgattaaaatggctacataggtacagaaatgttaacttcagg

SEQ ID NO: 155204 - DNA, 247 bp, Homo sapiens
ggaatacaaacatggctttcggtctgagagcctgttgcttgctgagatgttcccagctgttcttcagtgctgagcattttttgggggtaggggttttctattcccaagcaccatcactgcccctctctgaggtgtaacagctgtgaaagtgatgtccagaaggacagggagggaaagagagattagtatccaagcccacagagaataatttataatgaagctttgaagttaatagctcttgttttgt

SEQ ID NO: 155205 - DNA, 307 bp, Homo sapiens
  misc_feature (1)..(1): n is a, c, g, or t
nggtgtgtacgagtacgcatacttatggcagggtcatgatggcaggagtactcagaggtgtctagtgtagtgataagggtggagaggttaaaggagccacttattagataatgtaggggagggaagaggctaggggaagggatatggagctggaggagagggaaatgggaagatgttagtcaaagggtataaacttttggttatgcaggatcaataattctgaagctctaatacagcacggtgggctatggttaataacactctattgtatacttcaaatttgccaagagaatagatcttacatgtt

SEQ ID NO: 155206 - DNA, 221 bp, Homo sapiens
tgctaggcctcctcccccatctttactctcggttttttgttgttgggaagatagaagccatcataagtctaccatcactactcacctacttccaagtacctatctaaggccttccctcccttgggtctatgggattctatctcttctctcttacttgatgttttcctctctgctggatcattccttctgacatacaaatatactgtaatttctcccaactg

SEQ ID NO: 155207 - DNA, 523 bp, Homo sapiens
acagattttggtctgcagatctcctgacatttctctgcaaattaacttcctaagtgaaggacacaggcttcacagaagtccattattggctccccgtttggtctgccagttatgtccactgttacagtgggacagagtgagaacctttgcaagtaggactatacttctctgagacagttcaagagaacttctccatcagcaaaggcagagatcaatatatagaattaatcaactttacacccccactccacccatgtctactaaggcctctgacacacttaaagaaagggttgttttttctaaaaaaaaaaaaaattattaaatttccaaagccaagacttgatcaaaaatgatgagaaatctggctgagaatgcctaggctgtccgccaaggtctcatcatcccttagccaaggaagtttgaggtccccatttgaagagttaccagaggaaacggctagaacagtgatccactctagaattccttctttttgtataccttctctttcaggtgggaaacagta

SEQ ID NO: 155208 - DNA, 279 bp, Homo sapiens
gtgtgtgtgtgtgtgtgtgtgtctctctggatgtgctgtcttggcttcagcgcatgctcagcttagcagcagctgcctcaggctggtccctgccagctctgagggctccaggtctcagccctgctttccttccagagactgaggacagatagctgtattatgtctctccatagtcagtggtcaacatcggaactggaggtccagcatccctactgagcatcttcctatcccagctctgctcatccaaatgccattaggcttgcagcatccagtactgac

SEQ ID NO: 155209 - DNA, 407 bp, Homo sapiens
ttagcagtgtgttcaatgggcatgaaacctggttgatgccttggcagccggaactttccttgtgttatctccatgggcttttagccctcatatgaacggctgacatcattagtcagaacaaaccacccagaatcggttcaactttcaaagctaaatggaaatcaaaatgtggaatgactcagggactgctcgttaggaaaactgattcctctgtgactcagagcagatcttgtaacctccaggggcttggcatctggacatggggcttaaaagagaacagactggggaatcgcaccccaactgggcagctgtggcacctggacaggtgattaaaattagcacttctacctgtgacccagcaattgcacttctgggtatttatagagagaaaggcaaacagctgcctt

SEQ ID NO: 155210 - DNA, 648 bp, Homo sapiens
aggaaggacacttactcagacttaaggagggtgtcagggttttctgagagaaaaaatagctaatatttgaatctatttaatctctttactccattaacacagcctagggttaggatcttttttcttacctggacaagtgtcttactcttccaattggtctttctgctttcagtcttacctttgctggaaaccttatcctcaagatagaaagcaaacttcacagactggggctctttgtggtctgaacccctgtttatcttttaccagacttctccatgctttcacattatactgaagacatgcagaaccattcccatttctgacaatgtgttactcacttctatctgcctaggttaccatttcccttgtttcttaaggctaggtcaagctttatcttcgctgggaagcctttcctgacccctaatctgggatggccgcccactgacccactgtgatacatgttttcaagtaactagagacgacataaacagcatgataataagtatgtgctatgtagttttgggcttcaactcagggatggtcaatggcccaaattaagaatctatatttcaggagagtccagctaacacgaactccgcaagacagccactaaaaaaagctcttcagctattcagatgttcaccaaca

SEQ ID NO: 155211 - DNA, 366 bp, Homo sapiens
ctgcactccaaccaatcagttggttgtccttttaattggacaaaccaagaaaaaatattgccactgatatgataagttaatgtccttaatatataaaatgttcaggcaaattgataagagagttatgaaatccttaatagaaaaaaatggatgaggccgggcacggtggctcatgtctgtaatccctttgtaatccctttgtaatcccagcacttcgtgatctaggagggtggatcacgaggtcaggagttcaagaccagcctggccaagatgatgaaacccgtctctactaaaactacaaaaattagccaggcacggtggtaggtgcctgtaatcctagctactcggaaggctgaggcaggagaa

SEQ ID NO: 155212 - DNA, 180 bp, Homo sapiens
aggagtaattatagcaactgtacctataatgggagatcagtgaggagtgatcacctataaaaattagatttgccttcagccattttaattaaagtataaatattttgaggaaggaccaagttaataattttaaggcaggggaaataatgagtggaaatgcgtgtgtatgtgtcttcttca

SEQ ID NO: 155213 - DNA, 185 bp, Homo sapiens
ataatatgaggaaattcttcacaattgcttcaggctatagaaagacttaacgagagcatgcgtttaataaggtaagaatgatgaactgtatgaatgctgctggaagatccaataggatggctgccagatttggtcacgtgatgtgattgatgactgtagtaaagaccatgcccaagcagttgttg

SEQ ID NO: 155214 - DNA, 471 bp, Homo sapiens
agccctgcctacactcaggagctttttaaaaaatgcccgtacctgggctcaattctatgccacttgaatcagaatctccaacattatgtttttgaaaattgattcttatgggcagccagggttaagaacacttgaatgagatggtctctgaggcctctggcaactccagggttctgtggttgtaaattacccaaagtctgtgtgtgggatgaaccacaacctctgaaagctccacctggaacccacaatgctccaagttctctgcccaatgggaggcgacctctctggagctgctccctcaggtcaggagttataaggatgcctgggggtgctttccttcggcttggtctgagcttggggtctttggctgctttctagaccctctgtgtctgcagcaggtaaataatgttgtatgtgatttaatgctgagaaccggggtcaagacttttaaaacccctgaaatactcccca

SEQ ID NO: 155215 - DNA, 582 bp, Homo sapiens
ttccaacatgtaggatacattaagtagagattggagaaaggttcaattcagcaggcacactcaggacataccatgtctaaagcaacttaagctaagctgagcctttcatattataaaacattcacaggcttttccaaatgccccttgtcacaccaagtctcaatgtattgaactatttactataagttactattaaacatttaaaattaatttcatagaccatcaacaagtaggacatttgtagctatctttactaaatgatagaatgccccagagggctggtggcagctttaaagatttttcatagatggtttcagttggatgtaagttctgttttgcaaccaaaagaatgtaagaaatttgacccatatattgcaaaccttctgataagtgacatgaacctcatgagaggattcagccaacaatgcctcattgactaggcaagaaattttgtaacttctcaatgaatactcagggctttatgttaggagctggaattcagtgaacacaaataaaatcattagcataaataaatgcatcaccctaaagggagatgttggtgatgcttctgcattcacattc

SEQ ID NO: 155216 - DNA, 281 bp, Homo sapiens
ggtggcgagctgaggcgaaaggggcagaggcaagggccccgtgtgaagtccctcaggaggcaggaatgagcatggagcagagaggcagctggcatgcgcccggagcacagagaggagaaaacagatcctgcagggccttggggacttgcaggtttgatcctgagggcaagggacactgatcaagatgtcaagcaggatgttctttggcccctatgtgaagaatagatgggagtgagtggggggatgcagggaaacccgccaggagctgttgctcgaacttg

SEQ ID NO: 155217 - DNA, 222 bp, Homo sapiens
tcagctgcatttatccaatttgtagttatgtttgttgatttgtaatctgtaacccccagaagactgcaaggtccatgagggaaaagacctatgctcttattgccttactataaccttgaacttaataaaagcctggccaataaatatttactgaatgaatatttttctttaacaaataacctttctgagaggatgcccttttttttttttttttttttttgg

SEQ ID NO: 155218 - DNA, 354 bp, Homo sapiens
tccaggaaaggaggacccttggcagcgttcctctcagctgctgctctttgggaatcagctggactcttctcaggctctgtttttgttccacagtgcccaggtttacacataacaggcatagccatgcagggagacactcttgaccacccgccctgccttagttccacgttgccgagaaacatgaaatgattgttccgtcagctatggccaggcctgggatgaagtcagaaacacacagggctcccaggagcccactcagcagtgatgagaaaatagtcataaagaagaggtttaattggaaattcagtttgctatattcgtaaaaatgtctttgatgtttaaaataattaatat

SEQ ID NO: 155219 - DNA, 112 bp, Homo sapiens
cttgcagaaacacctcaaagaatggagcataaactcagagagaagactgactgactgctggctactctctgcttccagtgctgtcttcaaggctagctatcttctcattgtt

SEQ ID NO: 155220 - DNA, 274 bp, Homo sapiens
gggagtttccaggtcattaggaatctggggaatgaagatggtgtgggtttagacagggaggtgagtctttaaggatgctcagatactgagaaaagcagactggtggcagggcataaagatggcagaggaaagtgaggagaaagcagcccaggttggaggtgtagtctaagagtagaggttggcacaatgttgcaaggccctgtctgtggaggctcagctgctgctctgagaagttggaacttgatctggctggcagcggggagctattatgcct

SEQ ID NO: 155221 - DNA, 416 bp, Homo sapiens
cactaagaggatttttggtctattttgttcacactgtgtcctgagcacctgggacagattagcacgtagtaggcgctcaaggatttgcggaagactctatggagattttctgatttgaagctagcacactttacttgactgcatctacctttatacgtaagggaggtaaaggtgaagaacaagacagtggaaagcaaacacactatttcaaaggagtttccaaaaataaaaaaattcattcatgccaggtgcagtgctcacacctgtaatcccagcactttgggaggcagaggcaggtggatcacctgaggtcaggaggtccagaccagcctgaccaacatggagaaaccctgtctctaataaaaatacaaaattagccaggcatggtggcaggcacctgtaatcccagcaacctg

SEQ ID NO: 155222 - DNA, 326 bp, Homo sapiens
gccaatggggacaacttacagctcctgcagctccagctctcagaggccaagcacagacaagctgcccatttaaaaaagtaaagtctgagggtttggggggttttaacaggagcttctgaaacaagaatgtgggtaccacacctatgacccaaggtcctcctgatgaaatgcggacgagagacagacacattccacccagaggagccgacagctacagaaatctccatctcgacttttgacagggcgaggtaacgacagagtgcagaagcaataccagcaagaatcgactaagggcgatacttcccaagggggcgacgctgacctta

SEQ ID NO: 155223 - DNA, 228 bp, Homo sapiens
aggccttccatatatgcagtttcctcaaaaccatcctatcttccctactcccaccccaaccagaacgcccttcatctggttaattcctattcatccattctgctttaaatatcttatttaacagatcctaatgcagtatttattgtgttttcatttcattttattttgaggacagtctcactctgtcactcgggccggagtgcagggtatgatcatggttcactgcag

SEQ ID NO: 155224 - DNA, 297 bp, Homo sapiens
acagagttcaggagagcagagcaaaggttttttgctctgagctggtgcatacagtgttttcaaccttggcagctttagtttttctgtctgtacaaagggctaacaacaggaaactcagatctgagggtagcatgagaaccattttgtagggtattgggctgaaggctgggaagtgcagtgaggaggatgggaatatctgagaatcgcacacgtttgagggcaaggggctgcaatgggagaacagaccctccagccttgtgcttatcacccttgccttggagctctgggaccctaggg

SEQ ID NO: 155225 - DNA, 395 bp, Homo sapiens
aaccaaatacagttatcagaagagaaatgatggctcagaggaaaagggactaagaactgagtgcgccagatgctaggtttcctttctattcaattatacacatcctcaagagctccatgacattgctatacttcctagaccactttttaacaggtggtggttcgttttttttaaaggcagaattgctgcgtttggttacacactgtggagggggaaaaaggcccaatttgtgggtgaaatattagtataattaccagccacataaaagtcttattagttcgagatctaaaaaaatattttggaatggtttagaccaatactatgcagtgtgactatagccctgtgctaaacacatattgctggagtccctaatcctatggaaatgatgtcaaatg

SEQ ID NO: 155226 - DNA, 270 bp, Homo sapiens
tgtagtataaatccagaaaacttgaaaagttcaaaatccagaaaatgttttacttaatattaagcagcagtgtacatactgatttatcattttactaatatgattttttcacaaattcaagtatgaatatattcacccctttcttactatgaccctaattagtgtttgtggcacaaggatttctttctctgggcttaacatagatactatattattatcagaaaactacttaaaactcttcactaccagattaggatggagatagataga

SEQ ID NO: 155227 - DNA, 212 bp, Homo sapiens
gttaatttcttaaaaacttgcaaatttcaaaatatttgaacactttttacctatgtattcaaatcatttgcttttattaaaataccatctttatcttactggtatcttctgtggcaactgaaactattaaatttttctggaagttcggctcccttaaagtatgtgacatgggtcttcatagttcaactctcattgttacaatttctgtacca

SEQ ID NO: 155228 - DNA, 125 bp, Homo sapiens
ctggaaagattcttagattctttccttccctcttggcctggctgaggcctcctgcagggctcagtttaaatatctaaccctgaagttgtcctttgcctctcacacccaggtctcttgcagcacgt

SEQ ID NO: 155229 - DNA, 1588 bp, Homo sapiens
actcgatattgcgaaaccaaacttggtataagagctcccaacactgctaaactggtcatcgctaaacctttaaaaaaaaaaaaaaagcattcgctggtacccagatttccacaggagttaaacatttcctgcgcagctaaagcaagtcttaccagtaggaaaccggaacttgctaggactaagaaacttgaggctaggctgaccccatggttgttatgattagaaatccgaggccactggaaacccggagctgctgaccaacgagtcacagggtaacttcgccttcgcatggggaaacgggctggtgcagtggtgtcatcttggctcagtgcagcctcgacttcctgggatccagcgatcctcccgcttcagcctctagagtagccgagaccacaggtcacccctcgctgccaggctctcttcccggtccagagcccacaggatcctacaggaggggccaacaactgcttgcctttgaaacttgaaactctcggtctaaggttccttaggagcgtaaaaggcacagcgttttctgatcgcagcttcaggtctcccgcccctgtcccggtacctctcctgcaggacggaactctgtgggaacgctcgttgattctgatggttaactgtcagatatccttgatattggacataggatttggaagagggcaggagagaaaaatgaactgcaagactccagcacaagaggtgggattgctggcagatgtctgctccctctccaaacctaatgaacatctcaaagtgccatccactttcctatacccttgatctgtgaaatggatcactgacgctttctctgtctttccggaaatgcaaaacaggtgaattttcaagcgcttgaattgtctctcacacttttcagtcaagagtggggctataaactccttcctcataggaaataaggaactgccactgcttggaagtaaaacgtatttttcccataagctttcacatttcccaaaaaaaattatacatccagatgtaatccccctaagaggcttacagaccctaccaggagcgttcccacgcgaacgcatcatctcccaatcggatcctgaaaacaccatgcaaccaattccatccttttctggatcaacctgggcagaggacaggtgcagaggagcccagagaagggccttgacaagtcaggagacccaatttggggtcgcaattgtcactcactccccaggcgtttgctttgatcttcccctcccaccatactacttcttctgctacctggtttctccctggtatttgaggatcctccaattgccttctggtcttacagacgggagaataaaggaaaaatggcatcgtttccaccttaaaagttacaagcacttcaccagatggtacagcctaggtagagcctttgtaaaacaaatgcccgcccactgcttcaccctcctcatttccacctcagcaaagcattttagcagaaaagctgacccagagcagtagctccctgctataatcctagcactttgggaggctaagtcaggagtatctctttagcccagaagttcaataccaccctaagcacaaagtgagatcctgccttaccaaaaaa

SEQ ID NO: 155230 - DNA, 474 bp, Homo sapiens
attgccctgggagaggaagaaaggggccttggggaaagggtggattgataggtggtgggtgggcaggattggaacctccagggtaccctatggtggggggatatggatttggtcctggctggccggcattgggattccacatgttgaggtgtgtcctccagcctttccaccaccgcctgggcttgatgcattctcctcagctcaatacatttttagaagggaaccccccatgtgaccacacactaggtgaaaatgtaggacattacgagcactgtggaagctttccttgggcttccttcccttgatcctggttactagtccggtggccaagaggtgataaatactgatgggacctgtgtatcctatgaggtagaagcgcctgtattgtcttcaggtgaaggaggagtgggcctcttctgcaggcccagagagtttaaggtgatctggggtttcaagattttcaagcctgtcgac

SEQ ID NO: 155231 - DNA, 698 bp, Homo sapiens
aaaataataaagagcaagacagagaactacaacaacagatatatataaaagcaacattatatacacatggatagagaaaagatgacagaaatacagcaaaatatgagcctagtaatttgtaggatttcggtgattttattagtttatttttccctgctttctataaggacaatgtagtccatcatttaacatcagaaaaaaagtcaaaaaagtcttttttccaagccaagttgaagaggggaaaaaagcacccccttaaaaaaagaattcactctctgagggtgtatgttggggtgtgaaagcttgtcctgcttgactgtatgtggtaacaggggacaggcttctcagaaggcagactaagtggatgtcccaagtaaagctctaagataatgagaaacatgatctgacaaatgtatcagaactaagagaaccaaaaaggaccatgttctttctcagtagtcactttttccacttattcaacaatactgttgctgttcaaaatacctggaacccctcatctggaactacctacagactagtagtaccatctttccaatgttttcaatagtagtgcattttcattctttgagattgggtttaattttgtcttgggtaatatcatcttttgaccaaaaattaggtatgactataaaatgactatggagtttctttttttcttttcttttcatttttttttt

SEQ ID NO: 155232 - DNA, 292 bp, Homo sapiens
ggaggataccccctataatctaggtgcaagtctgggaaaattcatgctcagatgaacacataggttggctcattaaataacacccgtttctgtgaaggacacttgcagagagctaaaaggcaggaaagttggtgagtaagaagtacaaaacagtagattaataaacgtgtgattattcctttcagtattcagaatttaatgagcatatattacagatacaaatctgtatcttaaaatagttgatagcctctagagaagggatggggtggactgttaggtgctgaggccagtg

SEQ ID NO: 155233 - DNA, 200 bp, Homo sapiens
actctgtcccagccacgctgccctccatgatgctccctgagtatcccacctgggttcctaccccagggccttcggacgaccgggctactgcctgatcctgacacttgcatggctccctcctgccctaactctacccgcaccctccccacctccatcctccttttccctcacacaacacgtcacgtatcctgcgcttgttg

SEQ ID NO: 155234 - DNA, 585 bp, Homo sapiens
ccaacctgtaactgtcctactgcctaaagcagtagtttccaaataggatacatggcttaattatattcaaatttcaagattaaaacattatcagtttactaggcttttaacatacagattctttaacatcatttatatttttactgaggtcgtttctttaaaaagtgttagctaagttaaaaagatcagttttcttaagagtcaatattaaagagagtgtgtgtatatgaatataccagtgtcccacagtcaaaaaactttaaaaaatatgaattatccaatccctcatttcatatatatggaaaaaaaccctgtgaggtatagagtttgctcacaggctttcacaggtttctgctaaaaaagtactgtaataggccgggcgcggtggctcacacctgtaatcccagcactttgggagaccaaggcagacggatcacctgaggtcaggagttcgagaccagcctggccaacatggtgaaaccccgtctctactaaaaatacagaatagctgggcatggtggtgggtgcctgtaatcccagctacttgggaggctgaggcaggaaaatcacttgaacctgggaggc

SEQ ID NO: 155235 - DNA, 266 bp, Homo sapiens
atcttcctctcaagtccagtgtggcggtggagcagtagcagacacagggaaagtgacccgggccatctggggttattcttggactttcttgttctgtcatgaccaagggcaaaaggaattgtttgaaaggtagacagtgtgtctgggtttacccctgaatgtcatcagggaatgtcttttaacacaagaagatggcaaaggatattagcctttcttgtgatgttagcaagcctggatctcccggggggtgtgtttgtgaaggcagt

SEQ ID NO: 155236 - DNA, 401 bp, Homo sapiens
gctgggaaaaaagacacgtcaactcaatacccatcctatttttagacggcctgagattcgtccttatccatgcagggcagtcgggtaggacaatgaagaggtggacttctgaatttgagagaaattggtcttatcccagagaagtgaggccaccacccacctgcaatagcttggcttcctggatccctaagcaaagacagagtcttgctctgtcactcgggctggagtacagtgacacaatcacggttcactgcagcctggacctcccagctactcaggaggctgaggcagaagaatcgcttgaacccaggaggcaaaggttgcagtgagctgagattgctccattgcactccagcctgagaaacaaaagcaaaactctatccccaccccccccaaaaaaa

SEQ ID NO: 155237 - DNA, 502 bp, Homo sapiens
cttataacagcatgagaatggactaatacactactacctgatactccccggggaagaaccccacagcatcaggataggggataaggaaagcaatttgggtcaatggaggagcaaatttgccagcagtttggagctgttgatagttggattagatggtttcatgaagttttgagcctctagattcagagaccaagtgaccaccttccccttgcgctgagagggaatttcttcaactggttggaaatggaatgataggtaggatccagaagggctatctaacttgataatttatgtgattgttttctcatttaagggagagaatattatctacagtgtttctgatttttttaagggccttggggaaggacataatgaattattcagagacttctctctgtgaagcaagttgcacagagacagacaacttgatacaaattacgattctaaatttgttagtaatatattttattcatgcactctacttacaatagatttcctgctt

SEQ ID NO: 155238 - DNA, 291 bp, Homo sapiens
tgcataccggtgacatcataccgggccagaaaactgtctggcattgtagagagaggggttttgccctcaaaagactgttgcttactttcagtagaatggggaatgacactggtatcttccttaagggttgttatggggatgaaatgtatgtaaagtgctcaatagggcactggactcactccattgatggctgtctttgctcgaagtgtcttcctgatgctgctgctgttgctgcttgtgcttcttctgtgcttacattctctctctctcactcactcactctgtctctcc

SEQ ID NO: 155239 - DNA, 416 bp, Homo sapiens
cgtggtggctcacacctgtaatctcagcactttgggagaccaaggcaggaggatcacttgaggacaggagcttgaaaccagtctggtcaacacagcgagacctagtctctacaaaagaaaaaaaaagttagccagacatggtggtacacgcctgtggttccagctacttgagaagttgaggtgagagggttgcttgagcccaggagttggaggccgcagtgagccatgattgcaccactgcactccaacctgggtgacagaacgagactctgtttcaaaaaaataaaaacaaaaacaaaccaaaaacctgtattttagctccaaatttgttgctgcaatgcaaattattagagagaatgcttttgccatgctataaatactcatgccctaccaaatttcatgtaggcagaacctcc

SEQ ID NO: 155240 - DNA, 574 bp, Homo sapiens
aaaagctagtatttgattgtgttagatcatcagcttctggttttcattagacaaacctgaaataccctattattaagattaaacaaaaaaatagttgttttcttattctgaaacctattattttgaggctgctctgaccagaggaagagaaatcagttttgcaaaacctgatggagagatacgtcaagaggagaagcaataacctcatcaatgctgcatttaggttgcttttgtaaatgagatcccttcctggatctgacaatgggaaggaaggataatttcgttctttggcattggcaatactttctttagtataaaaggactttcaaagtgcaaaatatagggcaaagaatactgtttgcctatgtaatgtcagcaaactggtgaggtgctgcagagaatctgcaataacatcgtactggaacctgagggttatgagatcttagatctccatgtcatttacgcttaccatggtattttctcaatgttaactctcagaataagcccttagcaagtggtgggtatttttccagtcataccagtttaacagggaaaaagagagtcagagtaacat

SEQ ID NO: 155241 - DNA, 341 bp, Homo sapiens
catagtaaccatctcaggtgctcttttggtcaggagcttcaccaataggctatctggagtacaaaatatagtagcctttaatttgcagagtaggtctctcaccaataggtttataggagatacaggagaaagtcagaatgaaggtacctcagtaagagcacctgtctgtttgggaatccaagagaaaaaggaataaatggaggctgatccaaagtaccaacaacttgtactaatcagttgccagatggaaagcaggaattttctgaggaaactgcagaataagtagcaccaatatctaccagaaaagccaaggatggatggggttcagtaaaagtccttga

SEQ ID NO: 155242 - DNA, 293 bp, Homo sapiens
ctctagagactccccgagtactagtgcctctgtgcttctgctcctggtaggccttgctatctgccctgtgccagcatccacatttaaccttgaaactagaaggtatgaactctgtttggataaggggctcaggtaggaagtgagctgcctcaggtcattgctatttgtattggcctttgagcagggatttctgacttggagggaaacatcaagtatctactatgtacaaggcacttgaggtgggcaccgcaggatatttagtgcccccttggtgcttcacatgttatacgttt

SEQ ID NO: 155243 - DNA, 109 bp, Homo sapiens
ctctttttataatgaggaataaattagttacttaaaaaaaactctgtaatggatattatgttataaagggaaatggtttataaggtattatcatgagtataaaacaggc

SEQ ID NO: 155244 - DNA, 371 bp, Homo sapiens
tgccccaagacaaagcaaaagcctggccagtgtacagtatttcctttctcagcttttcttgttctacaaattagaaatcttatagtaatcattgacacatctttctatttcagtccccttttatatctaaattagaatggataactttgcttaaaaatatctattcttaaaggaatattatttgaatacaaatatttatttatttatttttgagacggcgtcttgctctattggcaggctggagtgcagtggtgcgatctcagctcactgcaacccccgcctcccagattcaagcaattctcctgcctcagcctccctagtagctgagactacaggtgcacaccaccacgcctggctaatttttgtatttt

SEQ ID NO: 155245 - DNA, 372 bp, Homo sapiens
gtgggatgaaacgaaagctgagacacacacggtctgacaatttcaaagactctcttgcacaaacagaggtggagaaagtttaaatgaaagtcatatgaagaaagacctgggacagtactggcccacagatgtgttttgtttgccctttgcagtgtttgtgaaaaacactaagccaatagttaaaaattgtgagagttacatgaaaatccggatttccggctgctcttgaaaaactgatagatctggcaattccaggtctgcgttcagacgtgacaacagctgattagaattcacttgtgactatccccttaggacctggtggatgcatgtggacacacaccagcctgcttacgccgcttaggttactttccc

SEQ ID NO: 155246 - DNA, 178 bp, Homo sapiens
atctatcaatttcatttcaggatcataaaaggggaattacaatcataaaaggggaattgttagcaaaagggggcatttggtgtgacagagtcgagagtcactgctctagcaagcttcccctcctagccaccagattctcccagagaccagttcttcctgaaatgcaggatctggcttt

SEQ ID NO: 155247 - DNA, 325 bp, Homo sapiens
aaggaatgcctcatttgatgataccattgttacactctgtcatcatcaaatgtcccaacgtatacacaaaactttaatctgattctccttagggtcatgcaaagctaaaattatttataaaggcatttaaatgaattgtgccattaaaattaaatcagtgttatatgtgtgtctctacaggtttgtaactcattatttatggacctttggggttgaatttacagatgctgaatctgcagatgccagaggcccaaactgattttcctaggggccatcttatctcctaagtgatagctacatggttgtggacatgtctgcttatttc

SEQ ID NO: 155248 - DNA, 395 bp, Homo sapiens
gtgctgaaatagcaagccagttttcctcactttggagctgcattgtctatcatgtgaagatgttcataaccaccagtgtctgcttctagctctttcctatcctttgtttctggagtttacttgtgtgtgaggaaggcttttgtggggaccaaggtacatggagcagttgggaggtgaaagtttgtcactgggtcctacctgtgcagaacgtcagtcccagccgagaaagcaagggccagggcagtagttctcaaacttgtgttagcctcagtcacctggagagctggttgtgccatggcttccgatgcagcaagtctggagtgcgccccagaggtgtgcatttccaccgggtctcctggtggtcccgatgctgccagccccaggtgaatacaaac

SEQ ID NO: 155249 - DNA, 422 bp, Homo sapiens
tggatcttgtgaatgttaccttacatgttacctcacaaggcaaaagggactttgcagaggtgattaagctaaggatcttaaactacagagattatccaggattgcccgtgtgggcctggtgtaatcataagggtcctcttgagagggaggcagggagaggtgtcaaaggagacatgatgacagaacagagggcagagagagatctgaagatcctgtgctgctactttaaaaatggaggagggtgacacaggcaaaggaatgtagcaggaggcctctagaattggaaaaggcaaggaaatgaatcttgcctagagcctccagaaggaacacagcttgattttctttttttttcgagacagggtctcactctgaagtacggtggtgctatctcggttcactgaaacctcaacctcccaggctca

SEQ ID NO: 155250 - DNA, 1059 bp, Homo sapiens
aaatggaaaaaacgaccagcgtcacaggcctgtcccgtagcacgggcagtagctgaagaggccctgcagaccctgtgtaatgggtctaggtctcctctacctcttttttgtttgtatgtttgagacggagtctcgctgtgtctcccaggctggagtgcagtggcacgatcttggctcactgcaacctccaactcccaggttcaagcagttctgcctcagcctcccgagtagctggattacaggtgcccaccaccacgcccagccaattttttgtattttaatagagacggggtttcaccatcttggccaggctgttctcgaactcctgacctcatgatccacctgccttggcttcccaaagtgctgggattacaggcgtgagccaccgcgcctggcctcgtctacctcttttgatgcatcgtacacaagccattggtcggggggcgggtccacaagctggtatttgtcttaatatgctgttactaatacattgtttacttgggaagaaagcaccatagcatttatttgcagtccaaaggtggaagttgtgactccagcaacacaatcatgtgacagctttaatgctcatttatgaatttcatttgggccaaaagcatagttctgtgactcaagcacttaatgattaatagaactctagaggaacttaccaaaggggcaaagaatgaaggttgatggttgttacatctccagattctaaaattgatccatagttgtggttctgttcgttcctttcagtgctagaactctttccattagagatgactttcgtcttctgctttggagggcttggagatgtgaaatgttcaggagggtcttttccctgctgttggagcttctttttcttccctggttgctttttcatagtattctggctacaaataagtaagacatttctattttgttttgttacagagtggcttagaggaaaggttagatataatctctttgggctctgttgctgtttcaggatgctcgatgctttagatttattaatatgtagtgtgctgaacttagaagtccttcctcttgtctgccttg

SEQ ID NO: 155251 - DNA, 355 bp, Homo sapiens
gtcgaccctgcccccccaacttcaaaaatcagcacttcatccatctagctgctcaagataaatcaagtggcaagccctgccagatccacttactaaacactccacagctggcctcttctcgccactgccactgccacgacctatcccgtccccaccccatccatgccacctggaccactgaggctgcttcctccctggctggcttccactctgctggcatgcagttgattccatgtgggatgttaatcacatcacattccccggtcctgagatcacaacctcttgcagcagcctccgaggctttgtgtaaactccagtcgacgcggccgcgaatttagtagtagtaggcggccgc

SEQ ID NO: 155252 - DNA, 406 bp, Homo sapiens
ccaccaccaccaccactttccaccaagatgtcaggaggtaccatgctccagatgtttggttctaggacaatgggtggcctgaggagatggtgtgcaatcagaccatgcagaagatatttgtattagcacatttgtgaattgagagctgccaatacttttgtaaagtgtgagaaaacacaagcctttatcagcaactgagcaaaatgatggtgctaccttttctaatatgaccctatccagcaagttgtcactctttgctgcatagacaactccaaccaggcatggtagtgcacacctgcaatctcagcactttgggaggccaaggaggatggcccagaccagcctggacaacatagtgacagcccctctctacaaaaaattatttttaaataataataaaaatttt

SEQ ID NO: 155253 - DNA, 418 bp, Homo sapiens
gataaaacacctgggtataatttggtatctttcttggtcacccacatccattggattttaatttaaatttcaaggttcttgatatatggatgttgggaactggaagagaaccacaaggttttccgtcttttaattttttcctttttaatgtatcctggcaaatatagtttaagctacaaaacatttcccaaattcagggctaggctctgggtgtttggctttccaatgtctggttttcctgatttgccagtgacttaattcctccatgagaacatcccttgtatttcaaagagtccaagggagaggttgccgtgtgttccagcagttgtcctgccctgcttcaaaggacaggctggtggctcagatggtggatgtgacacccttcagcctgtgtgacgataacggctctgccactggc

SEQ ID NO: 155254 - DNA, 219 bp, Homo sapiens
ggcagagtgaccttccaaggcacagcccccaggcggttagttacacactctttgtctcaaggacttccctgtggcatgggtacccattagggaggaagcttgccttcgtttcagtctagaaatttctctgaaggcctgttttatcccccacggagtctacaatggtgcaacaatgcagatgatcacagtggacttttggcaaatgtttctgggtctaga

SEQ ID NO: 155255 - DNA, 370 bp, Homo sapiens
cattttccctggcttccattgttctgttcttttcttttccttttctttcctgttttcctctttttgtctttttcttctttgccttgtcttctactgtttcttttgttatgaacgtatttacgcaaagtgctgttatctgttgacccacattgttttgaaaaatgtcccccaccgcagctggccctaaggaaagaagctgtggtgctttctggttcctgggcacagggccaggccaggcctctatatatcaaagaacttccctatcctattatcccaccttatttgtttctgaaagcacaaaagcacaagtatacaaattacctaactctagtataatactgtcacaaaactggtgtgacagaattcgaat

SEQ ID NO: 155256 - DNA, 407 bp, Homo sapiens
taccaaaggatctcccagttcacctgggagttaacacaccagggttctagtccttttgctcgctgtgtggctttgggtaagtccttgcccctctctggaccttgaggtcccattcatacaaaaagcagttggactcaggcctgccagcccccatttttgtggctcttccccgcccctccccatcctttggctatgggatagtctcccaggcacctccaaaaggaagtgtctaaaacagagctctccacctcctctccaagcccagctccccactgccctcttcctgccctgtccctgtctccgctgccctttagatcaggcaggcaggcaggcctagagcatccgccctgagacactgcctgttggctgccttaagacgccccttccttctctgcccgcagcctccc

SEQ ID NO: 155257 - DNA, 486 bp, Homo sapiens
  misc_feature (49)..(49): n is a, c, g, or t
  misc_feature (54)..(54): n is a, c, g, or t
  misc_feature (56)..(56): n is a, c, g, or t
  misc_feature (61)..(61): n is a, c, g, or t
gcgcatagggtgtcatccttctttccttcaggaagcttattacacatcnccatncnttatnccacttggatctcctatagcaaagaaacccattcatgtgtatggaatcaatgtatatagtcttttcacactgcagctttgggaaaacttcattccttgatttgtgtttgtcttggccttcctggtgtgcagtactgctgtagaaaagtattaatagcttcatttcatataaacataagtaactcccaaacacttatgtagaggactaaaaatgtatctggtatttaagtaatctgaaccagttctgcaagtgactgtgttttgtattactgtgaaaataagaaaatgtagttaattacaatttaaagagtattccacataacttcctaattactaacattcaaatctgattcatctttgagtttccttttggggtgggggctcttgtatccaatcagttactaaatcctcttcattcttcatacc

SEQ ID NO: 155258 - DNA, 440 bp, Homo sapiens
tgtcttcccaaatttccctggcaggctgggaggcgctctgtctgtggggaggaaatggggttcagaggagctgggggtccactctgggtcacactgcaagctgggggctgagctgggatgggaaacccttaggcagatgttggccccaggccacttgcaggcagtcgcctatgacagctgctgcctgacagatcacacagcagagcacagctgcccagggctgcagcagggactggggacccagagcccgcgggagagggtcttacctgcccaacccagggagggcttctctggggaggtgtccctcatgctgggcctttcgggatgacaagagaagtcagggtgggcgacgggaagggttttccaggaagaggcaatggcaggaagggagttccaggaggccgggacgtgggatgtgccggggaccagtgctgcccaag

SEQ ID NO: 155259 - DNA, 469 bp, Homo sapiens
acttatccgtggtcaaacggcgccaggtgtgataggatatctcgcaggaatatcttcatcgcgcgcaaactcaattgaagtctgattacatccatggcggatgctggggtgcaggatgtattgaccaggaggccatgcagtgagagatgcatatatgaaccaaagaaagcttggagtcgctgtattaatatcaggcaaagtaaaggacatttgccttgaataaaaaaggacattgcatcatgataaactggtgagttcaccaagaagatacaacagttctgagtgtgtatgcatggaaccccagagcctggaagtccataaggtcagaactgacagaaatgcaaagacaaatccccagttgcacttagggactccagctttcctcagtaactgatagaaaaagcagacaaagttagcaaggatgtagaaaatctgaacaccatcaacagccaagtgaacgtgcgcattc

SEQ ID NO: 155260 - DNA, 653 bp, Homo sapiens
ggatgctggagtttggcagagatgaagtatgaattatgaattgcatgggaacaagtgaggagcatcctaggtaactgcctggaacatccctgagttgtgtgtagcctgactctattggcaggtgttgtgcttgggtatttcagtatgccgagggagtcagaagcaaagcagacatcttaggctttacgttgtacatgattgaggaaggcagtcagcaagacacggtcagatctgtgatttgacttctcaaatctgtggcagagtaaaaggtgcataggaaaagaaaagaccgaaagtacagtgaggaagttatttcaaaagtccaggtaggaggtaatgtgagcccgatccaagaccatggcaatggggatgggaatagaaagaaagtagcaaatggatatatttcagggaaaaattctaacgggatacagcaattcacaggatgtggcatatttaaagaaggaaaaggaatacattaccagtaaggttttgagctgcatgacaaggaagatggtgatgccacttagcaggggacacagaaagaaattttctcttcttggcaagaagaatcacaatacacggagcttacaactgactattttaaggcatacttaaaagatcttcaggtgtctgaatgtcaccagagagccaca

SEQ ID NO: 155261 - DNA, 192 bp, Homo sapiens
aaaaaaaaaagtagaaggaaggaatggcagcactgctgctttgtaggttgttttccataataagaggaggacaagaaaagtgtaggaaagcaaagaaaatttatgaacttacagtaaaaaggagtaacagcataacttaaaagaatgaagaaatagattacgtgttagataaattttttcttaatttttttt

SEQ ID NO: 155262 - DNA, 574 bp, Homo sapiens
gtacatcagtgttcaagtttaaaacaaactgaacaactcaaacactgcaacaacaggatgtttaacagtttctttttaccagatataattacgcggttacgaggtgtttaccagtgcttaaaatgaaaaattgaggaaaccaaaattatagctcagtacttctcagccctttgatgaattatgtttgttatccagaagcctatccctatcaattagattacgcttttaaaaagttacaagaaatcaaaatattataattcttttagttcggcggacttcatgatgcccccttcaaataatggaagtaatgaaagtgcccaatcatcagcaaagtctttagacacctatttacgtcttgttttaaaaactagatattaaaccaagattatgtcgtttgtacaaatattttatacacacacaaaaccaacttgaaatacaccaaagtatcagcaaagattatctctgggtaattatgggttttgttttttttcactcgcttctaaattttttttttttttttgggggggaagagccttttttggaccttcagcctcggggtcccgagctcgattcg

SEQ ID NO: 155263 - DNA, 423 bp, Homo sapiens
acgaaggggtctagaggggctttcagcaacccaaacagtcttgtcagccctaactctggacctaaggaaataattatgaatcctcaagatccatttaaaagtgtcattactgtagataaacaaagacgagtggatgcttcttcctactccacctcactgcagagattccatccatcccagggtcactgaccactgactggatgaactaggattggtgtggcagagtggagttttcaggagccaagagactcctggattgtcatgctctgtactccttccccacgaaaggaatgtctagaactcctgctgaaagtagtcattgcctgcatttcctaggcagaatgtgttagctccctccccagaagaacctgggcgaagaaggtgttccaatctgcatttggaaagaatccctcccgcaaagaa

SEQ ID NO: 155264 - DNA, 239 bp, Homo sapiens
ccactgctgagtttcccaccccgagtcctggacctgattcaggatggagcctggagaaggacagacaccctctgccagccatgaagatcccaggcccacaagttgctggccctctgtagcctagatcttgactctctcctgctcattagggcatcttgtcactgtccactgtcttcatcttcatccaccctactccttgctgtctaaccacaagcgtcttctttatgttcttacatgca

SEQ ID NO: 155265 - DNA, 281 bp, Homo sapiens
ggtggcaggcaggtttagctagaggggcaagcagccttcatgatagaggtgtacttctgattcagctctgaagaagccagggttaacatcatccttgtgataatatttgaatagaaaatgatgcatccctttatttccagggcagctgcttagaaatctccctcatgaatgtttgggggcaacaccttacaacacaatttggaagagctattatctagggcctagtatgttggttacaggagctctccaatcattccttgaagagaacaccaccaccccat

SEQ ID NO: 155266 - DNA, 622 bp, Homo sapiens
taaatctttccattagaatttttatctgacattttgagtatacatacttttcatccgacgtttaggctttggtatcccatcacttaatgaaaatcttgcccatcttttggtaaatgatccaactatactcaacatcaaatacctcacaaaaaaaaaacagagggagcagaacctactatgcaatcattagatgccagagacaagttcagatgaataaaacagaatttatgtgttttctttcactctatcccttttgtaacttggttttacagtctaaggaactaaagaattctaacacctaatgcatttccaacatgagtacagagatgacttacaccatttctcttaaacagaaatcaaagtttttccacagtactaatgatgtcaagaatgaataaaatgtttaaaggttaggccaggcacggtggctcatgcctataatcccaggactttgggaggtagaggcgagcagatcacctgaggtcaggagtttgaaaccagcctgaccaacatggagaaaccctgtctctactaaatatacaaaattagccaggggtggtggtgcatgcctgtaatctcagctactcgggagactgaggcagaagaatcgcttgaacctggg

SEQ ID NO: 155267 - DNA, 605 bp, Homo sapiens
tacagagatgacttacaccatttctcttaaacagaaatcaaagtttttccacagtactaatgatgtcaagaatgaataaaatgtttaaaggttaggccaggcacggtggctcatgcctataatcccaggactttgggaggtagagggagcagaacctactatgcaatcattagatgccagagacaagttcagatgaataaaacagaatttatgtgttttctttcactctatcccttttgtaacttggttttacagtctaaggaactaaagaattctaacacctaatgcatttccaacatgagtacagagatgacttacaccatttctcttaaacagaaatcaaagtttttccacagtactaatgatgtcaagaatgaataaaatgtttaaaggttaggccaggcacggtggctcatgcctataatcccaggactttgggaggtagaggcgagcagatcacctgaggtcaggagtttgaaaccagcctgaccaacatggagaaaccctgtctctactaaatatacaaaattagccaggggtggtggtgcatgcctgtaatctcagctactcgggagactgaggcagaagaatcgcttgaacctggg

SEQ ID NO: 155268 - DNA, 528 bp, Homo sapiens
cgtgaagaacacacacacacatacacacacacacacacacactcagggtttctacttggtgcatacttatttttaatgcctattcatccacagcagctaaatgaacatatctctatagagcctatctaaaatatttagtttttaagccaccgtttaaacaatccaacatttaagtttttaagataatcatgcttacaagataaaccacttcaacaaaaaactaattttgcaggagctcagatctctctctcttacacatacacacacacacataaactttctttctcttttgctctctctctctcctgtaaactacagaactattatgttaaataggccatgcaaggtgcctgtttctcatgagaggcctcagtgtgcttcaatgtccccttattttttccgagtacaaccaaaggtgattatattcatcaggttgttatgctctgtaccatgtgacacactggcctggcatgacagacctgcccagcaagagtacttcatacaagaaagtactacttgaggaccaaa

SEQ ID NO: 155269 - DNA, 335 bp, Homo sapiens
tgaaaaatgtgacacaattagcaatgaagtttttaactgtgaaataaaagcacgattaacatcagtatctttttcacagtctttttcaatgaatcactttgtcttcttcaacacctttgtagctactgtaaaatttacatgactgtgaaattccatgcctttaaaattcatataactaaagtattgtaaactctattcatagcattgaataaaatggcactaaaatgagctgataatatggacattcatgtgtcctgattcagctaccgcgtctggcaggttcaagagccagaggcctgggttcaagctgtggtcatacctcttaaggactggga

SEQ ID NO: 155270 - DNA, 319 bp, Homo sapiens
aagcaatgtggccatgcacttttaacatccgaatccattatgcattaatagttcaacaaaggaagcacttttccccagactcacattccatgctaccacttccacagtcaaagcactgaggttaattcctaagaaaagctatctcttctcttctgcataccatcagcaatcataaccataatcataaaaagtctagacctcaaagaagcagaggtcttagataaacacatcaaggggctccaagtttcaattgcctaacaagggccatggaggcaatgtcgatgagtgaagtggttgacctttcctttatttcctttca

SEQ ID NO: 155271 - DNA, 383 bp, Homo sapiens
cagataaggaagatctgaaggaattgtctcgttttacaacgatctcactacaacagcctagagcaccccactgtgcaatgtgacagtccttgccataggaaagtctaatctaactcctttttggatgaactctggttctgtcttcggttgagatgagacaataacttcttactgggcattagggtgttgcggacgagtcccagtttgagacaagagagctgagtttaatttacaggctctgcctccaattttgtgaccttgtgtgaccttgggcaaggccctttcttgctttcctcgcctgtacattgagaaggtagaactagataacttctcaggcccttgcaaccccacagttctgtggctgaacgcgcccggaacgtccc

SEQ ID NO: 155272 - DNA, 365 bp, Homo sapiens
gatcccaaaccccattcattcttaaattcacctcctcttctgcagagaaagaggccaaacccctccatcttgacccaaaaggcagaaaccagctcttccagaggaccttccacagcagatggctgtcaatactagcttggatgggattcctccccggggatctttctccgagggcccctccagctctgagctctctccagggaacctccctcggcctaggaggggctttataagccctgacagcgctcatccacgtccgcagagcccaaccttaatgtgcctctccctagctgggtgaccccaagcaagtggctcaaccgctcaggacttcccggtacaaaaataaacaaataaagatgggactg

SEQ ID NO: 155273 - DNA, 333 bp, Homo sapiens
gtgtccatcccccttcgtgtgtccatccccctccatcttgacccaaaaggcagaaaccagctcttccagaggaccttccacagcagatggctgtcaatactagcttggatgggattcctccccggggatctttctccgagggcccctccagctctgagctctctccagggaacctccctcggcctaggaggggctttataagccctgacagcgctcatccacgtccgcagagcccaaccttaatgtgcctctccctagctgggtgaccccaagcaagtggctcaaccgctcaggacttcccggtacaaaaataaacaaataaagatgggactg

SEQ ID NO: 155274 - DNA, 536 bp, Homo sapiens
gcatcacttgatcatccctgaggggacagcaggtggattggttctatcctaaacctggcgaggccccggcctctagacaagcctccctgtgacaacaggtctaccagggcctggactcagcccctgtgccagagggcagcttggtgaaattcccagttgctgagcgcacgctggggagctgcctcgcagcacccagggcagacatgggtggatttgtgggtgcggaggagccctccttacctgcccaggagcccagggactctcacactgatgagtctgcgttccggggaaggttgcgtttctctggcagtgagcaacttgacaggtggtgtctgtggctccctagataggctggggacctcgggcccggatcagcccggctgcttcatccctgggagcacagacctgattgtggagcctggaagctccaagctccttgaacttcatccctgtggcctggacggggagcggaaaagagtcacatgaccagggttcctcctgcagggagcccccagacccaagggcctcagtccacc

SEQ ID NO: 155275 - DNA, 826 bp, Homo sapiens
cccttttcatgcaagtgtccaagaacaaaaactctgtgcccagtaaacaatagttcctcattccccaatcccctgtccctggttcagttttctattcaattttattacataagcacgtgtgtgtgtgtgtgtgtgtgtaccattaaccagtggtacagtgcaaaaaacttacataaatcttcattaaaattctaggtcagacatttactactgtgagaattcggttaagtaacatctttctgaacatttgtcttctcagctaaaatctaaggaggaggatgatgatgttaatagctaacattcactaggcacatgtccgtgcatttccctttctcaaaaaccctataaaataggttctagtataattttcactggtacatgaggaatcggaagcacagagatgtatcccaaggccacatttaacatctaccttagagagaaggtcactgtgaagaaagtgccaggtacagagcccatgctcaaaaatgagggttcccgttgcctttttcaggagtccttaccaggtgcggtttatatagtctgtgtacggagcatcctttgtgcagcaatgagtctagagtcattgcattttagtcttcaccacaacactagaaggtagatattttaaatgtagtttcaaaatgtgttaatttgtaattccacgatagttgaaatcaaagaaatcaaaccttacagggagaactcaaaattcacatgactaccgccctctaaactcagtccctgctccagagtaactactcttattgcactagtgtactgtatgtcttcccagacctttctatgaatagacactttgatccagaga

SEQ ID NO: 155276 - DNA, 413 bp, Homo sapiens
atcctggaattaagttgtttcttggaataatatgatacttcaaattggtatcttaaaatcatgaacgagactactagagcttatattttcactttcccaggactattgcaaaatactgatgatacaactgaaataagatcactgcctgaacttaactgtaatttatgataaaagtaggtcttttgaggacctctaggacaagtatgacacattttaaaatcacccagcctttcaaaattctgaatgatgtgaaagagttttgcatttaccatcagatttttctcacatattctactgttcctgatgacatgttaagagaatataaacattcttaggcgacactcttataaatagttccctggtacgaacagattgaaaagggtagaaaagtaaaataaacttttgtttgtttg

SEQ ID NO: 155277 - DNA, 675 bp, Homo sapiens
agagccagtacgacggccttgaggaggagctgtgcttgtgtgctggaggaacccaaggcggcctgtggtggagcctggtaggtgagctgtggggaggaaggcttgaggaaggtgggggagtgctattgttgagagttgcctggctgcgagggtgaatgaggagtgtggttttggaaacgccaaatggagatgccattcctaatacccatggggagagcacctgcagcagctgatcatgcctctgggcccagagacacctgaattttgagagtgtgctacacagaggtagcattcatgtgctcccatggactgagcctggggagaggaggtgaggtcccagcacaggcgctgggacaccccaaaacttagaggtggggaaggtgaggaacctgtcagtctgctcttgggtggcctgtggctaccatctcaacgaggagggaacgcgctgtgttgatgtggacgagtgcgcgccatctgctgagccctgtggtgaagggacatcgctgcgtgaactcgtcccggcagtattgcgatgagaatgcaagaggggttactattgtgatgagatcaggcaggatgtgtgtcgatgtcaaagtgagaggtattgatgacttgaaaattagttgtggcagtgagaatgaagaaaaatacttggatacagagtgttaggagcag

SEQ ID NO: 155278 - DNA, 727 bp, Homo sapiens
gttagtgtttcctgctgaggcagatgctacaggtttggcacatccctggagcaggtgccagtaaattctgtcttttgggttttaactcagcaggcattccccaggtaggtgccgcttaccatgggacactgtattagtgaccaaagtggggtgggttctccttcccagaggtttgccagctgtgaataaagttcaggtacagtggagcagtatggaattactgggcatatggttacattgggaggagaagaggttctatcccagcttcctgctggcaaagatgtggaagggtacagaggaggtggaattccaggaattgagggagcaaaaccatggcacagttcaaggaatgttggcttctctggctcaaaaggaatattagctgtgtggggaaatagggtggagataaggatggaaaagtggaaatcatagagaattcccattagtaaggaggattaggagccacccaggcttcccttggtttctttccccacatcacaagatccttctcattttgccactgcactgtaaccccaaaaccctctagagggagagttgaaatgttttatcttagctcagctgtggaagcaagctgtggcatctgcgtaaagacttcactttggttacctataggttggcagtcaaaccagtaagggttttcaaaggatgtggctgttcaggttgattgttgggaaagctggcagttgtgtttagatgtgtacacaca

SEQ ID NO: 155279 - DNA, 568 bp, Homo sapiens
gaggctgtctagaggatccctgctatcatcggcaccaactggaaaacagaggggtaatgtatcgctccccctgtagaataccaggtttcaaaacatatggttacgggaaacatctagattctactgataaatgtgatgcctggtgaagtttgacagccacaggtctaaacggacctgggagcagaagtgccaggtccacttagagcccaacactagcttttcaatagtggggcattaactgaaaataagggcacagctcattctctctacacccatgttggttccatcatacttcatatccctattcccagaagtactgctcatgtctcctaggagtttctcttcttcctcacagtaaaatccagcccccatcccacagcctgtaaagccttgtatctgcccttccactctcccagaggatccttcagtgccagatacagtggccctttgtatttttcaaactctccaagtgcttggtactctgctcagaaagcatttttttccaaatttgagcatggcacactccctcacttcctccagatctcagcttacagggcacctcatccca

SEQ ID NO: 155280 - DNA, 920 bp, Homo sapiens
gtttcaccatgttggtcaggctggtctcaaactcctgacctcaagtgattcgcctaccttggcctctcaaagtgcttggattacaggtgagagctataacacctggcctgctaggaaagttctttatttgagaaaaagctatgggatgttattctttctctcccgtcacatggggaagcatgtagtattgattgccacaggtagctatcttatagctctggatgaagaatgaggtggtttctgatgacatagctggatcaaccagttctgatgtcagcccttcctctggatttagtcctggctaatacacctttcaaactcacttactcatctgatctcctgttgtcccatttccttctccctctttgtctctcagcccgtccccttcagattgacattttatttgcagtttggttttctaatttatttttcccagtagatactaacttttcctctatctttttccacattttacacggaggctagcatctcaccattgtcacaatgactgccagttcccaggcctcaacctggaatctcagaagcaactctttttgtacagctgaggggcacctggaacatagaagttaagaagagatctggctgggatcaagaaacctcttttcactgcacctgaggctcagttgtgccctctgctgacactaggtcaggaggctggacagctccaactggaaacttggagcagggttttaagacctctgctttctcactttgaagaattggaatagaaaaatagaaaatacaaaaatgatgagtccttggaattgataggacacgtagacttgagagacttgaacatgttttttgtctgtttgattcccttctctattcccagtgtttcgagcagttctagtccatggtaagtgctcagtaaatatttgtgctgatgagcaagcaaa

SEQ ID NO: 155281 - DNA, 651 bp, Homo sapiens
tcccatgagtgttcacaggagatggtgccatgcatgcacagaagttcccaaaccagcatccaccatatcaaacccggaatctgtgtgagaaggcatgccttcatacttcaggcagtttacaagacagccttagctttcgttttctgcttgctacagagccttaaggtcagccagaagcgagtgactggaaacttcttcattcccatctctctcctggcatctcaccattgtcacaatgactgccagttcccaggcctcaacctggaatctcagaagcaactctttttgtacagctgaggggcacctggaacatagaagttaagaagagatctggctgggatcaagaaacctcttttcactgcacctgaggctcagttgtgccctctgctgacactaggtcaggaggctggacagctccaactggaaacttggagcagggttttaagacctctgctttctcactttgaagaattggaatagaaaaatagaaaatacaaaaatgatgagtccttggaattgataggacacgtagacttgagagacttgaacatgttttttgtctgtttgattcccttctctattcccagtgtttcgagcagttctagtccatggtaagtgctcagtaaatatttgtgctgatgagcaagcaaa

SEQ ID NO: 155282 - DNA, 353 bp, Homo sapiens
agattctctacttcaggtatgcaaaatccaacataacactatacgacctcaggaaaggccaaaagactccctttatgtcagttcatataatacatacaggcatgagaagatataaaagatgtgagatatggcaaggtttctcttcaaatagcctgctcagctacttattctctaattccaggtaccccctgcctttcttctccttttttcttctttctgattttactacatgcccaggcatgccacagccccagctcacattcctttccttatttaggaaaagactggctctctagtcctctgtagatgaccccttcctcctctcccctctctcccatcatgcgcccacctta

SEQ ID NO: 155283 - DNA, 240 bp, Homo sapiens
tgagatgcagcgacttgttggttttggctgcagcgttttcactgagcccactcatcagcctgcaagctacttgaaaggagagtgatgctttagtcattcctatatactcggtgtttagcacagtctttggctcatagaatgaggatcagtaaagaacggatagatgggccgggtgtggtggctcatgtttgtaatctcagcactttgggaggccgaggagggtggatcacctaacattag

SEQ ID NO: 155284 - DNA, 406 bp, Homo sapiens
tttctgtcatatctacctgagacatatttgaggcagttattaacaattttgccccattattttgtctgatttgaatattaagtattaaagggttcattgaccaaatgtccttgaatttgaaattttggggactctattatgagtgataaatttaactgcgagctatatggcaatttgttcctgagatcatttaaaattgtgtgagagcgtgtgtgtgtatttatatttgttcgtttatacttctttgtccatctttgccatatattttgggcataattgaagaataaacacttcttaaggaacaagttataattgtaaataggaattaactgttattttccttctattgtattgcaaagctaaatgatggtggcagataccactatgggatgaaagtaggctttgt

SEQ ID NO: 155285 - DNA, 425 bp, Homo sapiens
ccctgactgtaaataaatcccaaaaatctttagacatcagtcaatgccattacctccaaggccacagaggccaaaggcaagagaggaacaagaggaggacattttttaaagatcttgagatcagatcccaatttagcgtatccctatcaagtgcagaatctgaccccatgcaaacagaaacatctctcttctgctcctacgccccatgttcttgatgggttctatttttatttgcccctacatcatttccagtgagaagggattcccacagacagccataggtaaagggtcaaagagttgattccacccgggacaagggaggctacgatgacttagaccatcagccaattccattcatcagaagactgatgggctaccacacgccctctgcagtttaatgttctaatggaggaattagggggcca

SEQ ID NO: 155286 - DNA, 540 bp, Homo sapiens
ccatggccctacgcatcctgggccaggtctcttgtggtgcttcacgctctcgacctgtgagtggtgcctgctagagctgcccagatcccttttccctaccccttctgaccctggacccagagtggtggttgcgatctgctaccgtgacgtcagccctcattcgttcgttccacaaactccacagctctggtccattagaggaaggaggtcccagaatagctgggaaattacgagaacagcctcactgcacgagttggtgaatgctgtgatggcgattgtatgatggacggtgatgttgaaaccagactggtggaatgaccgccccatccggagaggtgagggtaaactttcgggatgctctgagtccagagatgggtttgaaagatgcaaagttaaccaagcagccaaggtgggagccaggctgttgcctgaatggagacaagcagcgagagtcaaaacccagagtctggccatacttagtatatgctatactaagaaatgtggatttttctccgttggccattggactgcttttgaaga

SEQ ID NO: 155287 - DNA, 518 bp, Homo sapiens
gcggcgcctttttttgtagactaatttgagtcagcatgcacatttgtcacatacttgtattttgaaaaattacacccaatttacataaaaatgttaatgccgcaataatgtaatcattttaaacgtctttaaggaacttttctttttttggcaaacgaagtcagaacaatgcaaattgattacagaccgtggtttttggtttgactttctggagagaaattacacacacacacatttatgcaaatctatgtgtatatgatggtgggcgcagtggctcacatctgtaatcccagcactttgggaggccaaggcaggtggattgcttgaggctacgagttcaacagcagcctggccaacatggcaaaaccccgtttctactaaaaagacaaaagaattagctgagcatggtagcgtgcacctgtagtcccagctacttgggaggctgaggcaggagaatcacttgaacccgggaggcggaggttgcagtgagccaagattgcaccaatgcactccagcct

SEQ ID NO: 155288 - DNA, 498 bp, Homo sapiens
aacgatggtcctcagctgaaacaaacctaaagtcacctgtcatttgttttaatggttaagggtcaggaattgaaagttagacgtaggttttagtttcagctgtgcttctgtgtgattttagttacttaatttctataagcttcagttttcttatgtgtaaaataagtatccattcattcatttgttcattcatccattcaataaatagtaagtacttcccatgtgccaggcctgctcttggtgctgggaagtgagcaacagggaaagcagagaaaaatctccgctgtcatggagcttcaattcatggggaaatggaatgtaaattacaagaagttaaacattttgtgtatcttccacatgtgaatatatatgagatgatgacaattgctacagacaaaatgacacagcattggggtagagacaagattggaatgcgattactatttcaaggggggtagacaggaaaggctactgtaaataggtcatatgtaagctgag

SEQ ID NO: 155289 - DNA, 323 bp, Homo sapiens
ctcagatgaacaccgatcactggatcaggacccactccaatctagtatgacctcatcttaactaattacatcagccaaagaccatctccaagtatggccacacacacagctaccaaggttaggacttgaacatactattttgggggacacatttcaacccacaacacagtcgtcccttaaccttgttcctataagaacaaagagtgcagaacttaaatcattcacttgttaatgtaattattacgttcaatgacaggccaggacacaggctttcccaaggccttctttcttcacagatttccatgcaaaaaaaaaaaaaaaag

SEQ ID NO: 155290 - DNA, 218 bp, Homo sapiens
gcctccagcctcctcccctctacatcacattgctcatccccaccttgacctctgctatgaacaaatggagctttctttttttttagagacagggtctcactctgttgcccaggtggagtacagtggtttgattgtagctcactgcagcctcgaactcctggcctcaatcgatcctcttgcctcagcctctcaagtagctagtagtacaagcacgtgtc

SEQ ID NO: 155291 - DNA, 509 bp, Homo sapiens
aagaggtcagctttatctgctcagcttcatcagctcattgaaggatggggaaggcccaaggagccctgaaggagagatgctcctcagccctgctgcgtgagccctggccttgcgtgctccagccctgcgcagatgcctgcggagtcctggctgcagcctgcttgtctgcgtgagcaccccttaaatgctatgtgtgtggagctctctctaatggctgtggacccttctgccctgaatgagcatgcagacagcacccccacactccttgacctcacttatggcctaaggaggtgctcatcccaccctggttctccccatggcctgacgcatgcagtgaatgccagaggccgcttgtgtgccttctgcctaccctttggactgccctctggggtgggcggcaaattaacactctgattcttctgtctgaacacccaccagtcaaaaggagaaggcagagcccctgaacagcggaagacagagcccacccagctgaagaccaagcacctgag

SEQ ID NO: 155292 - DNA, 383 bp, Homo sapiens
tactgtcccgatagccccctcctttatccgatacccattctgcatcctttggtcactgtcccagcacatggccaggggcaggagggccctctagttgtgctggaaaagtgaatgaaggagtttcccatctgtgcaacaatcagcttggccttgatggcccttgagcttccttctaacattctcccataacatctctccagacccgtctttctggccacaccaccatgctttttcccccagcctgtttctcttcattacacagtaagtgagttggaaatagttaaattaatcattctgccccatggtgcccaaccaagaggactccatctagacccaacccatagactagcatatgttccagaaatctcggacttggagctgca

SEQ ID NO: 155293 - DNA, 232 bp, Homo sapiens
atacaccatggtccccaaagcatactaactcctctggcgtgttatgagaagaacacgtgttctgacctgggtgagaaagtggctgcacagtgtgtactgcagtacagtattgacttcttgtcccccaatacctatcctcccccctttcctttaataacggaacccctatattttagccaggcacctgattgacttgaatgaggactacatttcccagcctcccttgcagcta

SEQ ID NO: 155294 - DNA, 261 bp, Homo sapiens
cgcccacatataagtgaggacacacggtgttttaactttctgtccccaagagtgtcttattcttctctctcaaggcctgtgatctgattcctggtccaaaagaggataaaggtgacaaattggtgggagcagataaaagcaggtgtggtgagtggcagtgagagggcaaagggtaagcacccaatgccgggtagggggaggaccttagccccaccagctcctgagccccaaggctttcacaggacggctcagaggaagggt

SEQ ID NO: 155295 - DNA, 458 bp, Homo sapiens
agaaatatttctggaagagctatgcaactggaatgcttggagagccacccgcatggcaataactcgatctgtcctcattttttagaacagacataaacccgggtttaaaaaaggactcatggctccaaagcagccaaataaataaataaacacaaagaaatctctcagtgacttatggaagccattaatgagaaagttatgtacataataagaacttgatttcctttctctctctctctctgtatttcctgaatctgaacattggcctgccttgctagactggggaagttctcctggataatatcctgcagagtgttttccaacttggttccattctccccatcactttcaggtacaccaatcaggcgtagatctggtctttgcacatagtcccatatttcttcgaggctttgctcatttctttttattctttttttctctaaacttcccttctcgct

SEQ ID NO: 155296 - DNA, 433 bp, Homo sapiens
cctgcctcagcctcccgagtatctgggattacaggcacctgccactgcacctggctaatttttgtatttttagtagagatggagttttgccatgttggccaggttggtctcaaactcctgacctcaagtaatctgcccacctcggcctcccaaagtgccgtgattacaggtgtgagccaccgcgcctggccatgaaacctcttaacaatgggaaaacatacccaactctaaatctaacctcgtgttctcctggagcgcaaaatcaggttgcagagaatcaaagtatacatacagcacagttaaggcacgatttgcggcactgaagggaatggttattgaagcgtcaggagacttgaatgagacatgagtcctctgagaagaagcaggtgtctggaggctgaagctgggtggggaggaagagaggatggtggga

SEQ ID NO: 155297 - DNA, 278 bp, Homo sapiens
caggaagcgcttgctgacacagcgctgatggagccgccggcagaagacgggaactctcatagtgtaggaacagctttgaagttctacgttttaaattcaagaagccaatttgctaacattacccatcatttagttccatctcaatttaacagatggtaaaaccaacaagcagatattaattttttcagtaatgacaattttatgactaaaccttacattgcatgtttacctagatatgattagagatcaacttctgaagtgaacatatcacaacccct

SEQ ID NO: 155298 - DNA, 560 bp, Homo sapiens
ccatttcctcagcttccttctcattatgaaaagagcattatctaacattgaacttgtcctgggcaactgagagtaggagagactcacaaatgccccctgccttcagttttacgcccaagggagagatcccaggtaatgcttgcgtcacaatcagcacacttctcagtggggcaggccactaggccaactaaaacgtggtcccgatatctctgcaaggaccccttgtatctcggagtggtgggagcagagaggtgagccggcagatgggagggcaagacttaacctcagatctgtaaaagtaacaagtcaacaataccttaatcttcactgtaagctactatctactgctatctactgcacataatatttatagtacatctgttcctctttagcttatgaaaaaagattacagagtatctacttaaatggaagaaaaatctacattttaatttatggcaccagaaacaatgtcagttttctttgtcaaaaatagtcagcagagggagctcaacactgctgctgttcgaaatggctttacttatgcacttgtctcatcccag

SEQ ID NO: 155299 - DNA, 284 bp, Homo sapiens
atacttgtctatggatccacaatgcctagctaaataggtagcccacagaacatcctcacatttgcctcaataaatggttgctgaattgacttgagtcaaaggaagcactgaaggccaagaagctgaacgactggccaatgatcatacacagctagaacaagaactcactacaccagcagtcctctctctcctcttccacaccaactccctatattacaaaacatgatcctaatggctcattattttattgtctttcaaaaccaattgttcttcctagaacactg

SEQ ID NO: 155300 - DNA, 235 bp, Homo sapiens
cccttcccaagcttggagccagaaacagccacacagtgaggagaggactgagtggggcgcgtactgagcacggataggaggggaggaagagcgaagacttaggacttggggtcaggccacatcaaggcagggacagaaaatagaccagacgacactgcaacccaccaggggagggggaaacagagcacacagtaaaactgtcacccgctaacaaagccacacgcggagtgggggc

SEQ ID NO: 155301 - DNA, 405 bp, Homo sapiens
cagcttcctctttctttaaccctttctccatgtctctgtctccctcccagcagttctcagccctggctgcacattccagttaccagaggagctccggtaaatataatgcccagactccactccccaaattctgattaaattggcctgagacatgggaatttgtgttttgttaaaaagcacctcagataattctaatgtgcgatcaaggttaagaaggcccctcggccgggcacagtggctcatgcctatgatcccagcactttgggaggccgaggtgggcagatcatctgaagtcaggaggtcgagaccagcctggccaacgtggagaaaccctgtctctactaaaaatacaaaatcagccgggcgtggtggtgcatgcctgtaatcccagctactcaagaggct

SEQ ID NO: 155302 - DNA, 417 bp, Homo sapiens
catgtcattggccttttctcacagtgaacgttggtgctgttaaaagactttgagcagaaagatatgatcagacatttttataaacatcatgtggctgttggggtaagaactggctgtcaagggacatgactagaagcagagagtccagtggggacgcccctgcagtactgcaggcaggaacccacgctggcctggcccatggttgtggtagcagaggtgctgagaaaagcagctggattctggatatgacatgaaggtgtagccaacaagatgcacagcaacactggatgtggaggatgaaagaaaagaaggagtcaggaatgactctgaggtttttggaattagcagcaagacggattaagttgccgtagctgagacagcaaaggattgcaggagaagcagtttaggttggggaga

SEQ ID NO: 155303 - DNA, 243 bp, Homo sapiens
ggcaggaaaaccaaatgtctggcctaatgagttaggttgattgatggacagtttcaactgattggttacttgacatgaggtaggctaaatgcagatagtctatctctcggcagtcatgctagaagctgtggctagagattttcagggtacaatgcagatccacaattatttaggcaattttttttaagtttacatttttatttctcctccatttgaatttcttctctgtttcttagtactcct

SEQ ID NO: 155304 - DNA, 158 bp, Homo sapiens
cttcatagataatctcccattgtacattcaagtttataagttacctgcattcaattctaggaacctgcataaaaagccaacctagttttatttttccttagtgatgattttaagcatcaaagggtttcccaagtaaaaatgagtacagcaaaaagaat

SEQ ID NO: 155305 - DNA, 387 bp, Homo sapiens
ctcgtcggagctgtactagctggatcaggcgcacgatctcactcactgcaacctctgcctcctgggttccagtgattgttgtgccctagcttccctagtagctgggattatgcgtgtgcaccaccacacctggctagtttttgtatttttagtagagacagggtttcaccactattggccaggctgatactgaactcctggacctcaagatgatactgcaccgcctccgggctcccagaagtgtgggttacatcacagaattttattttctcacagttctggaggttggaagtccaagatcaagctgctggcaggtttgatctttcctcttgcctccttggcttgcagatggtcacctttctttctcattgtatcttcatttggcct

SEQ ID NO: 155306 - DNA, 226 bp, Homo sapiens
ttagcaggtttgtgatgttcataccttcactggcaattcacaagcaatctgatgtctagtgatcacagatcaaaatggataggaatcaatgcatggcacaacagaattaaaataatgtttttcaattgtgaggcacttagaagaaatggattttaatatctatcaattccacatgtaaatcaaatgaatcctgaaactagcttctccaaatcgaattcaaaggaaa

SEQ ID NO: 155307 - DNA, 292 bp, Homo sapiens
aaaatgaaagaaatgtgcaaaataaagcagtttaaatggaaacagaaaagcaaagccatgacatgaggaggaggaggaacaaaatatgtgaaccacaaggaccaatctggttataatgattgagtgtgaaatttcacttcctggcagccagactcagagcctttgcagacttaaagtgacccgtgtattctctcttgagctctgggtgaagtaccaaaggagagaaaatgaattccttttcttttccttgacccgggtcttgccttggaaccaatgtttttcctcatatctg

SEQ ID NO: 155308 - DNA, 694 bp, Homo sapiens
acaaagaaacaaaaaccggcacatgcggttactgtgggctccagttcagacagcaccaccactagagcgtgtggcacgccgggggtcccgcagcatcctgtgagcatttccgcggggaagctgagctggttctgtgcgaagggtattcctggtgctgaataaagggtgttgctgtcaaggctgacaatttatatctgtgtgaggctggattttctttgcctactccaaccaaagcgacacatcacagcagactggatgcagaagcgtgcgtgggaatgcagctgttttccatggaaccagacgctacagagactgcaacgtgtaaaacactgccattcttttcattcctttgaataatttttttaaaatttgctatttaacacgtaatagttttttattttaaaatgaattaatactttttcgttttgagatggtgtttcgctctgttgcccaggctggagtgcaatgacgcaatctcagctcactgcaacctccacctcccagtttcaagtgattctcctgcctcagcctcccaagtagctgggattacaggcatgcgccaccatgcccgactaattttgtattttcagtagagacagggtttcatcatgttggtcaggctggtctcaaactcctgacctcaggtgatccacctgcctcggcatcccaaagtgctgggattacaggcatgagc

SEQ ID NO: 155309 - DNA, 388 bp, Homo sapiens
tcctcctgccttggcctcccaaagtactgggattataggcatgacccaccacacctggcctgactggtgcattttcttgtatgttaactatacctcaatttttaaaaatgtttttcgttttgagatggtgtttcgctctgttgcccaggctggagtgcaatgacgcaatctcagctcactgcaacctccacctcccagtttcaagtgattctcctgcctcagcctcccaagtagctgggattacaggcatgcgccaccatgcccgactaattttgtattttcagtagagacagggtttcatcatgttggtcaggctggtctcaaactcctgacctcaggtgatccacctgcctcggcatcccaaagtgctgggattacaggcatgagc

SEQ ID NO: 155310 - DNA, 396 bp, Homo sapiens
ctacgtgcaagtctcattgcagcttgagcctaggagatccaagctgcagtgagctgtgattgcacttctgtactccagcctgggtaacatggtgggattacaggcgcgagccaccgtgcccggccttatgtggtctttctggttggtaaatattctaacacacacaaattaatcattagatcaaaagaattgtgttttggtacgtagttaaggtgctcttttcttttaaatatacactccttgctgttcttcctgttccctttgcagagcaaaagtatcggaaaaaaacaagtgcaagcacttccttctaatattggtttagttgtggtcaaaaacaggaattatgagtcatgaacaccaaattgacaggaatgagctatgcgaattacatcctaa

SEQ ID NO: 155311 - DNA, 328 bp, Homo sapiens
gaagtacgtacttcccttctgttgctgatattgtcatgagcagttccaccctcagtgtttacctctatgctttgaaatcttctctcaaacgcatattcattcctattttttgtaccctttgggattcctcaatctcatatacatctttccatttctgacctaatcccagcactttgggaggctgagccgagcatagtggggtgtgcctatagtcccagctactcaggaggctgaggtgggaagatcacctgagcccgggagctggaggtttcagtgagctcagatgtgccactgcattccagcctgggctacagagcgaggccctgtc

SEQ ID NO: 155312 - DNA, 363 bp, Homo sapiens
tatacggccggtccgtgtgtcgagtagcatgtcattgctctactcagaaccttccgctggcttttcatcaccctcagaagaaactccatgtccttaccgtggccggcacagcccacacggctggatccaggttacctctcagacctcatcttctgctatgcttccctgcagggttctgcttgttagccaccctgatctctgccagtgtctcagcagtgcctagtgtgatcctgtaacagagcctttgccttggatattccttctctcaggagctctcctctccctcatagccacataatttgcctctttacttttcaggcctgtgctcaagttttcccacattagaaaagtcttctccatctc

SEQ ID NO: 155313 - DNA, 534 bp, Homo sapiens
  misc_feature (278)..(278): n is a, c, g, or t
agtgaagtcttctccagaactcagaagggccataaatagagagacaaagggcaggaggtgggagttattcaccagcgtggaggaagcaggataagcccagaggaatggcctctggaattatacaaagaatttggaggtgactgggggtggccctgggaacaaagtgaaactgtcagaactcagataacagtccacgttcctgagattggattgtagcagcccttctggaaaaggagcacttcttgggactttatacaaatccagctccatccaaaatngctgcaaaaaaaaaaaaaccacaaacattatttggtcctttttaatggctaagtcatattccagggtgtagagataccacattttatttatccactcacgggtggaggggtgggttccacatcttggcaatggtgactggtacggccatcaagtgtctttcgggtataacgacttcttttccttggggtagatacccaggagtgggattgctagatcaaatggttcttaacattttctctctggatctattgctgg

SEQ ID NO: 155314 - DNA, 426 bp, Homo sapiens
ctcggagtcagtatgaaagagaacaggccttccaataagtctttactggatgagtgaatgaatgaaatggccacccggggcattgctaaattaagtaccttgagcttagtcatcctaaccatagtccccccaggcattatctgtgtggccataagccattttcttagccactctcttcttcagtaaaggcaagtagagtgtaatgaagaatactgtgagaggacaattaccttagaaggcattatcagactaatgttttactgagtgcatagagtacatatctataggttaatatgcctttactatgcaatgcatccagaaatttcaaagtcaagaagattctaggaggctgaattccacctttagaaatctcagctatgaaagctctgggtttcaacttgatataactcttcactggccagaaaa

SEQ ID NO: 155315 - DNA, 669 bp, Homo sapiens
gcatagactgtgccagaagaaactgacctaaaagaaacaagcagatcaattctgcattattctcacctaaaggctagccacatgatgggctttgaagctaatttatatcttcagacctttaaaaagaaaaaaatccaacctgggaaatagtcccaaaggaattgatgcctaagtcttcctgggaatcaactaataaaaagctggctcagattaaattaaaaaatgggccccaactgcattgtcttctggttatcaaacatcttctaggtttagaaacagaagaccagtggctggtcactagctttcacttgtggaatgaacacaactatccgggccatttatacccaatagaagagttaagttgagatgctgaatgaatatggggtccctgactttaagcttcatacctagaaccaccacattttgcaatcagcagaggcccaagaaataactttttcccataaaaatctccaagctgacttcaaattgtcttttgttcttatgagtttctacatttccatggagatgaataagacagcaagctaaatatgggcgtatagaaaaaagactaacatattgatctcatatttaacttgagtgcctctttcatactcatcaaaaactgtgcaaaagaccaacaatacaaattgaggcacctaagtctcacag

SEQ ID NO: 155316 - DNA, 673 bp, Homo sapiens
ctctggatgcaagtgtcttacccaagttcattcatcaataatttttgagttataccaagcaatttgcctgcagagattcaatgttgcttaaattaccatgttgcctcaattcttaggaagacttctttttaattgagaggtcttcttgctcctttatgtcagaaggaatggtcacattgctgactttttcttgtttatggactgatgactcatttatgagttatctaaacgtcttgttccttctttctctcttctgccgtctctatcatgggactattttctttctgctagcacttctactagagattgtgaaagggtggtgacagtgaattaactccttgttagcagccttgtctcttgagaggaggctcacccactgctgctgactgataagatgatgacaatctctgcttcctaaaaaatcttctctactattaagttggtgcataagtcattgcagtttttgccattactttgccttccagattgcctcttgcttctctctgctctacttgctccttctctgctggatcctcttcctgggtaaacccttaaatgtgttacattctttaggatctgtccttgtctgtctttgattctgcctgctcttctcggtgatcgcagacactcttgtgtcctcagttaccatctatctgacacttgcatcctaaat

SEQ ID NO: 155317 - DNA, 328 bp, Homo sapiens
gaattcaaattaggacatcactttttgtagatagaactcatgctagctttgtttttcattgttaagctcctccagtaagaagtaaaacaacagcttatccaagcagcttaatgagcattgtgggttttatctttgcaaagattagagcaaggacgttcaagcttaatagcctcaataacagttcctaacttttttctatctgagatcctgaaacaggaaagatgagattttttaaagagctagtatgctatatgtaaagaaaaaattaacttgttacttatatataattataagtacttattgggaggaggctatgaagaggtgattt

SEQ ID NO: 155318 - DNA, 325 bp, Homo sapiens
ccaagactccagggaggaacaagaccaagtccctgtcccatggagcacatatactgtattaatagttcaatataaggactagattgcttttctttcctccctcctccctctctcctttgtattcctcactttctttttttcttttttctttctttcttttgtttttgttttttttttagatggcgtctcgctgtgtcacccaggctggagtgaagtggcgtagtcttggcttactgcaacctctgcctcctgggttcctatttttagtagagatggggttttatcatgttggccaggatggtctcgatctcctgaccctgtgagc

SEQ ID NO: 155319 - DNA, 608 bp, Homo sapiens
aaccagagacttgaataccatcaaaattctcgtctccttgtctgtttttctctgcatgttgacttcattctcctgttgcagattggcttcttccacatggtgagggatatgactgttggcggctctgggctcacatcttctcagctttgccatcagagaggaaagagctttctcccagctccagttgagaaaatcccagggaaggacattttgcccactcttgagccaatcactatggccaggtggggtgggggtattgggactggcccagcttaagcctggtctccacccctaggaaattactgtggttggggtgggcagagagtgaggggtattctgtgatcagtgcctccacttgatgctgagtatgtggggtggcaatgggcagttttcccccaacagaggagagatttatattccttaagacggggagaagagtcctaggcattcagagcacttggagtccactccatgcactatttgagcctttgttccatctctccattacccattctgtactgttgtaagtgtaatcctcctaaaatgttacttttttgattaggctgcaccctagtgcagtgagtgattctccagcttcagtgccagag

SEQ ID NO: 155320 - DNA, 396 bp, Homo sapiens
actctctgaccgccccacatagccccttttccagaaccttcgggatatcctgccttcccccaccaggtggggccctgaaggactgacgtgggggacgtcacgaaaggaccaccttgtaccaggcacccgctttgtacggcgggaaaaccagcgagtccagaagcctgagtctcttctgcaaatccactccccctgctgagtcctgggatctcagtcaaggggcgaattcctgatgccccctgccaccctcttccctctccaaaccctgaaatctgtccaaatggggggtgtctggaggcgtggcttggaggcagtttaagcaacagctaaaacggttgccaattactttttaaaaccattaatttaattctccccgaaagtgaaggggaagatggg

SEQ ID NO: 155321 - DNA, 470 bp, Homo sapiens
tcaaggagacactgctgagaaagctgttttaagtgaaatgtctttgacttgtggatggatcttaaaatattattttgtgtaacagcacaacttttctgtggggcaagggctcggttactagccaaaatgtatattaatagatttttaaaaatacaatgtaagcttcatggagacaggtcccttatctgtcttgttcatcaatgcactacttattacagttcctgacacatggtaatagtaatcagtaataactaatatttgagtaacaataaagacataagtgctttatgcccatttaactcacttaatatttacatcaccccagaaatgtttggtgaatgaattagtactttttacaggatgataattagtcagttcctcaataatgtaacatatgggttcctaaaaaccaccaaactatgtaaaattgtgcaattaacaccatagaactcataggaaaaatgaggtta

SEQ ID NO: 155322 - DNA, 234 bp, Homo sapiens
tcaaacccaggtctgcctgtaagcaaaaccctttgtcctttccatagcatgagggcttaaatgacttgatgtatgttcctcgtgaaggaaataccatactttaaaaatgaaatcatatttctagtattttttgatgtctgtaaaggtaataagcattataaatctttttgagaaaatgcttatttgctgtatgcatatacttactctcttttgcttccccccgcccacgacccc

SEQ ID NO: 155323 - DNA, 644 bp, Homo sapiens
caattccctaggggtacatgggccaaaaagagagaccgactcagccaagaaccagaaatatcctcaccgcagcaaacaagctagtgatggaaaagaggaaaattttcccttcaaggtctggacatttctcaaagacagcccactcagcttatataagccgcatgcaccactaaaggaacacaaccaaggccccatgaatctagaacaatcttgccaattacgtgttaattgaaagttatgtagaggccatccacatgcccttggggaaacttgacactgtacttattgaattgtctgttctggatcactgacctgggcaaaggggctcaggcaacactcaaaggacagtggcaaagtcattccacattccatgggtatcagttcagagtttccacccttttttgaacctttcctccaaataaataggcagtgatggtgtttagggacattctgggcttccttgtattcattagttcatgttttcatatatttatgtacttgtaaattgacaaatcttgtcttgaatatacatttgctaagtatcacctctgtttcaggttaatgccaggtgctgggaacatcaaagtgggttagatacagtggggtgctggtaagtgatggccaactggcttgctatgtgtcgg

SEQ ID NO: 155324 - DNA, 707 bp, Homo sapiens
gacagaggagactgtgcaacagcataaataactgtgaccaatcctggggactacatggctgaaaattgggttggagaggggtggaatggaagagaggactctagaaagataaatagaatctgagccatgaaagactttgaatggtcagagctgggctataaggaataatctggaaacagtgcaagctagattttagtgaggagagaattatgtccgaaggatataatgaagcttaaactaaggagaaggacctagaaactgaatacagaggaagagattatggaagtataatagaattgcccagtgggaggaggaatcattcttgatggtaaaggaaaggatgttgatgcctttagaaggaatacagctgtccaaagcactggctctcaaacttctttaggcttcggagtcacctagagggtgtgagaaaacggattacttggccccatcccccgaatttctgattgaggtacacagacaagtggagggagaacaagtcaacaaggaggtttactgagtgttagagagctcagaggagactgacagtgggtagctcttctctgtagggaggtcatcccgttgagtgttcagctctcagcagaggggaggccctggagagtgtggctcctctctgtacctggtcctcccaacctctgctcagctctggctgagactggggcttttatgggcctcagagtggaggaagt

SEQ ID NO: 155325 - DNA, 517 bp, Homo sapiens
gacagaggagactgtgcaacagcataaataactgtgaccaatcctggggactacatggctgaaaattgggttggagaggggtggaatggaagagaggactctagaaagataaatagaatctgagccatgaaagactttgaatggtcagagctgggctataaggaataatctggaaacagtgcaagctagattttagtgaggagagaattatgtccgaaggatataatgaagcttaaactaaggagaaggacctagaaactgaatacagaggaagagattatggaagtataatagaattgcccagtgggaggaggaatcattcttgatggtaaaggaaaggatgttgatgcctttagaaggaatacagctgtccaaagcactggctctcaaacttctttaggcttcggagtcacctagagggtgtgagaaaacggattacttggccccatcccccgaatttctgattgagtagatttagggtagagcagataatttgcatttctaactagttccccgg

SEQ ID NO: 155326 - DNA, 709 bp, Homo sapiens
acaaacaaacaaaaccacacacacaaaaaaacaaaactcccatgtcttgatcttaatgattgtgagcaaggatggtaaaaagctctgctggctgacccctaagaccttgaatggtaagctacaatacagatatcacagtcccttacagattgttcgaaaactcgttggatcataattaacattgttagaactctcatacattacatctgatcctaaaacaatactatgtgataggtagtattgcccaagttacagtgatgaggttgaggtttaaaggttacatgacttgtttagggtcataatactgaatctgaacccagatctgccttgaatatattattcttcccaagttaccacacattgaagaagacagtgttcatccttttcctacacccactgcttagaaattttgtcgtgggctgggcgcagtagcttcacacctgtatcccagcactttgagaggccgaggtgggcagatcacatggtcagaggtttgagaccagcctggccaatatgttgaaactttgactctactaaaaatacaaaaattggctggacgtggtggcatgcgcctgtggtcccagctacttgggaggctgaaccagaagaatcgcttgaacccgggaggcagaggttgcagtgagctgagatcatgccgctgtgctccagcctgggcaacacagcgagtctctgtcttccaaaagaaaaa

SEQ ID NO: 155327 - DNA, 327 bp, Homo sapiens
gcttcccctgtggttagattcaagggcctctgtccccaccccatctgtgctgaagatcccttattcacacaatagagctgccctgcctgggggtggaaaaatgtgaggctgggcctgagaacttgtgggaaagtggaaaccgtgttttacccaagcaagtcccagcagtgaggttggataggcttaacacccagtcctgtgctcgtagtgtacgcctgagcctgtggaactctgtgcccttctgggtgcacccctgagcctgtggaactctgtgcccttctgggtgtacccctgagcctgtggaactctgtgcccttctgggtgcac

SEQ ID NO: 155328 - DNA, 498 bp, Homo sapiens
tgctgggattataggcatgagccatggcacccagcgaaaaatatgttttgataaaattggataacattttgataaaatttgccaaaatgcttaccaaaaatgacttatcaagtcatgctgtagctaacagcaaatgagaatgccaatttattcataaactcattagcatttggttttctgaatctccttatactttgccaacctgatatgcaacaaaagttagctaattgttttaattatggttcttgaaattgttagtaatactgagcacctttcctatgcatattggccatttgtattttttcttctatcataggcttgtttgtattatttgcacatttttccttttttgtttttcgtttctttctttgttttgagatagtcttgctctgctgctcatgctggggtgcagtggtgagctcacagctcaccacagcctcgaactcctaggctcatgcaatcctcccacctcaggttagcgctggcctacagcacatg

SEQ ID NO: 155329 - DNA, 324 bp, Homo sapiens
tgtgacacctaatgggtatagggtttcctttgggggtgataaaatgttctaaaaattaaattgagataatagttgtacaactctgtcgataaattaaaaactatcataaagcttttaaatggtgaattgtatggcaggtaaactatatctcaataaaactatttttaaaaaagaacatggaggctcagacccgagggaaatggagcaggaggaatgtcctgtgatttctagtaaaatgttcaactataccacacagatttgctctgttgtccaggctggagtacagtggggcgattacggctcactggagcctcaacctcccaa

SEQ ID NO: 155330 - DNA, 169 bp, Homo sapiens
actgcaaccgccctgaccctcctctcggccatagcccctctctccatctgctctgccctaccctaccctagacattaggtcctgttccccatggcttcttttccggccccagaggtcctggctcccttccccctccctccttccctgcccctctggtcagtccctgcct

SEQ ID NO: 155331 - DNA, 441 bp, Homo sapiens
tgtactgttaccccattttacaggtaaggaattttccccaagtctcaaggctagtaagtgcaggcttatcattcaaactgctcactcccaatctcctgttctctctactctgcactaaccacacttctccctgaatgttcacgtgtatattacaagaatgaacagaatcaggctaggcatggtgactcacacctgtaatcccagcactttgggaggctgaggcaggagaattgcttgaaccccagaggcagaggttgcagtaagcggagatcatgccactgcactccagcctgagcgacaggcgcgactccatctcaaaaaaaaaagggtttttcttctatgggtgataaaattatttaaatactttaattggccacttgtaatttagtaaaatatgttaatacttacatttaagtacaaatgaattctaagtaatcagta

SEQ ID NO: 155332 - DNA, 415 bp, Homo sapiens
cgccaccacacctgactgttttgtagagagagggttttgccatgttgcccagggtggtctcgaactcctgggctcaagcaatcctcctacctcagcttcacaaagtgctgagattacaagcacgagccaccacgactggccctaatgcctatatttttatgggtgaaaatattataataactagatagtctgaaaatgatacccatatggggttgaaagactctgaagacgctcactgacatccacaagggggcagtatgtcacactgaagaagctgcagtgtgtgtcacccaaaatcagtttcattccagtcatttgaccccgtgtcaagttgacttccctttacaccagcttctctgtacttatgtattcagtacaacaaaggggatttttaaaaactgtgttcttgatcttc

SEQ ID NO: 155333 - DNA, 190 bp, Homo sapiens
tttaacaacaacaacaacaaaaacaacaacaaaaaagcagcctcaaagtgaaatgtactgccactatggctttttatcaaactccacctctgaatgttgatttcagtcctgaccgatctcttctgaatctcactcactgaatgtgctttctctcacctgtgaagtgcctgctaccacaatgtctgcctaa

SEQ ID NO: 155334 - DNA, 292 bp, Homo sapiens
cggggccaggctctggagggaggggctttggttcttttgtccgtgttcacgtctgagcgtggccttggtgcgggtcctgtggatggtcaacagttggtcgggacccagccacagcctggggggaggggaccaaggacactaccgggatcgtttaggggtgtaccacttcctgagatggaggcccagggagggaaggagacacctcaggtggcaggggctcctggggcgtgtggagtgccagatcattctgagggtggagaattcatcagctcggtgagcacccagcagggct

SEQ ID NO: 155335 - DNA, 228 bp, Homo sapiens
tccaaaataatcaactgccaccttttcagcaaaatcttccctgggtactacctaaaatttcaaattccttcccaccaattcttatctccccctttcctgcttattactgtctacatactatgttttgcttatttaatctgtctccctttctagaatgtaattgccacaagagtaggaaatcttttattggcttatcctcagaatctgcaacagtgtgtagcatatagt

SEQ ID NO: 155336 - DNA, 477 bp, Homo sapiens
agccaatcatgtctccatctctataggtctgtcttttctggatactgcatacaaaagggacaatacaacatgtctggcttctttcatttaacatgttttgaaactgacccatttgtagcatgcatcagtattttattcattttattggtgaataatatttatttatccatttacaagttggtggacacttgagtggtttccactttttagttttaatgaataatgatgttatgaacatacaagtctttgaatgttttggacccagctttcatttctcctgggtgtatatttaccactggaattgcagggtcatatggtaaatttatgtttaacttcttatgaaactgtcaaagtattttccaaagtggctatgccattttacattcctaccagcaatgtatgagggttcttgtttctctatatcctcaccaccatttattattgtctgcttttctgattaaggtcattcagtaagtg

SEQ ID NO: 155337 - DNA, 754 bp, Homo sapiens
gtttcaacatacacgcagcaaaaacttacagaactgcaagaaatccgcaattatatttgaatatttccgttaaaaaggccaacgagactacagaaaaattgatgaaagatgtgaagaatttcttcacagaagggaaaacacatggctagtaaacatttctttaaaaaggtaagagagtgttaaaaatttggaaaatgcaaatgaaagccacaatgagacaccattctacacctacacaattggcacacatttaaaagtcgggcagtatccagtgtaggagaggttgttgctcagcagaaatgtgtatacagtgctggtgggagaacagtatggaaacatctactaaaattaaagaagcacatacaccaaaaccgagtaattcacataccattgtataccctgtttctacaatggaccaggagacatatatatccatgaatgcaacagtcagtgaaaaaaaagaagaagaagaaaaaaaaagaaaaccattgaaaacaacccaaatttcctttgttgggacaataaatcaataaactatagcatatttctataatgaaagactgtacaggagtaagactgaactacttctcagatcaatgtgcataaatgtcccaaatataatgagagagaaaaagcaagttgcaaaaaatacacataatacattgccatttatatagtgtcccaaagcatgtaaaattaaataataaattatcacactatacattctcatgtagcaagaccatataagcaaaaa

SEQ ID NO: 155338 - DNA, 598 bp, Homo sapiens
aagaggacccgggttcccttgtctccaatagcgagcttctggttactcatatctgagtttcctaacagggattccagtcttctcatccctcctctattcctaaccgggagttctcgaaccaggaggccatcaaacgtcccaaggattcctctaaacaaacaaatcaccgtttcaccatttcagcttcttcccctccagccaccttcccatcaccctccccaaccatctccaccccagccagggccaacaccattctgactgttgctttgcctgcctctactttacccctggtctttgactccctgatagaaaaagctgaggcccaaggcctctgggctgactgctcttttggcataagtcctccacacccttcccccacaggtatccccaacagggtgtggagaggccgctcttttaccttgaagttctactttgttctactcttgttcctctgctgagacctggttagccttcctggggcctgactctcccattctccagcaccagccctgacctgacctctcctcctccaaaccctgcatggggccctgcaaccaagcacagctgtgtctggtctttgtccagacatcaaatggtc

SEQ ID NO: 155339 - DNA, 308 bp, Homo sapiens
gcccactcccacaagaaagcgccagggtttttccaaggccaatgtgatatttatggcagtgcttatgtatttcttaaactttaacgtgttaaactgcactacaacttttgttagattcctgtcttactgacaaaggttttgagtgtggtgcccctcaccctaccttccaccaaaagccctatcatttctatcatgtgatttacacaacagtgatttttaagcagcacatgctgcgttacagaactgaccctatttcaatagctacatacacaactaacttgtttcattaagctgttagcaccaaagtg

SEQ ID NO: 155340 - DNA, 631 bp, Homo sapiens
tcagcctgaccagacaccagcctcctgtcatgagcggtgctccatctccaccacggtgccccctacaggcaggccccccacacctgagcagagtccacttccagaacagtgctccctctgcagatgacacactctatccaaacccagtaccccaaaatccccaagcagggacagcaaaggcaacgttcagccctgcaggtgccacaaattccagccctgccccacagtacagcctctgaattcaggctctcggctctgcttttaagagttttggagcagtggtttctgcgctcaccctgcctcctcccggaaggaaccctcactcggcagaccttgcactcccgcctcccctcaccagaacatctgctgggcactgagacggacaccatggtcagcctggtgcttgatgaacaaggatgtttccagacctgtgcagctgagggttcgagggtccacacctgaagtctcattaggagccagcagggttaaaggggctgagcgagtgagaggcagactcgccagaggggagggccctgcacacgggaaggagagtggaacagggcccccagatgaggactcaatgaagacgtgggaagcggggtgaggaaagcaagccccacccctccccatg

SEQ ID NO: 155341 - DNA, 445 bp, Homo sapiens
gggagagatgcaaaagccccaagggagaccaggcacgagcttccagctctcctctgcaggtagagagagtcccgcggacagtgctcagttctccctgcaacagcgtgtggtaacgcttacggagcagtggcggcccgggttgtggggaggacatggcgcacccgtgtggctgaactgaggtctgctgactccagcccctccagaggtcgtgctgatactgtatgacccaaagcccccactctaggtcacagcgtcaacatggactctctagagtggcctggggccccaggtaaacaaaggcgctcttatctggcagcacatttcaagaacatagagattctcctggagctggtcaagggccattttctctctttggaatgtgcagatttgaacagcccaggcttgccaagtcactccttcacacataaacatctcccttcagaag

SEQ ID NO: 155342 - DNA, 600 bp, Homo sapiens
aatcccagcactttgggaagccaaggcaggcggatcgcagggtcaggagtttgagaccagcctggccaacatggtgaaaccctgtatctactaaaattacaaaaattagctgggtatggtggtgggcgcctgtaatcccagctactcaggaggctgaggcaggagaattgcttgaacccaggaggtggaggttgcaagatcgtggcactggactccagcctgggcaacagagcagaactctgtctaaacagacagacaaaaaacgcactaagaaaaacattcagcgtgcaagtgacatctcagaggcctaacagatgtgttgctttggaagcagcaaggtgcattcatgtgtgttagatcgtagcccaggtccctccatcaaaatagctcacagctactgcagcccctggcactcacttctttgtacttttccatgagaacaccagcttacctatgcccacacatctgtggccagggtctgccacctgccctggacaacgtaccttttcccggaagcttctgttcctgactgcaccagccaggcgagcgctggccgccctgcacaccctcggagtgccgtccagctggagcagcgcccag

SEQ ID NO: 155343 - DNA, 283 bp, Homo sapiens
gcttttgcaaatcctgcaaactttgatctcctaaaaatggaaataataccaaccttattgtgaaaatgatcaggcaccagttagtaccataaacactatcattaataattacctcaaaattactattacagtgagccaagtcacagagtaacacacttttagatgcaggctgaacacagctagtcttgcttcagtgtgcttgctaaatgagacaattttatcactttttcaggtagatgagttctgaggctcagctgatggagtacagtgcaaataacagcca

SEQ ID NO: 155344 - DNA, 766 bp, Homo sapiens
ataagaaaagcttcattttcagcacctactagcaataagcacttaatatactttgctaatcctcataactctgtaggatcccctctctgaaagagcgcaaattctaaaaaggaagttaagacatgcacctaaagtgttattttaacaacaaatacaagggatgctttgtgaaagaggtagtcttgattgctgggtgaaatgtcagcaggaagaaatatggaagtatacagcaagcagaaacagagggcatgcctcatggtctcaaaccagtccagcaagcagggactatagagtgaggtagcaggaaataaggctggcaagtgctaaggacagagttaagtgggaagagtaataaaatttatattttagaaaaagatgatacccagggggagtgtcacctcttgtgggaagccgcattacacaccctcttctgtgctcccacagcatgctgaaacctctctgacaccgttctccgtggcattgcattgtctcatgtctgattttgtggaaaggcaacagggctctggagtgtgatagacctggctcaaaacctaacttcacccacactagctatgagacctcaggcaagctctgtgctaaatcaagctttcatttctgcatctgtgaaatggatgagatgatctcaaatgagatagtgtattaaatttgtcatgtagtgtgcctgccatgtaagaggcattctaagatttttaggccccttggtccctagttctgagcttcttgaggtcagaggtctgtcatatgc

SEQ ID NO: 155345 - DNA, 382 bp, Homo sapiens
acaaacaaacaaaaaaacaaaaaacaacaaaaaaaccaaaaacctgtgttttttctttgctttaattcaaatttatattcatgccttttggggaatattcattcaataagggagccattacatggttttctacataacaaaacaaacaagtaaaaagcaaacactcaacaataaaactgtactgtacagtaagcaatacccgtttttgtgatgctagctatttactaacttctttggtacaatttagtttctgggaatatattgcagttttcttttttggttcacaagtaatgatcacgtattaaaaatgattaatgttgattaagcaaaagtaagcacttccttcatttccttttttttctatattttgccagttttatta

SEQ ID NO: 155346 - DNA, 196 bp, Homo sapiens
tatcacatgatagcatgcatctatgccaggtttaatgccatcgagcatgaatattcattattataaaccagctggttcttagagtggttgggcaggcctttgcataaagaaagaggaaacaggaaagtagaggaaattgcaagatttgtttgttttgcttcatttaatggaatgaaattgctgtcaaggggttttg

SEQ ID NO: 155347 - DNA, 1025 bp, Homo sapiens
ccatgtgggcatcactggaggaaagtcaagaaccgctgggtgcagtggctcacgcctgtaatcccagcactttgggaggcgaggtgggtggatcacctgagatcatgagttcaagaccagcctggccaacatggtgaaaccccgtctctaccaaaaatacaaaaatcagctgggcgtggtggtgcatgcctgtaatctcagccttccaaagtgctgggattataggcatgagccacctcacctggcctgctttctgtctctccgaagatccagagctgtgttcattccagctggccctgtgacctcatgcaaattattgcccttccattactcctctgtatgagagggaataatcctaccctccttgtagggggttgtttgaatttcactaatggatgcaaagtgtctgacgcacccgaggagctgggcacgtgggaggctggtacgcagggcacaggacataacacagatgcccaggtacggttggcacaggcctagcaaacattttaaagcactcactctgtgccagcttcttagattaagcatcttacatgcattacctactttaatcctcggtgaatgtgagtatcagtttcattttataactgaagaaacgggcactgagacgggaagtcacttttacaggctcacatagatgatagttgatagggctgggagtccatctgagagcctgtcctccctaaacatcatcctgtccccttcctgatgtgaatcaccaagcaagggacaacacaattcatagatccaggacaaggtttatggcacatacttctaaggggtgggacctggtatcatggacacggcattcaagagatagtacatggtatagagtctgtcacaaaacagacatcacatggtgcatgaagcatgacccaggggtaagaggcatgggatgccgctaaagggagacacacaggacaaagcaagaggaacgcagggcctgctacgtggcacagtcacagggtatgtgacactgggcatgacaaactctatgatgcagagac

SEQ ID NO: 155348 - DNA, 718 bp, Homo sapiens
tttcccctctagtcttcattatattgcccttctgcttgttttgtgtttagttttatctttttctagctacttatgatggaagcttaaattattagtttgagatcttcttttctaatataaacacttaaagctatatatgtccctctaagtactgctttagctgtatcccatatattttaataagttgtgtttttgtttttatatagttcgaagtattttctaatttcctttgtgatttcttcttgaccaataggttatttaaaagtatgttgttagtttccttatatttgagaattttctaaatttttttctattgtagattattgtttaattcttctgttatctggggatatatttcccatgattctagctcttttaaattgattgagattgttttgtggactaccatatgaaccctccttgagaatgttgaaaagagtaagtattctgtcgtccttgggtaaagtactcaagaaagatcagtcacgtcaaggtgattgatagtgttttgcaagtattctatgttcctgatgattttttaaatctagttgttctatcagttattgagagtggaatattgaagtctccaactattatttttcagttttatatttctttcaattctgtcatttttgctttatgtattttggggatctgttgttaggtgtatatacatttacaattatgcttttcttagaaattgaccattttatcatat

SEQ ID NO: 155349 - DNA, 217 bp, Homo sapiens
gatccctacaacctctatctgtatcccatgctactctactccatgttttgaccacaaaagctttctttcgcttgcctgaaactatcatgctttttcagacttttgtgtatgctctctcctcactcctttaaataacagatgaagcctattcttcacatttttagcatagtccttactttttctgggaaactaagttagttatttctattatatacag

SEQ ID NO: 155350 - DNA, 482 bp, Homo sapiens
tgttacctttcaaggctgtgtgacccctctgacaaggcacaggtcattggaaccacagaatggtggtttgttttgttttgttgagacagagtctcactctgtcgcccaggctggagtgcagtggcaggatctcgagtcactgcaacctccgcctcctgggttcaagtgattctcatccctcagcctcccaaggagctaggattacaggtgtgcaccgccacacccagctaatttttgtatttttagtagagacggggtttcaccacgttggccaggctggtctcaaactcctcacctcaggtgatccaccgcctgggcctcccaaagtgtcaggattacaggcgtgaaccacagcgcccagcaatatgctatgtttttttgttttatccctagctgttaagtttcctatctttaagtctatgcctcagagagaaagacgaaatataatccaggcaggatttctgacttgcgggggcacctgc

SEQ ID NO: 155351 - DNA, 245 bp, Homo sapiens
ccgaggcaacggaatccacagagagaaagcactgctttaggttatttagcgagctgatggcagaggtggaacagaacctgcctctctgcccagccagggattccataaggtggtgcaaatcaggagaaatagatgacactatttgtggagttcttatgaggtccaggcactacctcagatcttcacatgaactaattcatttaatcctcacaagagccagtgaggaaggggcaattattatcccc

SEQ ID NO: 155352 - DNA, 428 bp, Homo sapiens
tgttgaaagacaaaaacaacccaccaacctagaattatttctgttgttgttgttgtagaactggggctctggctatgttgcccaggctggtcataaactcctggcctcaagtgatcctcctgcctcggcctcccaaagtgctgggattacaggtgagctattgtacccagcccaacatagaattctatttccagttaaattatccttccaaaatgaaggataaataaagactttcttagacaaaaactgagggaattcacatccagctgacttgctctgtaagaaatgttattgagagagggaaaatgataagtaggaaactcagttcttctttttttttttttagttttgttctttcacccaggctggaattaagtggcacaatctcggctcactgcaacctctgccccccaggttcaagccatttt

SEQ ID NO: 155353 - DNA, 268 bp, Homo sapiens
tagctgggattataggcatgtgccaccatgcctggctgattctggatttttagtaaagacgaagtttcttcatgttggtcaggctggtctcgaactcctgacctcaggtgatccgcccgcctcggcctcccaaagtgctgggattacaggcatgagccaccgtgcctggccagctgtttatatatatcttatctcccctctgcagagggttcatctctgagggaagcactaggaaggaatcatagggtctcaggctgggcactaagcc

SEQ ID NO: 155354 - DNA, 167 bp, Homo sapiens
cgccagccagccaactgtgaccacggaaaactctgaagatgataaagaagaggggacgttccacagacagtgaagtcaccgcagtctccagccaaaaacggctccaagcctgtccacagcaaccagcaccctcagtccccagctgtgccgcccacctacccctccgg

SEQ ID NO: 155355 - DNA, 231 bp, Homo sapiens
ggaccattattaaaataataattacaatgacggtaataataatagcagcagctaacacttcatgagtgcttcctatatgccaggcacaattctgaactcctcacatattaagtgttaagcctgctagtgaccctatggtgtaggaatgattatttcccccattttagataaactgaggcatggagagctcagtaacctgcataagatctcatatctagagagaggcagaga

SEQ ID NO: 155356 - DNA, 299 bp, Homo sapiens
caccctgacaggcccgccctcagagctgtcggtgccggtgggggtgtctggccactgcctgtgttttctgggagccccaaggccaaggctgtggcatgcctgttgctgccccaggtgccccacagggttttgtggcgggacaagcactgagctcacggtgggttctggtcccacctccagccacagctcccagtgtggcttgggcactcctcagcctcgccgggccccaggcttcctggtggtggggttgggtgctgaccatctccatgggtgccactgtctggatcccccagccattt

SEQ ID NO: 155357 - DNA, 269 bp, Homo sapiens
tcctcacagtggtcaggtaaggaaggggggtggtatagagtggacccagaatcatttctggaaggggtgacctgggtagtaataggcgtctgctggtctgaggaactggatggcagtggataagctgggcttgttggtgtgagcctgtagtcctagctaattgggaggctaaggcaggcggatcgtgtgagcccacgagtttgaggctacagtgagctatgatagcaccactgcactccagcctgggcaacagagcacgaccctatctc

SEQ ID NO: 155358 - DNA, 393 bp, Homo sapiens
aagtaggctcagctggaaagtatacaacgtctttagaagccccatgctgggtggagggaggagtaagaaatcaagagcaggttgaaatacggaagaataacagctgcaagtgctgaccccagcctggacaaccaaggtgcaatacttgtgggacttagtgagcttagcacagtttagtttagatctagtctggcttagtgataagggattccatgcagaggtacaattcagaacaggattggtgtcctcttcagcaattttggaatctatctcactgtggcaagacttccaacagtgagatcaagtcccagaggagacactgaggacgtaggcaaggctaccagaaactacaggataggctgggtgcggtggctcacgcctgtaatcccagca

SEQ ID NO: 155359 - DNA, 495 bp, Homo sapiens
  misc_feature (17)..(17): n is a, c, g, or t
  misc_feature (19)..(19): n is a, c, g, or t
  misc_feature (22)..(22): n is a, c, g, or t
  misc_feature (28)..(28): n is a, c, g, or t
  misc_feature (36)..(36): n is a, c, g, or t
  misc_feature (38)..(38): n is a, c, g, or t
  misc_feature (40)..(40): n is a, c, g, or t
  misc_feature (45)..(45): n is a, c, g, or t
  misc_feature (49)..(49): n is a, c, g, or t
  misc_feature (58)..(58): n is a, c, g, or t
  misc_feature (91)..(91): n is a, c, g, or t
  misc_feature (115)..(115): n is a, c, g, or t
tcggaccggaaatcgtngncgnggtggncaatctcngnancgtcncttncctcctgcnccatctacggcaggtagctgagccgtggccagnggctgactggttcctgcggttcanatctctgcaaacgtctccttccctcctgccccatctacggcaggtagctgagccgtggcccaggctgtgggattttcggaggaggccttccattttcatctgtcctgttatcaaaccaactgcattacttagtgtctgcttggaagtatctgtccttcgcagtcagcttactcttttggccaaaaggaagctctgctcctagatatggataaggaatttgacagatctccagccctgcccccttaggagaaggccagcccctctgcttcttcccctgtgagtggacgtccttggatgcattagctcaggcgaacttggaagattctgtgggttttgtgtggcctattttgagtctcattgtttggctttaatcagaaaaa

SEQ ID NO: 155360 - DNA, 564 bp, Homo sapiens
aacccgggaggcagaggttgcggtgggctgagatcacaccattgcactccagcctgggcagcaagaacaaaactccatttcaaacaaacaaacaaaataatctgttaagacagtaagaaagaaaggcaaggcagtcctctggttgattgccactcattggcgatatatatattgcactctgtaggggtcatgcacagtgctagtgttagaatttacaaaaataagtagagatagatgtatagatcaatggaataggattcagagtccaaaaattaggtctcacatatatgatcaattaaattttgacaagagtgccaagacaattcaataaaaaaaggcttcttcaacaaattatgctggaacaactggatatccacatatacctaaaactaaatgggatccctattttataccatagacaaaaattaattcaaaagagatcaaagacctaaatgtaagagctaaaaccatgtagaattcttaggaaaaagcaggcataactctttatgaccttggattaggcaatgatttcttagatatgacaccaagagcaccagtaaatat

SEQ ID NO: 155361 - DNA, 301 bp, Homo sapiens
tgacagcagcaataactgatgtttactgagcatttactatatgccaggtaccattcagaaccctttacgtgtattaactcttaatctatacagcaaatcttgtgaattactattactgttcctgttttttttttctttttttttttttcttgagacagagtctcactgtgtcaccaggctggagtgcagtggtgcgatcttggctcactgcaacctctgcctctgggttcaagtgattttactacctcagcctccagagtagctggtaccacaggggtgtggcacacccagcgactttttt

SEQ ID NO: 155362 - DNA, 154 bp, Homo sapiens
gagaatcgcttgaacccaggaggtagaggttgcggtgagccgagatcgcgccactggacttcagcaagactctgtcacgaagaaaagaaaagccagctggggcctgtttggggctcatgcctctaatcctagcactttgtgagactgaggtgag

SEQ ID NO: 155363 - DNA, 689 bp, Homo sapiens
tgcatcttttgagtaagatcatctggcagtagaagctgttctccaggtacatttctctagctcatgtacaaaaacatcctgaaggactttgtcaggtgccttgctaaaagccagatgcgttcggcacttccttggtctgaggttaattgcacacctacaggcactgggctcatgctttcaagtattttgtcctcactttagggtgagtgaaagatccccattataggagcacttgggagagatcatataaaagctgactcttgagtacatgcagtaatggggtagatgtgtgtggtgtgtcttcattcctgcaagggtgcttgttagggagtgtttccaggaggaacaagtctgaaaccaatcatgaaataaatggtaggtgtgaactggaaaactaattcaaaagagagatcgtgatatcagtgtggttgatacaccttggcaatatggaaggctctaatttgcccatatttgaaataataattcagctttttgtaatacaaaataacaaaggattgagaatcatggtgtctaatgtataaaagacccaggaaacataaatatatcaactgcataaatgtaaaatgcatgtgacccaagaaggccccaaagtggcagacaacattgtacccattttcccttccaaaatgtgagcggcgggcctgctgctttcaaggctgtcacacagg

SEQ ID NO: 155364 - DNA, 512 bp, Homo sapiens
tcactcaatatcccataagtcaggaaattctgttggttctaccttcaaattatacccagaatctgacctcttttcaccaactacattgttactaccctgtcagaatcactgtcatctttcacctggaacacagcagttatattcaaactggtctctctccttctacgcttaccctactactccaccctcaagtctattcttaacacagcagtcagaatgatgctcttaaatttaagtcagatcatgtcattccagtcctgatgggaggaaaatgtgatgctgttgcttcttctggccatatggtgtatgagcctgttgtgattgcaatgcaagtagtcctgggttactttttgctgggatgattgggaaacatgggaaattatggatagttatacatataatgtatgatacatttcagcctgctgagagtaaagggagtagtttaactgccgtttgccacaggagctctgtaatttattgtatggtgtgaatcaacaactaattttatcgtt

SEQ ID NO: 155365 - DNA, 558 bp, Homo sapiens
tgcacgtacattatctcacttaattccctccacaagcctgtgaggcacacacttcagtacattttgtagatgaagagactgaggcacagagaggttaagcgatttacccaagtttgcacaagttaacacatggtgatgctggaattcaaatccacagtttgatttcagagtctgtgatcttatctccctgcatagggcatgcactaaatgaaggtacaaacgacgtagctatgtatgggaaaacaaaggcacaattacttttcactgaggggatcagtaaaggcttcatggaggaagaagtgctggtcccttctattaccttttgacctaatctctccagatgcctggaaaggatgacaaatagcacatagccacaaaacttgaacagagtaaattcacattgttacatgatactgttaagttagaaatacattcattttgctagtttagaaaaaaaatttttttttttttttgagacagagtcttgctctgttgcccaggctagagtgcagtggtccagtctcggctcactgcaacctccacctcccgggttcaggt

SEQ ID NO: 155366 - DNA, 353 bp, Homo sapiens
acctggggcctggcaaccccagcactggcttggtggcaccaggaactcactggatggagtctgggtgcccttccccggccccaaatgcacagagtgggtactacctggtcaggaaaacctcccttcttcctggttttcacctgaggtgcctgcccagggtttagggtggtggggaacagtcccagaggaaggaggatacttgattctgaagacttctgaagagacagactcagtgggcacccacatacagaaacccagtccctgaagccctttttatctctgcttgtctgatgtcctaggcaggctcctggctttgtttagttgggccctgaagtgccttggaaactgtgtct

SEQ ID NO: 155367 - DNA, 191 bp, Homo sapiens
cccaaagtgctggggttacaggcttgagcctccatgcctggctctcctctctcctactcagcccatgtggtttacctgagtctatctgaaccctggtcagattatgggacccagaccttgccagtcagaacatgtgagtgcgccctggacacggagactgattcagaggacggagagccaagccaggacac

SEQ ID NO: 155368 - DNA, 319 bp, Homo sapiens
acaccggcccggtatgtatactgtgggggacttggaggactcccaggggctgaggttttctgtgttcctgatcttctctgactgttttactttattcaatgatttaatttcaaatgaactttggaaaagtaagacgtggtcatgactcataattacaaagtgagaaaggtggtgacttcagtgaacattcagtctccctcctacctctgacctccaggcactacgcagttctactggccaggggcaaacactcctgccaatggccatgcatcttcccacagagatttgctgcatttacaaacatgtgtgccacgctttt

SEQ ID NO: 155369 - DNA, 342 bp, Homo sapiens
tatacccaaaaatactcaaaacataaaaagtttggtccataaataaagcaggagaacaactccaatttctattctctgttaacagaaggtttctgtctaacttgttcttttccttatgaagctgtagaaatgagtctggcttgaagaattctatttttaaaaactcttcctatttacatatgctttacttctcaaaagaatgtcaccttcctattaatgcaacacttaacaaaggcaatgtcagaaatgtaccgtggtgggggctttgtttctcatttgccattttttgattggaatctgtgataattcatgtgtcctcattgtgagacaactaaaaattat

SEQ ID NO: 155370 - DNA, 435 bp, Homo sapiens
aaagggcctgggttgtatgagcctcggggtaaaatcggctcctctgagcctggcttgaagcatttgttgcctggcgctgtgatagtgataccagcggcaccctgtggcctccaacatggcccagatttcagtgagccctcggccctcttcttctctgagtcccccacacttcagggcacgggctcaggaggacagcagacaggctgcatctgctccatgagccacaccttccatggatgatttgtggagctactgtcactaatgacccagtggcgtaaaacaacaggaattgcttccctcacagttccagaggccagggtctgaaatcaaggtgttggcagagtcctggtccctccgaaggctctagggcagtggtccccagtcttcttggcaccaggaactggtttcgtggaagacaatgttttccacaaacag

SEQ ID NO: 155371 - DNA, 450 bp, Homo sapiens
ccaggtagacctaacctgactagaaaagctattacctaaaacaatttcacagcaccaaatctccacctccgtcatcacctcaacccaaaaaggcataattaaactttacttcctctctttcttcttcccactcatcctaaccctactcctaatcacataacctattcccccgaacaacgcactacacgttaggtctacctggccaggtagacctaacctgatttccctattgcaaattctaaccatattctcagcctctgtattgaactcccctgctattgcactatttgttccctagcactgagagccttctaagacgctacacaatgtatttatttactatgcttactgagtctctctgtccctaccactccatataagctacacagaaataggggtgtctgttttgttcactattgaatagttaggtctacctgggggtaccgagct

SEQ ID NO: 155372 - DNA, 400 bp, Homo sapiens
ggtgcagtctccatgtgaaatgcccatttcagatccagaaacccccaaaatgtcccaacgtattggaaaggagttctgttaactcaatcctcgggaagataccaaaaggacttttttgctttttgagtcagggtcttgctctgtcgcccaggctggagtgcagtagcacaatcatagttcactgtggcctcaaactcctgggttcaagtgaccctcccgcctcatcctcccaacagagtaaaagaggattactgattcctttaatgttacacaattccagacttagataaatccagtcttacattctgtctatgctttcatctgggcttgacaaatactagagtgaaaacacacacaccccacaaatgctaattctagaaatattttgttatccactttt

SEQ ID NO: 155373 - DNA, 500 bp, Homo sapiens
tttttcccctaagaatgtacgcctggactcctcagagcctcagtttccccaattctctgtctcttcagggtcctttcttttagacctacttgttcctgccccttctccattccctcttctttttaaaaaaaattttaattaaaaaaccaaatacagacggggtcatcttggccaggctggtcttgaactcctgacctcaggcgattcacctgccttggcctcctgaagtgttgggattacaggcacaagctatcatgtgcggccagatgttttagaaagtgtaaagcattatatattatgaattattactgccactcatcctgatccctccaccaacaaccagactgccatcctctgtgatgtccctgttctctcctcagaaagaaattctctgcatgcacctccacgccgaaccccagctgtgccaattcccttcagtcctctgcacgaatccaccatgcattgcctctctctttcgctattccctcagacaccaacca

SEQ ID NO: 155374 - DNA, 479 bp, Homo sapiens
aacacggtctcagctcactgtaacctctgcctccttggtgcaagcgattctcctgcctcagcctcccaagtagctgggaccacaggtgcccgccaccacacccagctaattttttgtatttttagtagagagggggtttcaccatcttggccaggctggtcttgaactcctgacctcaggcgattcacctgccttggcctcctgaagtgttgggattacaggcacaagctatcatgtgcggccagatgttttagaaagtgtaaagcattatatattatgaattattactgccactcatcctgatccctccaccaacaaccagactgccatcctctgtgatgtccctgttctctcctcagaaagaaattctctgcatgcacctccacgccgaaccccagctgtgccaattcccttcagtcctctgcacgaatccaccatgcattgcctctctctttcgctattccctcagacaccaacca

SEQ ID NO: 155375 - DNA, 470 bp, Homo sapiens
ggcttaggcataggcatttgtcatattatagctaatgtatattaatatatattttcctaaatttacaaagtaataatgagaaaacaaataaaatacaaaatttaggatttcttttactttgtcgattttgatttaacagaatctcattctaaagattatgaagactgaccatatcggtaataaatgaacactgatgtattttaatttaaaagacatttggaggttcttacaaatttttttcacttacatttaatcttctaatttttttcacttacatttaatcttctaaattatctttaatttttatgttgtggctctttccttttcaagcttcaattctttctcttaccacctttcttattcttccatgcctgggtcatagaactaaatttacctgttccacaaatgtcattatcagtatgtattttattttaagcaagtccatctcctcagaggattcccttgtatcc

SEQ ID NO: 155376 - DNA, 420 bp, Homo sapiens
attcaacctagtactctaagtcctagccagagcaataaggcaagataaagaaataaagacatccaaataggaatagaagaagtcaagctatcttttttccactggtaatatgatcctatacctagaaaacccttaagactctgccaaaaaactcctagaattcataaatgactttagtaaagtttcagaatataaaataggggtacaaaaattagtagcatttctatacaccaataatgttcaaggtgagagtcaaataaacaacacaactcagggctgggtgcggtggctcacgcctgtaatcccagcactttgggaggctgaggcaggagaattgcttgaatccggaggcagaggttgtggtgagccaagatggcgccactgctctccagcctgtgtgacagagcaagactctgtctc

SEQ ID NO: 155377 - DNA, 252 bp, Homo sapiens
ctaggattacaggcgtgaaccactgcacccggctgtacaagtaacctttatatataaccagtttatgaaagacttaggatataaatagaaccagtttataagggattccttctgattatgaatgaattaaccaatttatgattgacatctataggaagagggataaccaagttaaaataggaagagagagagaatgtgtattcttaactttttatttgaaataacatcctatctgtggaaaagttgtaagaa

SEQ ID NO: 155378 - DNA, 289 bp, Homo sapiens
gggctttagtcgatactagcccaagtatctgcaggtttaatttcagaataaaaagccactgtaacagttcatagctggcccaagctggccgtaacaacactggcacctaggaatacctgagggtattttaaggtgcaggcacttggttcccacccacccagatccagtggctttttattctgaaattaaacctgcagatacttgggctagtatcgactaaagcccattttcatctgaaggaagccatccagctactaacattatattgtgtactgagtattgtataaag

SEQ ID NO: 155379 - DNA, 363 bp, Homo sapiens
ctaatttggaatacagtgtgcaaatcttattttcaagcagactttgaaaataaaactcaattcttacgttagaggattatctgcttaatacaattatagggtaccagtttttgaagtcacatcggggttaaataagattgcaggttcatggggtcatatttgaatgttctgatacttacatatggggtgggaaggaggaatgcatgcttttctcaagttaagacacataaaagagttgtcctggcccaggtgagactcgcctttgtgtagcagctggagcttcattccacaggcagatagggtgcttgtgtcctgatgaagtaagagaatatatctggaaacactttgtgtactgtgaaatac

SEQ ID NO: 155380 - DNA, 547 bp, Homo sapiens
tagagatgggggtcttgctttgtttcacaggctggtcttggactcttggcctcaagtgatcctcctgccatggcctcccaaactactgggattactgccaagagccaccatgcccagccccctaaatttataatataaactcagaatgtaaacaataatcttatttgtccctctgcacaaattgtataaaatgctagtttacttttcatcttctatttcaaatcacagaatatttctgcccatgtttcatgtttcaaaagatctcacatagcctaggctactcacacctgttagcccagaactttcagaggttgaggcagaaggattacttgagcccaggaattcgagaccagcctgggcaacataatgagatcctgtctctataaaaaatacaaaattagccagacacggtggcacacacctgtagtcccagctactcaggactgaggtgggaagactgcctgaacccaggaggtcgaggcagcagtgagccaaaattgcaccactgcaccccagcctgcgcaacagagcaagatcctgtctcaaa

SEQ ID NO: 155381 - DNA, 465 bp, Homo sapiens
  misc_feature (78)..(78): n is a, c, g, or t
tgactctcttttcggactcagcccgcctgcacccaggtgaaataaacagccatgttgctcacacaaagcctgtttggnggtctcttcacacggacgcgcatgaaacacacgactgcacttcaggctgggcgacagagctagattccatctcaaaaaaaataaaataaaaaggagtcacctcccccgagaggcctctggaccaccccatctgagcaggccactcttccttctctatcttaccgtcttgtttctgtcccagtagttagggctacctccagtaatcctatttgtccctttactgtttagtgcgtctcgcttgactagaagctccatgaaagcaagagaccctacctgcctccttcgccactagaccttctgatgctctttccccacccttggaggaggaggaaaggaagaaaatgggccctgagcgatcaccacataccaggccctgggggtctagtg

SEQ ID NO: 155382 - DNA, 230 bp, Homo sapiens
gcagtttaatgttctgactgaagtacagagacaacaatacaatttgattttgttttttaatttaaagctgcctaaacctcaaagttcagtgttacttgctctacattttcctcaggctgatattaaagggactttcctctattcagagagcatggatgagagaatgtttaaaaaaaaaaaaaaagaaagaaaagaaaagaaaaaaaccctgaagagtctggattaagaat

SEQ ID NO: 155383 - DNA, 379 bp, Homo sapiens
ccactgcaagatgtgcagatttctagttgggggtgcaggttgtaagacgcactttctggaatagaccggacagttggctatggagaaggaagaaacgttcttgcacaacctagagaggggctccccctgaggatcagaggcagtgagtggggcgctggaagggtggagtctaagacaccaggcgggacccattaggggacaccttcccctctgagccctcaggtactaggtgcccagaacacataagccaatttcagcatcattctaagagaaatattattagaaaggtgttccccaatatcatccaactcactcaaagctaaacagaagtgggtctggatttcttgcagctttcttttgttgtgatgcactgcacctg

SEQ ID NO: 155384 - DNA, 259 bp, Homo sapiens
catggaagccatttctgtagaataggctagtgtccagttttgtccagttttccttttggagcagtgtctcaggcacagaaatagtctgggcttggtggaccccaccccaaagtgtcacttcttttcctctggccttgctctccatgcccgcctttctcttctgatgttttaatgataccctccctgctcggtgatttgtgttcaggaagctaggcagtgattacttttgtttctgctttgtgaacttcctcccccactt

SEQ ID NO: 155385 - DNA, 432 bp, Homo sapiens
cttataggcttaattaaagtatatgcaaggaaaacatttgtggcaccataataatgtcttgctgtaattttacagcaatttccattcctttttcttgcctccacaaagtttcacagcagtaggatacaatttttgcaacactgaggcggtactaggtaggccttagtgactgggaaaagtgaacccgtctttccgaagggcgagtttgtttgcctactgtcagtgggaggagtgtaaatgaagacctttatccaaagccagcgtctatgaacaaggacagtatgtttggagcctggtcagtgatgagagtgataacgtacatgctctctattcactaagtctttaattgcgctctgttcagacactaaatattggctgtggtcattgcctgcccagtatgcgaaccataagctggggtggaggcgttgagtg

SEQ ID NO: 155386 - DNA, 344 bp, Homo sapiens
cctgagtagctgggattacaggcgtgcaccaccacgcccagctaatttttgcatttttagtagagacagggtttcaccatgttggccaggctggtttcaaactcctgacctcatgatccacccgccttgacataccaaagttctgggattacagccctgagtcaccatgctcggcctctttttttgttgttgttgtttttttaactttgtcttgcctcccctgggagctgaatgattatatagatatacatacacatacacctgctgagaagggagaagtgagggcgaataggaacttgactgggctccctcaccttgagcaatcttctcctcactgctaaaca

SEQ ID NO: 155387 - DNA, 543 bp, Homo sapiens
agaggaaacagttcctaactaatttcatgaggctggcataatcttgataacaagtctgataggtaaagtatgaaaggaaaattgcaggtcactcaattatcactcaaatatctacatgaaaaattctaaacaaaattttagcaaacaaaatccaacaatttgtaaaagtgataatacaccacgaccaaggtggttcaagtcaggaattcaacgttgattttggcgttaaaaaatcaatcatcaggcccagtgaggtggctcactcctgtaatcccagactttctggaggctgaaggaggaaagatccttcaggccagaagtttgagtctgcactgagctgtgactgcatcaccgcactctagcctgggtgccagtttgagaccctgtctccaagaaaaaaaaattaatcagtgtaattcaccacagattaagagttcaaaagagaaaaatcacatgatcatctgaatagaggaaaaagcttttgataaagttcaacatccattcataataaggactctcagcaacttagaagtataaaaacac

SEQ ID NO: 155388 - DNA, 468 bp, Homo sapiens
ccagacaggaaaactgagatggtgtgagcagaaagggctggaaggagttggctttttccaagaaattacagcggaatcttcttccaagaggctgggggcctctgcagacatgatctcattacttaccccccaaatcccccagcttccctacggaccaaggaccaggggtctctgcccagtcctagctccaaggaaactcacacttggcagattttcctaattggagctggccttgaagtttgctcactgataatcaccagaaagtcaccccaacaatgggtgatgccagagtgtcctcaagcttcaagggtccgtaaaaacacttgactcccccaggacaaaaatgactgggggaaacatgcagttcttcaaagagaacggtttcattctgtaccaaagggtgtcttaatttgccttggcaagagaggcagcaccgtgttgtgggtggacagcactcggggggtggac

SEQ ID NO: 155389 - DNA, 333 bp, Homo sapiens
caaattctgccagtgcaatttttgcctaggtagggaggcagattcttggtgcttcctacttcagaatcttctgggaatccattcaccttatagttgtacttattcaacaacattttattaaactcagacagatgtaagaagtgttttgagtgccaaaattacagtgatcaaaaagctgaaaatcttttctcacatagagcttatattgtaatggagagaaacggaaaataaacaagcaaattatctagttggttgaaaggatggggtagaaatttttagacagagtctcgctccatcatctacggctggagtgcactggagccatctcggctc

SEQ ID NO: 155390 - DNA, 261 bp, Homo sapiens
attaggtgctcaggcttccagtggaacattcttcttcctcttgcaccaaagccagcgacctttttcctagggaagcattcttcttctatgtcagtctcctatcattgccattttctggtcccaagacttcttgcatacactatcttctggcatggcatgtatactaaaacttgtacacactctcagatcttaaaatacaacaattatttctctaattagatagttacctattttctatgacttcagtgattgcaaattcca

SEQ ID NO: 155391 - DNA, 221 bp, Homo sapiens
cccaaagtgctgggtttataggcatgagccaccatgcccaactaaatgtaattttatattcctaccaacaacgtaaagggttccagtttctccacatctttaccaaaacttgtttatttgataacagtcattctaatgggtgcgatgtggtaatcttacatttttagtattttcatatataagggataacatagtgctgcccctgtggttattatcacatt

SEQ ID NO: 155392 - DNA, 356 bp, Homo sapiens
tattttagaaggaaagcagatatatagcaattacctctttcaaaaaatatttcgagttttagaagtatagaaatttccttaaaatgtgtaatttataaataaaatcttaccagtaaatgtacagtgttcaaagctgagaatatccaccagaaaatatgttcaaatagcacaaccctaacaaactgttttacaaagaaaagcacataatatagtttgtgtattagtttggaaggaatataatttgtacctctatatcgtggggtctgcattctgaataattcacaatacctaaatggaataccacagaataatatggctaaaaaacagttaatctacactacactttcaaattcaga

SEQ ID NO: 155393 - DNA, 308 bp, Homo sapiens
ccgatgcaggagagtggatgatttgattacagccagtctttaaaattgaagccaacagcctggctgaagaaggctgagcttttacataattgagcaggaaagttcaccgccaagatgggaagtgctccccacagcacttggccggagcctgccctccccagctctgaggccctgcagccctagttgcacaagtgagacatgaaatgtcaaaatgtcaggcacatcaggagagcccaggacagcagctccatcgcgcctctcacccagcacagcatctttggcaccagagggactgtggtccccctggt

SEQ ID NO: 155394 - DNA, 196 bp, Homo sapiens
ggagaagtctcagatggttgggtcagcactgggaggacctcggatgcagtgctgggaagtttgacctttatcctccaggccccgaggctgaaagcttttcagcggagcagtggcagggttgggtggcttttcagtaagatgattctggaagcagcctggagcaatggaggaaccgagacaggaggcaggcagaaga

SEQ ID NO: 155395 - DNA, 412 bp, Homo sapiens
ctgtgcctggccacagtatttcttttatgcacatttgtatggagttaaaactatggttttagcaattgcatcctggctccttcacttaccataagcattttcttacattacccacacagttttcataaccattatgcttaacagatgtgcaatatttcattcaaccgattttactataatttactatttatttctgttagacaaggagattatttcttagacttggattttaatggatttttccattttaataaaaacatctgaaaacagaagtctgcagacaaggtctagtactagtactcttgtgaaaagacttcaggggatcccactaatgcatttctcaagtcatgctcatgttacagagttgcccagtgaaagcctatacctggtctgtaatttcctaagtgtgact

SEQ ID NO: 155396 - DNA, 316 bp, Homo sapiens
aggcaggagaatggcatgaacccgggaggcagagcttgcagtgagccgagatcgcgccactgcactccagcctgggcgacagagcgagactccgtctcaaaaaaagaaaaaagaaacaagaaaaaagaaaaagccgtttttacagtgagatacacgtcttgtcaaagagaaccttccagttctacaagaggctctccaaccccttttctcctcaaatctaaatgttttatttggctaaatgaagacaatcaaaaggctgaaagacgaaacaacatcttcttagtacagacctttttgttataagccatctgaacag

SEQ ID NO: 155397 - DNA, 611 bp, Homo sapiens
agaaccaggaatagaacccacctgctccactgcactctagggctggaaggagatcggggcaaaggaaaggatagagaaccctgatcccatgaaggaacctcctgggaagcccatggcagtggatgaagtgtgatttgcagggctcagatgaaaaaaagaccttcaacaagaccaaattctgagagcttctgacatgaagttcaaggttgtcacctacttatctagtaatcgatagaggccaaacagttcccacactgcacagaccccagctactaaaaggtctcattgtgttactctggaatcatcacctgtgttcagacatcttgtcctgttttctaactctcggtgtcttcttgcagtccagctgtccaagctgcagcaatgagcctcgccatcagctgcctgtctactattccatcacctctattcagaggtgggacttagtcatcaactgaaacagtgactaagcctctggattccccactttcagtgcagcaggaagttgattctaaatttcttgataaaaccccaagtggatgcttacccctggaaaagccaggctgtctactggggagtccccatgggttgacacaactgggtcattcccagag

SEQ ID NO: 155398 - DNA, 536 bp, Homo sapiens
aggacaagcctaattataagttgcacttaaagtgacattccgtagtaaacagaaacttcataaggaaataaacaaccatgttgctttagatatgagtgttcagtgtaaggtgggttagttgtaaggaggacctcactgtgaactaacacgctgtagtgccacaggctacccagtagtagaatataaaagctttgctcacacatctgtgacagacataaaaggcggccgggcacagtggctcatgcctgtaatcccagcactttggggggctgagacgggtggatcacctgaagttaggagttcgagaccagcctgaccaacatggcgaaaacctatctctattaaaaatacaaaattagctgggcatggtggcgcatgcctgtagtcctagctatgcgggaggctgaggcaggagaattgcttgaacccaggaggcagaggttgcggtgagctgagatcgtgccactgcactccagcctgagtgcctacaacaagagcgaaactccatctccaaaaaaaaaaaaaaaaaaaaaaaa

SEQ ID NO: 155399 - DNA, 233 bp, Homo sapiens
ataaataaatatcattggatgaatgaataaaacaccactactgcctatctgctttctaactaaatgaataagaagaaagctatagtcactaaaatgagattttactggtaaaatccttgaaatttccctacttcaacccctttcttttccaagttctttcttttaggaagaacttcctattattttgttttagggtttaagcttggacaaatgttcctgatatgcttgatggg

SEQ ID NO: 155400 - DNA, 338 bp, Homo sapiens
tttttacagactagaaatgcagataggcaagtactctggcaatcatcgtataagatgatgagtgctgcaacaaggaaaagcagaggcatacataacaatgagtgctgcaacaaggaaaagcagaggcatacatagtgatgtgtccgaaagcctgaaggtatgcaagagcagaaacccttcagcaaagataatgaatgtggaccagaaagttttactactaggagacagccagtgtggtaacggggcagggacctaggaacaatggaggtggctctctttcagttcttaattgattcttgagtatgcttaaattctgggtgggaaaataaatagacatg

SEQ ID NO: 155401 - DNA, 167 bp, Homo sapiens
ttagatagatgtatttgacagctgtgtggaggataggttgaggaggataaaaccatttacgaggctgttgaaagtacaaatgacagacagtgaggcaggaacagaggggatacatcagtaaatatttagaaggtaaaatcagcagaacttggtgactggctggatct

SEQ ID NO: 155402 - DNA, 431 bp, Homo sapiens
ctgaaggcatcccaactaatcagctgcacccattccctagtccctgcccgccaaactatccatgaaaactgctaacctctgagccttcaggtagactgacttgatttgatagataactgtcctgcatggcatgaccggactcatgtcagttaactctttctttactgtgacgccgtggtctcagtggattgagtttccctgtacaagaggcggaaggacccatcgggcaatgacattggtgctgccaactgcgtggagaatcacctgcccacctttccactcagccaccttgtgccttgacctttgtcctcatggccctagaaaccatgtccccagaccacagtcaaaggaagaaaaggaaatttatccccgtgtgtcttttttgttgttggtaggggacgcacgtttttcttaaatccctaagggttaag

SEQ ID NO: 155403 - DNA, 679 bp, Homo sapiens
tcaaccaagcccaaaccagctcaatccttgagggccttagttcttacctatctctgcctaacagagaaaaaaaataatattttctggtagatattatctggaccacttaaagatattaagtgaaagaaaaataaccagtttaaaaatcaagcattattgcatatacttgaacatattttattttaaaacatattctagtttaaatgttttaaacatattgaacatattttcaaacatattgaacatattctattttaaaaataaaatagaaaattaagaaaaaataagaaaattatttgacatatattttatatggctgacaaggatttaaaataactgttaatgcaataaaggaaataaaaccatcaacaaaataggtgaaataatggtaaatttcaacagaaattggaatctgtaagaaagaatgaaatgatcacttttgaacttaaaaaattggagagtaaaaatttactgaatgaatgtacaagttttgtcacagtagtacacaggactattgaactcaaaggccagtcaacagaatatattacaagtgaaacaaagagtagatcagaaaaacaaaggcataaatatcaagccccaattaagtccagtgtgtggaactggatcccaggaggacaagaaagagtatgggaaagatgagaggatattatgtgaaccc

SEQ ID NO: 155404 - DNA, 236 bp, Homo sapiens
tgagttcctgatatattttaggatttaagtgcaatgttctccgttaagtatatacagacaatgcagtctgagactgctcaatgatgtctcacacacttctgactctaaaatccagacagggatgccgagttcaaatggagtccaggaaagggatataagctaacagggacagagatgctgaaggattgggacttcctttgtacctgtcccttctctccaggcaaacctgccagaag

SEQ ID NO: 155405 - DNA, 561 bp, Homo sapiens
attttgttatgacaacccaagctgactaggacttataccatagtcaagagaacttgaacagtccacaattaagtggtgagactgtctctggtatgatgcacaatgtatttaactttacaaacagactcattaatctctcaaaagcttaacactgtcaccattttacagacagatccagctaatggttggaggccttccatgcgccatccaataatgcagggagaggcagtgaccatgcccagaacaggattctaaagtcctgcctttcaaatccctgacctagaaaaaaggactactccatttctcacaggaaaatgtgccagtcatggaggcctacatggcacgtctctgcactgctccaggtcaggagggccatctgacactgcacaggcaccactgcagggcaaaaggatgatcaagcatccaaaggccaccgccaccactgactagctgaaaaaccatgaaaaagttatataatttcactggatataaaattaaagcaagattttaatacttaccttgtagggtcactgtgaagatcagaaataaaatacagaagta

SEQ ID NO: 155406 - DNA, 299 bp, Homo sapiens
ctctagagtatccccgcacgctctctctgtggggacagatgtgggagagggtgtgcttggtctgaactggagtttgagggaagaatttctcgagcaagtgtgaatcctgaacatgacctgtttttcaggaaggaaagcagaccacatggaagcagatgaaggaaaaagcagaccacgtgggagccggatgaagggaaggtttctatgaaattgaaacagcctatctgccagtggagaaagttatttcatccttttttgcctgcagtgagaaagggggaaatcagagccacagagagaga

SEQ ID NO: 155407 - DNA, 854 bp, Homo sapiens
tgtgagacaatcagcaagttcaagaagtctttcctgcccctctctctaatgcaaaactgatttgcattcctatgtacctgtttgattcccttcctatgtgcctgtaaagcaactgagcaataatcacacatacaattgtttgtctactatgaaactctcacgtggctgagcagaggccctgtcttttcagtctttgtgccccaagcaccgaacccaacacctagcctatggcaggcattcgttaatgtgaataaatatcaagaaaggatgaagtaatgtctaaggctagttttgagcttgcccaaaaggtataaataaggtaaaaaagatataatgatggtgtaggaggtggtggtttactcacagggatgaaaaagtagaaaaattcagaaataaggtatattcaaatagagcattaactaggagaatgcccaaagtttaagtaaggaaatagcatcaccatgaaagactatttcaatgtgaataaaaatcaggtcataaatttctaagcaataaaaccaaatcagttaactgtgttcattcttaaagcagaggctcttaaccagggttcctttgtccctcagggggacatttggccagtgtctggagacatttctgattgttacagctggggaatactactggcatttagtggacagaggccagggatgctgctaaacagcttacaatgcacaggatagcccccaccaccaaaaattacttggtccaaaatgtcaaaagtgccaaggccgataagccatgtcttagaagaagctggacaaactgtgtgtttgaggaaagcaaagtagagacaggccctttctatgttgcccatgctggttgtgaactcctgg

SEQ ID NO: 155408 - DNA, 887 bp, Homo sapiens
ctgccctaactgtagtcccaatgtcagataggactcaggtctccactgcaaggaccaaaatgttaagttgaagactgaaaatgggaaaatttggaaatgtctttggaacctcaagtacataaaagcctgtaagtgcttcatactcattaacaacataggcatagaaaaaagatatccttattctcaagcatagccttttctaataagttcatgttagatgtcatgaagtttagtgaggagtgaaaatctatgaggaaaaacatgaaccattctactctggcaaaagttcaggacaaacaccataggcctgtataccaaattttaaaccatgttgaataatgtgaaaaaaagcatcacattgcttatgaaaggctttcctgtcgccccttaatacttctgtctcaggctaacatgtttgttaatgagttacagtggtgaagttaaggaaatctgcttcctgtcctagcatgcccattatcccagccatacagatttaataccaggagtcactttaactccatgaagtcattcaacaggtacttgagtatttactatgtgcgtttgtgctagagtagccatttcttaaactttgtggcctcagagaatcccttcacattcttaaagattgagggccccaaatcactttactagtatcttaccatattagaaagtaaaatatttaaatattatagcaacaaatgcatatttttaaaaaaataggtgcattgttttacattttggcaattgtttccctaaatgtctgacttaaatagaagacaactgaattgtttcttttgcattcaattggttacaatgttactagcagttttctataatctcacgtattagtcattaggaaaatatagcttcactgagttatgtcaatc

SEQ ID NO: 155409 - DNA, 317 bp, Homo sapiens
gactttctatcaagacttactgcaatctgttcaaatgttgttttatagttggtcattttgttcacattttagaaataatcatattcagtatgttaaaaatatgtaacttctgttagaactacactgctttgcaggaagctaacactatggttagaattgtttagcaacacatttctttcacttcagggcttgtgggaaagtaaccatatgtgtcatatgtcatgtaattctaagccagagctgagtgctgaaataaattttgagtagggatcattctcagcatttaaaagactgaacttccagataaccttgaattg

SEQ ID NO: 155410 - DNA, 360 bp, Homo sapiens
ctcccaggttcaagcgattctcctgcctcagcctcccgagtagctgggactagaggcacacaccaccatgcctggcttatttttgtatttttagtagagatggggtttcgccatgttggtcaggctggtctcaaactcctgacctcaagtgatccaccagcctcggcctcccaaagtgctagggttacaggcgtgagccaccgtgcccctcctaaagtttcttaaatacacttttaaaagtaaactttaaattttggagtagtttccaatttctggaaaagttgcaaagatagccaagagtgttccctggggccctcacaccatatccccattgttgatgttttatgttaccaaggtacg

SEQ ID NO: 155411 - DNA, 310 bp, Homo sapiens
gcccctccccccttatgggggacctgggcactgtggctggaatgtgggaagcccaactatctgatgcaggctcagaggagcagtcatggctggcgtggggaggtggggtcactgcagtgtctggaatgagggtccgtccccacactgccacatactggatatgtgactcaaggtcacgccacttccttttcccagacctcagtttcctcgttgaaatggggtcgatccttttgagaatcagcgagctggtgaagggagagcctgagatgcatgccagccaggagcctgctcagagccctggtatctcagt

SEQ ID NO: 155412 - DNA, 391 bp, Homo sapiens
attgtatctctatgtcactgtccgtctatgtccatatttatgtctatacgtaagtacactgtataccatgaagcaaatgaaaatataaagcagtcattgctatttttctaagcaatataaaagttaaaacccataaccttgtgtttaagagaaacagaaacttaatccaatatgctcaaagaaggtctggagcaatcagttttggatttctataaacatctcatgtgctgcatttgtctcaacttaagagccaaagttgtcttctgttcccattttcccattcttcttctctcaatttcttggcacttcaaagggactcttttacctttaaacaaattctagctagtttataacgtgatgtattaacctccagtcgaaagagctgctcttg

SEQ ID NO: 155413 - DNA, 194 bp, Homo sapiens
tctgagcacttggagcctcggtgctcaacaacacaggctttggggtagaccgacctgcttcaactccctctgccattgctgggggccttgggagagaaacttcatctccctgagcctcggttcctcatctgtacacagggctaacaacccctgcctagtgggttgatgacaaacatcattatgtaagtccctgg

SEQ ID NO: 155414 - DNA, 521 bp, Homo sapiens
ttttctctctgctcctcagacagggtaattgcaattgctttgtcttcaagtttacttattctttcttctgcctgttcaaatctgccattgaactctctactgaattatattttttataattttcatctctgtactatgtttcccattgatacattgttttcctgatttcctttagttctttgaccatgatttccttcacctctgtgggtatatttaagataaagttttttttaatgcagccaaaagacacatgaaaaaatgctcatcatcactggccatcagagaaatgcaaatcaaaaccacaatgagataccatctcacaccagttagaatggcgatcattaaaatgtcaggaaacaacaggtgctggagaggatgtggagaaataggaacacttttacactgttgctgggactgtaaactagttcaaccattgtggaagtcagtgtggcgattcctcagggatctagaactagaaataccacttgacccagccatcccattactgggtatatacccaa

SEQ ID NO: 155415 - DNA, 382 bp, Homo sapiens
cagggaggagctgatgttctagtttgagggccctacagctggagaactggagaggagctgatgttctagtttgagtgtcttgcagctgcagacccatagaaaagctaatgttcagtttgaaggtcttgcagctgcagacccggagaggagctgatgttctagattttgagggtcctgcagctgaagactcggggaggagctgatgttctagtttgagggtcatgcagctgaagagccagggaggagctgatgttctagcttgagggacctacagctgaagacttggagagaagctgatgttctagtttaagggtgttgcagctgaagactcggggtggagcttatgttgtttgcattgaaagtctttcagctggatgttcag

SEQ ID NO: 155416 - DNA, 288 bp, Homo sapiens
tttgtagaatccaaggtctggtcgggacctgtgagatggctgagaatgacgcctgcatctcacagataagggagctactttatttccttctacttctgttcagccaaaaacctcagtggcactttttggcacttctgggtgtggctgctcatcccctgatccccaaactgtgcctggaatgtgagtgggccgagaagttccttcactggagagcagagtggcagggagcgggcagtgtgcggatgggaatcaaaaggcccgattgtgctttctcaggaaaagcagccg

SEQ ID NO: 155417 - DNA, 391 bp, Homo sapiens
caagatggtcattccaggaggcatctgctacagacatgctttagttctcaccataggttctactgaataatcagaatgcatattcctcacttaaatattgttttcatctgaatgatccccaagatcctaagcacatcccccagtgctgagaggaggaggcgcgggcagaatttcagtatttgttctgagcaactctgatgagaaactcccctctcctgcggctaaggtgctttcctgactgggaagataagatgatgactatccatgaaagtctcctttcccttctctgaaaccccgtgcccctcagagcgggctaagcaagggactgccatacccaggctgccagagaatgtaggctgaaagaggaggctagcttgactcaagaccttgc

SEQ ID NO: 155418 - DNA, 351 bp, Homo sapiens
ctaaggcagagaccagctaaatctattttctgtggcttttcacagtaccaacttttcctatataattccaagtgatgatatggagagaaagtaggaaggtggttgccatctaatatcaagagagttgagaatgaccctcgggatgggagaaggtggtaagatacctaccttcacctaaacaggttgcttcccagagacttaaatgcttcttttatatggtactcatttaaccctcacagcaacacttttttttttgagacaaaatctcactttgtcgcccaggctggagtgcagtggcacaatctcggctcactgcaacccctgcctccagggttcaagcaattcttgtgc

SEQ ID NO: 155419 - DNA, 186 bp, Homo sapiens
atggtggtcgtctagaggatcccgggaatcgtgctggtgctagggaatcgtgcggtggtgggcctttccctaattttcttgaaattttgttttgttttattttggcctttctatcttttgttttattttgttttgctgattttcttttgagtacagagagagatttctatgccgtaagaaaactga

SEQ ID NO: 155420 - DNA, 1268 bp, Homo sapiens
agtttataagaaaaaacatcattcgagggaattgactgtgactttggatctgaacatgaacatagagtgttcttgttcttggactttgggctgaaagacatgagtataaccttccgacctccacttggaaacttagtgctgagatacaggctaaccttgaggacagaaataggaaatgttttggaacttccaattccctagtgacaggatttgtttgcagaaagcagctttggtcagatagcacattcaagattacaggcagacccagaggagtgagatgtggagcttgtcagaatgcatccaaggctggcctgggggttttgagcagatttgcagagagcaggccggtggggaagggaacaggaggcagaaaagtctccggaaaagtgcctctgggaagcagcttgaagggctctgaggacacttggttttcttttgaagggcagagtacacagggaagaactctaagtaaaccctgccctcggcaagcagaggtcagaaggtgctctgtgggcaccgagcagtattcgggatctgcagctagaccaggcctgccatgagaagttgagtttatggtttattattcctcattcccttaacatttttacagtgcattttagagtgcaaggggcttttacatccattatttcctttaacccaggggaagttcactgggtaatacagaaagcctggagctggagttttggtcttaggttcattgtgaccttgggaaagtccctcgatttctgaacttcagtttcttctgaaaatacagttgtgccagctttagctccctcgcagaatagatgatggcatgacatggatgcggaagcatctggtaatgttttgaactgcacagagctgagtgtcctgaccatcaaagccagagctggagtaagtgatcagatgtgtcggggaggagaggggtgccaatcacagactgcagagctggctcagatgtggactgcctaggaatggaaatctttggctgtacagtctggcattaaacctggggactgttatgtgccaggcaccgtgtgcaaatcactgcaaaatccccttcagctacatgcatggacatgttaactcttaacacatgtacctaacaattcacaatttcatctcccagaaggtggaagatgcattgaggagcattgctaatttgcactcaaatctgacaaatgaggaattgtctggaaaagtagaaatgatagcagagggtgagaataaaaacatgattttaggattggggaagggaaatgagagac

SEQ ID NO: 155421 - DNA, 396 bp, Homo sapiens
atgtaccagaggccccccagtaaccactgtgcagagctgagtacaattgagggttaattctgtccttggaaaagtagttcagtttgtttcagccagtccagtcaatttgagaccctttctagggcttatattctctgatttttttgtgtgtggatgtcagactggggtttggatttctgtctgtcagcagttccatatctcagcaaacaatcccactgaaagaagtttatctgtgtggaaaatgtccctttcatttaggcatttatcagacaggggtttgtttttgctttccccaatgcagttctgtgactcgggtagatggtgggagggcccaggcaggtgaagaaccagctcatggtcgttgtcgttgtgttgcattggtgacatgacgggtgg

SEQ ID NO: 155422 - DNA, 793 bp, Homo sapiens
cccctctggactcttgaggcctgggagctgatggatctcactgcctaatggtatcaggctgtggtgctgcagacagatgcagggaggccaggcaggccaggtgccaacagctccccatgaagggctggtttctccggatgaagtcagtaccagagccactggcactgtgctggtggccctgcagcagggcctgaggcctgggcatgcggaagattctggagtcccgcgcttagcactctttgatgtcagggagccccagcattggcaagtgcctcttcctttcccgcgtgccaggaaccagtctaaggccgactccagtttccaccggtggcacccctgccttgtctcctgtgccggctgtcatctgaccagcgtccgtttcagacctgcctgccacctcctgcagaggccaggagcccctctacgctgctggtgcttcacatttggccagttctaagtggacattcttttttcttgagacagtctcactctgtcgcccaggctgaagtgcagtggtgtgatcttggctcactgcaaccgacacctcccgggttcaagcaattctcatgcctcaccctcccaagtagctgggattacgggtgcatgccaccacacccagctatttttgtatttttaatagagacagggtttctttcttttcttttctttctttttttttttttgagacagagttttgctcttgttgcgcaggctggagcgcaatggtgcaatcttagctcactgcagcctccacctcctgggttcaagcgattcaacctcccgagtagctggg

SEQ ID NO: 155423 - DNA, 288 bp, Homo sapiens
ggatggctgggtcaaatggtatttctagttctagatccctgaggaatcgccacactgacttccacaatggttgaactagtttacagtcccaccaacagtgtaaaagtgttcctatttctctgcatcctctccagcacctgttgtttccagactttttaatgattgccattctaaaagaacctagactcttaatgttaacttttaacacaccttcagatgatctcctgggtgcctggtaactttctaagccatttctgtccttgcaagagccctgtctatctgattttg

SEQ ID NO: 155424 - DNA, 366 bp, Homo sapiens
cgtggcctcagctactcgggcggctgaggaaggaggattgcttgagcctaggaggtcaaggctgcaatgagccgtgattgcaccactgcactccagcctaggcaaccaagtgagaccctgtttcaaaacaaaatttttttaaaaaaagaaaagcaaagaaaaaaactgtagccaatacttatgaagcactactatgtgccgggcccagttctaggcacttatctgtactgatccacttagttctcatgacaccttcagggaggtggccactgctcctgcccacattttgcagaagagcaaatttggaagtaaaatttggagctggcattctggcccagacaggctagatccagcgcgcactctcat

SEQ ID NO: 155425 - DNA, 459 bp, Homo sapiens
gcaggcgtcttggagcccacaggtcttaggctcttgggctagagcagaggctctgagtgaaggtgatgtccccgagctgaggcccagggtctctgactcaccactgggtgggttttcagggcagatgaactccccatctcaacccacattccccaccttacagctcagccaccaggactctgtgaacatgactggccatctccttccactgttcctacttaaggtcctggtgcttacacaagaaagtggtaccacaaccagctctttctagtggcagctggacttgtgggggcggggagggcacagcttctctaactgtcctcagggctctgtccagaggtatggattctggtaaactggctagctggaaagaataaccaaaagccctccaccatggtcaatttcaggctacccacatgacgccactacacgtgaagttgtgaagagatgtgcagaatt

SEQ ID NO: 155426 - DNA, 774 bp, Homo sapiens
tttgttgtttaggattttcatcgagaggaaacatcttcaagttagccacttgaaggaactgggtgatggtggtatgaacagtgggtgccaggtgctttctgcccttcttgttccactgggtccagatggcattcctagggcaccaccttcttgaacaactcttggggagaaggagtgtcacatggacacagcacatccctgctcagagtccacaatcacccacagtctcaagcaggtgccagtgatgtccacagtcacccacagtccctagcatgtgacagtggtctgagctgagctggagtccaaaaaactttagaattggctccagatttgtgagagcacctgggtatggttctctgcccactgaggcactgaatgcatgatggcccaggccccgaacaatggtgggaagagagagtggcatcggggcaaggctgtcattactccaagcaccagggtggcccaggcctgctcatctactctttggagggaatctgtgcatgtgaaatgaggcccctacgtcatgattataaaggaagagatgaaatcagttcatcttaccccaggccgataatggtcatgccacctagggaagcagtaaaagacctggtcttgggattgttcggggcctgcaggccccgaacaatactcatctgaatcggattcgaaataaaccgattagcaataatcccagtattaataaaaaattttaacccacgagccacagaagcagccacaaaatatttcctaacacaagccacagcctccataata

SEQ ID NO: 155427 - DNA, 1047 bp, Homo sapiens
tttgttgtttaggattttcatcgagaggaaacatcttcaagttagccacttgaaggaactgggtgatggtggtatgaacagtgggtgccaggtgctttctgcccttcttgttccactgggtccagatggcattcctagggcaccaccttcttgaacaactcttggggagaaggagtgtcacatggacacagcacatccctgctcagagtccacaatcacccacagtctcaagcaggtgccagtgatgtccacagtcacccacagtccctagcatgtgacagtggtctgagctgagctggagtccaaaaaactttagaattggctccagatttgtgagagcacctgggtatggttctctgcccactgaggcactgaatgcatgatggcccaggccccgaacaatggtgggaagagagagtggcatcggggcaaggctgtcattactccaagcaccagggtggcccaggcctgctcatctactctttggagggaatctgtgcatgtgaaatgaggcccctacgtcatgattataaaggaagagatgaaatcagttcatcttaccccaggccgataatggtcatgccacctagggaagcagtaaaagacctggtcttgggattgttcggggagctaccgaagtgaaaactgaatttacccacttccaggaaaacaacaaaagaggaacatctgggttcaaacctttatcagaagatcatttacccagctaatcttgctgtggtgcattgtatggtctcagcaattgtcaacaaaagcctcttaataattctaacacagggacacactgcaactcacattttccagtgcacctcagtggttaaagagattgctggtgctgcctgcatctgtcagtctgttcacatatggagaggagcagcggttctcacgggagcagcttctgcatcctgaggaagtttgcccagacatttctggttgtaatagctggtggctcccactgacatgcagtcaacaatgggaatcctatggtgcacaggactgcacccgggaggatcctctagatcaccagcc

SEQ ID NO: 155428 - DNA, 681 bp, Homo sapiens
taggcaccaagaatcccctcccttgctagcctggcatattcagataattttcttttgatacctctgacctgtaataaattttaagctccatatggtcatctttactgtgtatggcattcttagcatttatgtatattcatgtcaataaatagttattgcactgtgtgccagaggggtatgttttagtagatggtgataacaaaatgcaaatggcacttccttaggaagttccatgtcatgtgctgctggaaacagcccctgcttctagtgctgtagtacctgtgtgaccttggccaaattacttcacttctctgtgctgtttccttttctgtataatggagattcttaaccctgctgggaggattagttaaatgagatactgtaagtgaagcatgtagcacaaagcttggcgaaccaatggtgcagagattccagttccctccccttcctttctctgcaagttttctttagtgcttgcactcctgccaaatggttagtaatctgttaacaaacacttaagtctttaggggtgctcagacgacaaagggttgcttttggagagtgaagaatcttcttgtaatataaatagtcaactccaattccagttttaaagtttggtacgccttgaattcaacctgttaagttagcccagctctatctggggttctggaaaaatctatc

SEQ ID NO: 155429 - DNA, 356 bp, Homo sapiens
gagcctctacctctgctctcccaatcttctacattttccattccatctctccaggattccttccagtctttcctgctttcctaacggtggctttgcagatgctcatcttttttgtctgctttaacactccagtttgtccctggctaaatactattcatctttaggccgaacattaaatgtcacctcctccaagaagtttttctcgactactcctccttaagtttaaattaggagctcccactctgtgatactgtaacaatgcactcaccttattgtaacagtgtcctcactatatataactgctggtttaattgttcatagtccacctgttactggcggagggtcctgactacaag

SEQ ID NO: 155430 - DNA, 225 bp, Homo sapiens
tccccgtggccaccctctgtgtcctggagccacgccctccggctctgattctgtgcagctgactctcccctccctgagagtcctcctgccctccagctgcccgggctcctgctgccatcggtgcccacgaacgggccgaccaagcccaggtggcagcatctccccatcccctgttccctggcccgaccccactaccaggagatgaccgggaagcccagcgcccac

SEQ ID NO: 155431 - DNA, 129 bp, Homo sapiens
ccgaagaacagttcaggtcagtccttgaaggtccctccatctgtgtttgtctgatgtttcctccagggaccggaatgctacagaagcaatgctgtgttctcagtgtatcacatcaagaaacacttggca

SEQ ID NO: 155432 - DNA, 565 bp, Homo sapiens
acttgacttgcactttatgtctcggaactacttaatctccgcttctgaaaggcatctgagcttccacaggatccaggaccccaagaatatcaagacacaggaaagggtaatgcatgcctgtaatcccagctacatgggaggctgggacaagagaatcgcctgaacctgggaggcagaggttgcagtgagccgagatcatgccactgcactccagcctgggcaacagagcaggactctgtctcaaaaaaaaaaaagaaaaaaaaaaaaatcacctcttctaaccctgggggttgataaaatgcagaatatttattcaccagaagcagtcttttatatggcacccacttgaccaaaatattagcaaagtttgctttttaaatctacaaaagatcataagctaccaagtgtctgaggctcaagatatttttgtgattatgcttagagaattcacagggacaataaagttgttaaaagttaggagatgtgatccagtaataagacaacactggcactcagtactcaggcctgtgtggccaaacctccctctccccaagtcccaaagcag

SEQ ID NO: 155433 - DNA, 537 bp, Homo sapiens
gaatcatcaacatggttctggagcttccaattcagaatgaaccaccagggcaggctgcagctgaagagaagcacacctgtgttgtccagtacatcctcttccccccacactctacctccaccaaagacagcttctcgacagatgatgacaatgatgtggaagtggaggccctggagggagactcagagctcaatctggtcactgaggtgtgggtggagccacagtatgggcgagtgggacctggccctggaatctggaagcacctccaggacctgacgtattctgagatcccgcaagctctccacccacgggatgctgcctgcataggctccatgctgagctttgaatacctgatacagctgtgtcagagcaaggaatggggtcctctgcccccagagccgaggtctctgatggattggatcagggaggagacacctgcgtccatgagatccctttccattttgacctaatgggattgctgccacagtgccagcagctccagatgttcttcctcttgcttgccagaggtaggtgaac

SEQ ID NO: 155434 - DNA, 537 bp, Homo sapiens
tatgttctcgactctgttacaatcggcatggtggtatgtgcctgtagttccagctcaagaggctacggcaggagaatctgcttgtacccaggatgtgaaggctgcagtgagctgagatcatgccactgcactccaggctggctgacagagcgagactctgcctctgggcatggtggtgcacatgcctgtaatcccagctactcgggaggctgaggcaggagaatcgcttaaaccccggtggtggaggttgtggtgagccaagatcgtgccattgctctccagcctgggcagcaagagtgaaactccatctcagaaaatggagatggagtagagcattccagataaaaagaaaggcatgtgcaaaggctccatgtgggatgaagcatgacatatacgaagaagttgctggagaagagtaaggaacgggcgagatgtgagatacggccagaatgatacatagggaaccagactctgtaaaaccttaataggccatgttaacgatcgagaagatagcttatgttctcgatcgagaaaata

SEQ ID NO: 155435 - DNA, 742 bp, Homo sapiens
gggaaaagggtggaggtggggtacattataaagaaaaatgaacactgtactggcacttaatggagtttatcatctagtaggggaaacatactacaaataatttttttagtggtatatatatataataaaggaataaaggtatagtgctttgagaaataggaattttcccttaggaaatgatgtttgacctgaaaccttaagattcagaacaacttaagtgtgctaagaaagagatgtggccgggcgcagtggctcacacgtgtaatctcagtacttcgggaggccgaggggggcggatcacctgaggtcgggaggtggagaccagcctgaccaacatggagaaaccctgtctctactacaaatacaaaattaatggtgtggtgcacatgcctgtaatcccagctactcgggaggctgaggcaggagaatcgcttaaaccccggtggtggaggttgtggtgagccaagatcgtgccattgctctccagcctgggcagcaagagtgaaactccatctcagaaaatggagatggagtagagcattccagataaaaagaaaggcatgtgcaaaggctccatgtgggatgaagcatgacatatacgaagaagttgctggagaagagtaaggaacgggcgagatgtgagatacggccagaatgatacatagggaaccagactctgtaaaaccttaataggccatgttaacgatcgagaagatagcttatgttctcgatcgagaaaata

SEQ ID NO: 155436 - DNA, 317 bp, Homo sapiens
gggaggccaacttacgttttactgtatactcctttgtaccatgtgaatgtattaacctattcgacaattagtttaaaaatttttttttaactattaaaaaggtatacattgtccttaggggaaaggtgtggtagaatttatagaagaaacaataaattttgtcccaaacccattatccttcccatacccactctgtaaggccactgctaacacagtctctgagcctgacctgacccaggcagggccccaaaagttctgcagtactggtcttgcttcctcaagaaaaacaaatcctctttctgcatttctttggaaat

SEQ ID NO: 155437 - DNA, 290 bp, Homo sapiens
acttcgacggacgcattcagtactgggtaaaaatttcagacctatctcaggaacacagaaatattgggtgccctgataagcactttctagactatggatgtggccaggaattgggaaagacgacacacacacacacacacacacacacacacacacacacacgaatactattcagccataaaggaagaatgaaatcatgtcttttgtagcaacgtggaaggatggaaggacctggaggccatgttctcacttataagttgaagcaaaataatgtgtacatgtgggcacag

SEQ ID NO: 155438 - DNA, 104 bp, Homo sapiens
cgtccagggatgtggttattattcttgttccctctggaaattctattgctattaaatcagggtttctcaacctcagtaccattgctattttaagctagataatt

SEQ ID NO: 155439 - DNA, 434 bp, Homo sapiens
aaataaataaattagtgataataaccaatatggtctattactctgttttgctttaacacatgatatcacatcagaatccttcagctgactgatgactaccccatgtacaatgcaaaatggtcaaactttaatgacttttagaataaagatgcataggaatgcctagttcttgtttttaattcaggttttagtttagttcttttgttgttaatttctctcacttaagaacctgctgagcagattcgttgagtaagaagtagaataaaatcatacttaacttgcctcaaaattaaatgaagcttactctagttagttgaagcccactccagcttaaaacttcaataatatttaaattatataaaggtgaaagaaaatactctgagtcagtaaagttcacggcacatgcaagggtgtgtttgcagtgagaactttga

SEQ ID NO: 155440 - DNA, 194 bp, Homo sapiens
gtgtggacttcactcccatcctgtgtgtataaactacccaatccatacctcagctgtttatgaaacaactgtcatggaagttgcccagcatgttcccctgggcctgtcttcctcttacatatccacagtcatatattttagcttttaagtaagcaaaacttagggtgtttcctgagtagaccccttggtgagga

SEQ ID NO: 155441 - DNA, 183 bp, Homo sapiens
ggagagggtcagctgaccctgaatgctgtcttttcccaatattgttgttttgggctcttttagcccataaagtccatatctttcagagatgtccaccctgatgtcacagagcttccagcaggcagtgagttgggcatatcccctgtgtgctgcatgaccccttcccccagctcagggcttctt

SEQ ID NO: 155442 - DNA, 624 bp, Homo sapiens
ctgtctccctgttgtttgtgttgctgctcatggttactgcatgaaacttctacttgaattcaacttgtttttattttatgttctacttgtctgaagcaagcattcaacctttccggttaatatgccattacacatctttttggatctactacacccacttctacccaaatgataagggaagcaaaagccctgtcaccaacctttgagagctctgaggtgcaagtcaaggtatgtagctttactgacccacaagaggcacaggtccatctaactgagcccattacagagcacacagcactgctcatactgtaccaggaatgagacagcagagggagaaggaaggaggtgaaacaccttctgcataacatgttgtcagtggcaaaacattaactgggacccaagcctctgacttccaaactctgagcattttctagatgacatacactttaaacaaaacacagtactcattaaagtaagcatattcttcatgacctcactggcatgggtaatggaaaaccaagaagttatctctaattgaattggaatgtttacactggctgcatagctgctcccctaaaggaatctgtggggaaaccaggctctggtttcctcatttcctagtgt

SEQ ID NO: 155443 - DNA, 349 bp, Homo sapiens
gccccaagtagaaataacctaaatgtctatcctctgatgaaaggataaataaaatgtgtctgcctatgcaatggaatattatttagtaagaaaaggagtgaactcctgataagtgctataacatgggtgatgggtgatccttgaaaacattttgatgagtgaaagaagacagtcacaaaagatcacatactcaatgaatgaatttatttatttatttttgagataaggtcttgccgtgttgcccaggctggtctgtaactcctgactcacaggattttcccctgtcaccctccacagagtagctgggtttacaggcatatgctgtcacattcagctgctgaatgaattc

SEQ ID NO: 155444 - DNA, 144 bp, Homo sapiens
cccgcttggcccttctaagtgtactgcttcctttcactcctgctctaaaactttcaaacaaattctcactcctgttcttaaaacttgcctcagtctctccctctgcctgaaaccaactactgcctctcagcaaaattctttcct

SEQ ID NO: 155445 - DNA, 112 bp, Homo sapiens
tttcattaaaaaatatcttaaatttgtagctgaagagctttctaattctgactacaaaagatagaaagttaaaaccgtacagtcctgtcttggtgttaaacttagtctcttt

SEQ ID NO: 155446 - DNA, 525 bp, Homo sapiens
aattggaaggaatgatatagtaattctgcatatttattataaagaacacattcccaaataatagaataaaaacatacattttaatagaaaaattaagtgcttttacataaacatcctattttttttagaattatatgcgcttattcactcatttactcatttattcatttactcaaagatagtagatgccataattttacaaagataatgtccaggagtccaggcctgccacttaaaactaaccttaaagaagtcccctctgagtcctagattctcttggggttgatgtgagaatttggtaaaactgttagggaaaatgctttctaaacagaaagagatatataaatggaggatgatattaacacattattaggcttttaaatactgaacctctgacttgtaatgaaaaatattaatgttaaagtatgaaaatgtcttataatatgtataagttttcctaaatatttgaaattagagtttccatataaaataaaccataagaaagtggagctcaaatgttcaaat

SEQ ID NO: 155447 - DNA, 334 bp, Homo sapiens
ttaggaattgcatggcaaagtactgagttagtgtgatgtttatccacaggtgggaggagagggtgtctgagggtttgcctggaggtgagccatgagaggcaggcaggagctgggccttaagggctgtgggccaagtaggagtttaaattttatcctgaaggcagtagggactatttatggtctgatacctcctttgccctcgcatctaaggtgtattggtaggcagccctcttaggaccaggtttcactcccaacttcaagccggggggagcctttctttaatcttgggatgagcctggccagggtgggttggccctgcttgccgagtgagggg

SEQ ID NO: 155448 - DNA, 747 bp, Homo sapiens
agctgtcactcccccctcccatctactcccattctcccagccctaggcaaccaccaatgtacttctgtctctgtacttttgcctattctggatgtttcgtataaatggaatcatacattaagtagccccttgtgactgggtttgttcacttagcgtaatgttttctgggttcacctgccataggttcttgacttcaggacagtttcctgctggctttagtttcctctggtaacttgggaatcaattgacatctatggaacttctgttatggttcaggtactataaactgtggaggagtgactaataaccgtatatatatttttcttactaatttcccttcatttcacaggtgttgaactaatacagtatagtttcttgttcttcagaagcttacagtcagcaaggaacagaaagccaaataaagtaggaaagggtaagatgttcaacgctgggcgcagtggctcatgcccataatctcagcaccgtaggaggctgaggaaagaggatcacttgagcctagaattttgagaccagcctgggcaacatagtaagacttcgtttctataaataattaaaaaaattagccagacgtggtggcgtgtgcctgtgatcccggccacttgagaggctgaggtagaatcgtttgagcccgggcagttgtgactgcagtgatccctgatcatgctactgtactccagcctgggtgacagagtgagaccctgtctcaggacaaaaaaaaaaaaaaaa

SEQ ID NO: 155449 - DNA, 318 bp, Homo sapiens
cccctggaggctcttcctccttgataattaaaattggtggattttcctctcgagagctacctgaggtaaggatccgagtctctttgtcatgccattaatagtccggaactctgcagaaaggcatctggctgccttctccgttccccacttgggcctggcgggccgcctgtacatgttggggaacaacacaacctaaatctggacaatttgtattttagtagtaacggggatattctctgtctccctctgtcattttgcattaaggacctgccactaataaaactaattaataactgctggctcgatgtggaatagttg

SEQ ID NO: 155450 - DNA, 543 bp, Homo sapiens
cagggagcaaagcatttttctgtcaggctgtaggacttgacctaggaggtgacccagaagcagggctcagaggccaggcctagaggagggagagacaaggagcctcctggtgaaaggcagcagggctggaccgtagggcagatggggccaccacatccccaaatgtaaggcctcttattggaccaggcccaaatggggattgaatgatgtccacctgcaccttcacctgttccctgttcaagcctgagagggatgcagagccttagcgtggactctgtcctgggagactcagtgcaggcctcctgctcccgagccagcattcaccacccagcccaggcttctcaccaagcctctgagaccagctcttcgaggattctccaccatttcctttgcggccatcaccagtggccgcagctctttctcccatgcctcttatccctgggagggccaggagatttcacgtcactgcctgttgccatatcttaaccattgctcctctacccccagataaaaatgctcaagaatggggactccctcagctcc

SEQ ID NO: 155451 - DNA, 491 bp, Homo sapiens
gcgatggccgtagctgtgccctcagccttgcttcacgatgaggaatgatggtgactacctggcactgctattatgtcgtgccactggacagggaggcctgtgttgggagctgccaggagccattgtgagcaggcaagtttgagatatctgaccacagtgagggccctaagttctccaagagggtggctgagactcctagtcctggatgatctgcttcttgtctcttactgggcatgagaaccctgaaccagaacagagaattctagggacacgtgtttcctttggcctgaaccctctgatagccaacacccacctggcacctcactcctggggcctctgccgtacacttctgagtacggggtctctgacaacttcacattacctaccatcatttcctctgtgacctttacagttgtcaaatgagcttatggtctttttttttttccctctagtcctttgcctctggagtgaaataaagctgcacattaatc

SEQ ID NO: 155452 - DNA, 261 bp, Homo sapiens
ttttatgtaattctgacaacaactttacacagtagtagtattctctccatttaactgctgacggaactaaaggacagacaggcaacttgtccagggtcacagctagtaaagaggcagtatggggatctgatccctctgtgcctgacccataagtccagattattttccaccatgccatgaaatagcacagaacttgacaaagaagcagaattgttcaactactagggatgggaaagtcttaagttagcatggagctgtgtg

SEQ ID NO: 155453 - DNA, 445 bp, Homo sapiens
gcccttataggaataggggcatttgaatacagacacgcaggggagaaggccgggtaaagacagagggagaggttggcgtgaggagtctgtaggccaagcaatgccagtgaacaccagcagggcaccaaaggctggatgtgcaaggcgcattcgtccttccaaccttcggggggagcaaagccctgccaacaccgtgacttgctcttctggtctccagaactgtgagaacatcaacgtctgttgctttaagccaccaaacgtgtggttctttgttatggcagccctcgccctcctcagcctgaaccatcaccactctgccttacctctcaatatcccaagtaaaagccacctgaagcaaccatgtcttaacagagcatgtcttggaaatgttgaaaaaagactttccccattttatgaatttgctgcataatagaaatttaaatta

SEQ ID NO: 155454 - DNA, 442 bp, Homo sapiens
gtacttatgtagaagaatgtccttaccattggaaacatacacacactagggtaattccagagtgatggagcatcaggcggacaactccaacggttctggagaagaaaacaagttttctctactgtacttgtaactattctgttttgggctgtttcaaaagttttcaaaaacattttaaatgattagtatctctccaaaatgaaagtaatggatacaatcttaatacatacacacacattctttccaacaagaatgttctctttgtaaaagtactaaataagtcttccatttggtcactagggaagtagtataaaatagtgttgcataacaaaaaagaaaaaccaggctttccatgtagtaacactgacttcaagctccagttcatcacatacaaatttcatgaccctaggtagacttttttttttttttttgagatagagtc

SEQ ID NO: 155455 - DNA, 381 bp, Homo sapiens
tatctctctcttggcaagtcaagctgactgatttggaggctacagactctaccttggctggcctggccacctcacaacctcctctccaaaggtgacatgtactacagcttaagacattacacggcacctgaagcaaaaactaaaagtagatatggtatatgaagggacaggaatttagggaatagacccaatttttcttttacttaatcagcgttgagtttttgggtttctaggagggcatagaaaacttgaactggagaagcaaggttcattggcatgtgccagttgatacttcactaagtctttactagtaaaaatgatgacatttatcttctttcttaagccatgtctattctgttccaactttaccaagaatgacag

SEQ ID NO: 155456 - DNA, 433 bp, Homo sapiens
cttctcttgcatcttagttgtagccacatctaggttgcagactatatcagtatagtatttttctttagtggctgccatatttcattatttttggtttctaaagtatgatggtagaagtactcaagttacttcaggagagtttggggataaaaaatttgtagtgtctgttaccagatctttattggctatttttgattggagcataaaatctagatggttatcattcactttaataaaacatataaataaatatattgagactctgtaatacaaagaaaagtggttgtaaatccgagtccttcttactgaactatagttgggtgattttcttttattttcatttttactgtatatctttgagaatataaagaagaaggcatatatttatattcattactgtttaaatgtccaagtgaacgccgagaggttataa

SEQ ID NO: 155457 - DNA, 340 bp, Homo sapiens
agttcgacggagactctcctgaagtactcaagttacttcaggagagtttggggataaaaaatttgtagtgtctgttaccagatctttattggctatttttgattggagcataaaatctagatggttatcattcactttaataaaacatataaataaatatattgagactctgtaatacaaagaaaagtggttgtaaatccgagtccttcttactgaactatagttgggtgattttcttttattttcatttttactgtatatctttgagaatataaagaagaaggcatatatttatattcattactgtttaaatgtccaagtgaacgccgagaggttataa

SEQ ID NO: 155458 - DNA, 210 bp, Homo sapiens
ttagatggctgtgtcatcaattagagtataaactctagaagcactactgggtcttcatttctgcactacccttaggccatagtttttctttgcatatttctgttcccaaattgggaaatggttacagaagaagaaaaaagaatatgggacaaataatctgaagaatctacaaactggcttttacacaatttgggaccctcctcatctctg

SEQ ID NO: 155459 - DNA, 761 bp, Homo sapiens
taggaaatttggtgattttacacttatattcaattaatactaattttaaggacttaatctctattcctttttcagagaataaactaattggtagcctgtaaaaatgtgtctctgggaggtagaatgtgaagcgggatgaggtcatttgttcttaatagaaatctgaacatcttaacattaagataccttctcaaaatagcaatagaagaaaatccctaaaatttgacagataacattttctaagctttttaaaaggacatttttaataaatacagctaaatttcattcttcttatattatgaaatttaatgagaaacaaagtctttttgtaggctggatttcatgttttttcctaattagtccagtacctagactagtttatcactccatatgccccattcttttcatccgatactgttctttctgcttggaatatgtccctccatgtggccactccgttctcttttgggaatcttccacgagtccctgatactgaaaccttctttggccccttggtgtttgataccacatttaaggcctttcacatattattctgtgattatttttactgattttatttccctcaaagatttaggtctcttaatgtcagcacccatttcatctgctcttgtgtatcttgtgcctttttggtgctcaataaaaatttgatgtaagcatggaattttctagaggctttgaagtggtaggcatgcctgaaatacggactggacccactctattatgtttcttctagggactga

SEQ ID NO: 155460 - DNA, 748 bp, Homo sapiens
ggaagccacaccaaccagagctcacctaggacctactatatggattccacctgcccatcatggggcaagatgctggccttcctttagaaaggggccaaatttcaattcccaccagaaaatcaagaatacataatcagatagttctgaatgacgtgaatggttctctttcaacctcacaagattttgagagtctaatattaggatttgtgatcaaaaagttgcaaacgtgcactatgtcataattccttagatccgacaataaaggattctgttgtaattctccatcttaagatgatttttttttctcttggaggaaataacgacctaaataaatgtcatgtgcttgaatttctgaaaggaaaatgttaccccatacccatttattttagaaaggtcggatttgttcccctgtcaacaaaagctttgagctgtacattggtctagacacccccaagtactccagaaagttgagggttaaaaatccaagacagattttataaatgtaggactgacgaaattttcaacaaaaaattcactgttatgtcatatcctataggaaaggctttatccacacatgccttcttgatattctatgctatggtttcatccagtagtacattggttcttatagatacatggaaacaatgaggttctttttcctatataatttttatttctgtaggttacatatcccacctgttatctagaaaacattgttcagttatatgtacatgtggtgttacttgaa

SEQ ID NO: 155461 - DNA, 357 bp, Homo sapiens
ggttcgaatgtcctagttacagagggaagtgggcctgcaaaccctcaggcttcagaccacccctttccactgcagggaaacaccacttttgctcatctctttggcccttttggtagcttattccttgaggaccatgctcctctctgctggggatgaggctgcctgctggtggctccgtttgtgttttctgggccttccagaggggctgcctttattctgcagccagccctgacccttcccacctctccatgcttgggtgaagagtgaggcccagggcagctgactgacagcacagctgtcctctgcgttttcctggacagaaaccatcgcaggcccacccacctcctgactgcacag

SEQ ID NO: 155462 - DNA, 585 bp, Homo sapiens
agtgtgcctcatgcttctagtaccctacgtgttacccagaattctccaatgaaagagatcttcacattggcatctcaactcactagaaagtgggcattctcaggtcatgataactagcgtggtgagcgttttcacatgtcttcagggactccactgaagttgcacaatggctttcctcttctttggagaagtaacccaatgaccagcacaactcttgagcatcagtcaccgcttctgtggcatcaactgactagcagtttggcaattagggtgcaaatgtgctcttggctttgctttaagtatctgcatcaggaattttccaacatgagaggaaaagaatgcaacccttttttttttggtaagctcttgtcactacctactaatgcaaaactctaggcctctgcaaattctcccccttccctgaagtttctcagaatccttaagtagtacattcgatgaatacagaaacaagtcaggttagttactatgcatcattttggctttggtgcttcggattcagctccctctgccctgtgcttggtgtgtggaaccacagctgatgtctatttctaactcccactagat

SEQ ID NO: 155463 - DNA, 283 bp, Homo sapiens
cttgcctggagctcaccacactgcagtgcgtgttctcctgggaagggagctgtgacactggcctgctggtcatgacttagagctacatgtcagtgggagagtgtggcttgagcctgaactgagccctggccccacagacggagtcccagccccagccccagatggagcctcaaacctaggcagccctggttcacaatggagccccgaccctgggccagtctgaccccagtcacagactgaatcccagtcccacattgagccctgatcccatccaagtccatag

SEQ ID NO: 155464 - DNA, 337 bp, Homo sapiens
aacaggctttgtaggaggacactcaagacggtgtgatttacaaaccgaggccacaaagctactgtgctcccatgtttgagcttccatgtgtggcctggaatttaatgggtcccactccagtaggatgcattctacagtttggggacatctgggataaatgatttcctgggattctccagcagatagcccaggggtctaggccttcctgttgtgggacggggaggggtcctgtgctggcagcaacaccccctggccccccgcccttcccgctctctcctgtcttccacattggctcaactgctcaaattcaaagaccaggagacctgcttgatttcac

SEQ ID NO: 155465 - DNA, 519 bp, Homo sapiens
tacttttccacagggtacacaaaaaaatgtgccgggcatggaggtgcacatttgtaatcccagctactcggaaagtgaggcacaagaatgtcttgaacatgggaggcagaggttgcagtgagttgagattgtgccactgcactccagcctgggtggcaaagtgagactctgtctccaaaataaataaataaataaataacaggaaaacagaaaaataatgagtgaatgaattctctgacctctctcttaccttcctgaatcattgcttttctgtttctgtcttctctagtttaaccttgttcatctacttcctgaggacactcttgtggttttaaaacttcacagttacatttagtaactctttatataaggaaacagattgccacataatccatgataactgggtggaaaatttttaatctctcttgtacttaaaaaaaaaatcacctgttcctcttacctgagattgcatatgtttacattttggccttggagataaccctttccctgtggctgagt

SEQ ID NO: 155466 - DNA, 156 bp, Homo sapiens
cttgtaaaaactcatagaatgtacaacacaaagtatgaaccctgatgtaaacttcggactataaaataatgtatcaacattatcttatcaattgtatcaaaaggaccacactaattaaaataataatgaggaaattgtgtgtgtgtgtgtgtgtgt

SEQ ID NO: 155467 - DNA, 826 bp, Homo sapiens
ctgaccaggtgagagatggctcggaagtgagggagaggggagagggatgcaggttgtgggcctgtaatccttattgatatcagccaccctcaacctgagatgtaaattggaatcacctgtggctctcaagctggcattcagacgggcagcttttcctgagccctcaaggagattctgtcttgcagcacgtgggtaacaagtggattgggtaaataggctcttccctggagggatggtgttaacgcagagacccgagactgagcttaggaaacaaaagtggaacagaacaacctcctgatttcaaaagcaaaggcttaaaatttatttcagaatgagttacagtgatattagtatgtttttttgggtggggaggacagaatctaattttagttgttttagattatggtactttttcctgcttgatttacatgttaaatgtttctgatgaactgttaaaatcttcgaggtttttgcttcatttaaacaaatgatgcctgccaactctacaacttaaatatgttttccgtgtatatagatatatacttaaatatatctactgtgtgttttggctttgaggttttcaaaaatgtgtattcaaatcgtgtagcgctacagctaattcagtaataaggactaggcttagtggctcctttctgtaatcccagcactttgggaggccaaggtgggaggactgtatgaggccaggagttcaagaccagcccgggcaacatagtgagacccacatctctaaaaacaaaaaatacaaaaattagctgggcatgatggtgagcatctgtagtcccagctgcttgggaggctgaggtag

SEQ ID NO: 155468 - DNA, 298 bp, Homo sapiens
gacggctgcaaagcacacacaccttaggcaatcacgcctatggttcagggacacaaatttaagtgataaaactacaagcaagtcaaggaaattaaacttacagaagtcaggatcattaccataataattagctgtacaggccgggcacactggctcacgcctgccatcccagcactttgggaggccaaggtgggtgggttacttgaggtcaggagtttgagaccagcctggccgatacagtgaaaccccgtctctgctaaaaatacaaaaattagccaggtgtgatggcggccacctg

SEQ ID NO: 155469 - DNA, 227 bp, Homo sapiens
tgagccaccgtgtgcagcctctgatttcttgattgtgagtaactgggcccagaaacagtggaggaatcctcagagtctcacctgccttgtgcctgttggtgtgagcagtataaccaatgaccagcaagccaccattgagggtgggggcaggttctagatggggatgcctggtttgtaacatctcccactcaggggcacccagccctctggaaaatagcacgtgaaca

SEQ ID NO: 155470 - DNA, 352 bp, Homo sapiens
tattaaggtacggatttcaactctcagaaccaccaggaaaatgtcactggagatgacagttctttagcttaggtaattcagtttcttgggccctttcccaggggccacagatttaattcctatggctatttttattcccacctccattcctttaactagcttttctgtctcatccctcctagattctaacttcgtgccaggtcactaacgcactggccccttgactcacagtcaactctgcctcctgactggcatcccaagcttgaagtcccacgtggaggagtgttcagactcaaccccctggggcttccacagtcagaatctgctaacttgtcccgcacaactctgtgag

SEQ ID NO: 155471 - DNA, 289 bp, Homo sapiens
tggttctcccccgcttccagctgttttccatcaccttcatgggtgctttccctcctggttggtcctttgcttaacttgtggtgttccctagtactccatccgtaatcttccctttccctcatattctccctgaacactcttcttcatggctatcatgtttagaaccatacttctaaatctgcatttcagatccatctagaaaccttcaggtttttattttgggctgcttattggatggagttatctgtgtgacttggaggtatgtgaaaagtcaacatgtcaaaactca

SEQ ID NO: 155472 - DNA, 368 bp, Homo sapiens
aatactcctaacagtctacaaccgcacgagggcaggggcccctcccccagcacctattgctcgcctctccagattctagaacttttcataccaaggcttagaacattaaatccctcctgccacccacaataaaatgaatccacatgcactcgggtatctaaggaacagaggtgaatcctgacaagtcgagacaaactttctcctgaggaaaaagagaagatcctcccccaccctccaacctgccgctataggcagcctgctccaaagtcattgtcaagctttgaaatgccaaaaccagtgcctggattttgaacctcatggggtctgactttcacacaatccatgcgacagcataccgcccctacacc

SEQ ID NO: 155473 - DNA, 386 bp, Homo sapiens
cttaccgttgtctaggtcatgaaaaacaaggaaggtctgagtaacaggctcagccagtaggaatctaaggagacatgatgattaaatgttatatgagattctggaacagaaaaataaaggccattagatttattagatttataacaaaacaccatagagaaatcaaaataaactatgaaatttagttaataaaggcatgtctgtattggttcatcaattatgacaaacgtaccattctactgggatatgttaatagtagggaagctggatgtgacatatgtggaaattttctaccttatctttgcagtttttctgcaaacctagaactgttctaaaaaatagcttattcaggccgggtgcggtggctcacgcctgtaatcccagca

SEQ ID NO: 155474 - DNA, 194 bp, Homo sapiens
ggcttgctgaaatttgaatagctggcaactggcagaatgggatttgactccatattgggtgaccctgtgaccccccaccccttactctttgtaaccaccgttttatatttgacattttggggtgtttttcgatttcacatgtaagtgagatcatctggtatttgtctttttgtgtctggcttatttcatatagc

SEQ ID NO: 155475 - DNA, 404 bp, Homo sapiens
tggttgggagagagttaggcaattgccaggccaactacattttggagtagctcggcctcccgagccctaagcagcgatttctcctctggttcaaaggggcgggcagcattccccttctaaaatgcacattgaaaagctgcgcacgtctccttcgaaggaactgcccgcgcttgacaagccccgcgctaggcagtcaccgatccctttctccccctcactgggggacgtttgccctaagactggctcctcgcctgagctgagaacttggccttggggtgggagagaaggatccctacccgggccggcgccccaggtggtgaataagctggggccgagggtccagtcatcacacaggcacatgtttcccagaaaaacaagtgggaggtggagcgtgaccaggtcga

SEQ ID NO: 155476 - DNA, 326 bp, Homo sapiens
ctccagacaggattcccatcctgctaagccctcgccaggccctagacaggtgtgctggaatgtgtcccacctttcttccctgggaacaaagaagtaccctccatcctccaaaagagaaagccacacggaaaccaaaggacatggcccgtaaggacccatgaggctcatgagggtcagaggttagacacttacttctaccttccctcctaatattttaataattagcagaacaaggccgggcatggtgacccacacctgtaatcccagcagtttgggaggccgaggcggggaaatcacaaggtcaagagatcgagaccagcctggcc

SEQ ID NO: 155477 - DNA, 256 bp, Homo sapiens
cctctggccagaactgtggattggaacaacgagcaaataaaaatttagctacaaatttcaattatctcagtagggcctctaataccaagtataacaaaaaaaaatctagctacatggttccttaagcatgattccaaatcaattaaaaaaaaattaaaattatcctgagaagctcaggtgcagcagctcatgcctgtaatcccagcactttgggaggctgaggcaggtggatcgcttgagcctaggagtttgagac

SEQ ID NO: 155478 - DNA, 460 bp, Homo sapiens
aggttttatagaagaaacatacttagtgacgttccttgacggagtagaagggcggggaggggaacaggtaggagacaggagaagcaagtccacagcactaacaaacccattcctggacttgtgcacatccttgagcttcagcccagcttttgcaggcagcagtgaccctgtatttcaattgttaatgccatgatacccctatatagaagaaattccatgactgctttcttaaaactgtttttgatattcagttccttcctaatttcattttagtttatcctcttggctatttgtcctccttgagaagaaagagtccgagagagagagacatggtctttggtatcaagatttgcatgtataattttctgagctagcttttctcaggaggagttattccttctgtctgtaagtgtccccaaatctttatgaaataacatactaattgtggccaagatgctag

SEQ ID NO: 155479 - DNA, 136 bp, Homo sapiens
gtttttgatgatgatgtgatccaagtgggctctctgcagtgtgaggccagcaaggtgcagtcaccaccccccacagcccagtccctagcattgtggggttggaaacccgatattacccattcatccagaaatacta

SEQ ID NO: 155480 - DNA, 363 bp, Homo sapiens
tcctttgaaatgtcctccccctccattcccctggcaagcttctacttttccttcagacttcggcttctatattactttaggtaacaagtccctgacccccttcctccaaatctaaatcaggactctcatttttaaaatgttaacttgttgctatatatctatttgtgttggtattcattaaatatcttttgaattgacacataactcatgaagagaccttctcatttgtattaacatccagctcatatttttcatttttctgcaagaacagcttgccagataccttgctgccgtccagatacataatctctctcttaattttttcactttctaagtttttaaatctttcaaaggaggaaatgc

SEQ ID NO: 155481 - DNA, 111 bp, Homo sapiens
aacacaaacagtagattaaagcattgtacaatgtcaaatatattgaaggtaaaaactgtaccttaagactcttaagactatcactattctcagaaaatacatactaaagta

SEQ ID NO: 155482 - DNA, 384 bp, Homo sapiens
gaagggggaactctagttactatgactcttagctgttctctgcccatttactctttccaccttagaggagataaagtgtcttatctgacactttaggaagggcaaattgggcacacttggttcagctccaccatctttgttttgttattaacctgactttgggacatagatgttcattcagctcctccagggttagggctggttctgcaattctgcggcagagtgaagggaaggcctacttcattccaaagttgtctttgtctatatctaagtggctaaagcaacctaattctattgctcaataaaaaattctgtttcttgcactgcacgggggtcatgctaatcttctctgtatcattccaattttagtatatgtgttgctga

SEQ ID NO: 155483 - DNA, 235 bp, Homo sapiens
gaaagagcgagcttgatctgggttgctgggatgttctagggttgcttccactaagatcagcaacacatagattccttttctgcatcatccaggaactgggcattatgcacaccctcacacaacgcaaaaaagtagtaactgtgctcatcttatagatgagagtggctctaagaggctaggtgccttcccaaggtcacctgctggtaattgacagaacaggaatctgaacccgtgg

SEQ ID NO: 155484 - DNA, 405 bp, Homo sapiens
aagaaagagaggatacagcctagaggtgactcttatcaccttgcttacaattattggctaaaactagtcatatggccacacccctgaaaagaggtaggggtaaattaagggatacagacattggataaacaggtaccttttattttggaggaggaggaggttcttttttgttttttgggtttttttaaaatttgagacagagtcttgctctgtcacccaggctgaagggcagtgacatgatcttggctcactacaacctccacctcccagactcaagtgattctcctgccttagcctcctgagtagtcaggactacaggtgtgcaccaacaggcatgcaccaccatgcccagctaatttttttttttttttttttttggagacagagtttcgctcttgtcaccca

SEQ ID NO: 155485 - DNA, 619 bp, Homo sapiens
ccatgggttcgtgtagacagtgtccttcctagtaaccgtccgggggtggggtggacccagcatgtcccctggagatggctcaaatatttccagttcagacagtggcagtagcagcagcagccctggcccggccttgtggtgctcttgagggtgcgtttctgtcggatcagtcctggaacctggcctgtgggtcaaaggccctctcacaaagcaccctccagcaggtttgggctgccttatactcttctccaggttgtcgaactcctgtttctctgaaaggaacccacgcctatagccctgaccacaggcagaagaaacataggaaactctcggagctcgagagacctcacaaagtgtctcacggtcatgagaggagagatgagagaaagaggtgtcacagaagtgtcaccaacttactcttcagaccctgagtcttctgattatgggcatgttcaatcccctccatcttgtaccactcctcatcagatgtacgtcgaccactacagatccctggaggaggaccaggagcgcattgttcacaccagaagcctgggaaaggcacagcaatgctttcaggaagactcggggcaagcaagaacgaactggtgaacccagggaa

SEQ ID NO: 155486 - DNA, 804 bp, Homo sapiens
tttgggcaggcctgtgaaggccttgatggttgctttctccaccattagaccctctctctgtggccctcctggtggcctcccacctccacttccatacagtgccctgcccttcccccagtctccagtgtcagaaatggttttcaagaaaggagccaatgattgtgtttatcttgaagagctaaatacaaaagaagttcccatttgatgcagagcaggtgctttacaagtcatttgaccgggaaacagaggatggaggcattttaatgggaaacaaagctttaatgggaaacactgtagaaatatttgctatcactaatggtagaatttcaaacagtgggctggaagtggaggtggggagctgggtagttcttttgggaacgggtccctgtgacaatatctagcagctgtcagctctgtatttggcaagggcagctttggccctgcaggcaggaatgctgtaagagtgtgtatgcatgcatgtgcatgcgtgcatgtttgtttgactggtcaggtgttactgtcaccagaaggcattttttgagcacccagtgtccactttcgggatgagaaacttgtgtacacagggttcctcgttggcattggctgccctttgccaaggcaattattagacctcaagaagatagtgttgttgcttacaaagtcagtgcctctagctagttgtgcgcactgagcctctggctgggggcattagctctctgctcactaagcttctttattatatttcctggccagttctgaccggttctgtaggcacccaaggctgccttgttcagtccctgctgg

SEQ ID NO: 155487 - DNA, 301 bp, Homo sapiens
gggaggggtggaaaaaaatccaacagcattattttttgggagagaaagaaaagcaaaacaatagatataatatagtgtaaatcaaagtatccctaagtgttttgggaatacaaaagtgtagctaacataacctgggagtgatactggtggtgtgtaaggttggggagaagtctaagaagatgggaagctgagctaaatcttctaaatcatctaaagtagaagtggtttactctagtaattgaggaataaagatataaaatatctaggggactgcttacctagtacctagctctgctcttta

SEQ ID NO: 155488 - DNA, 448 bp, Homo sapiens
aacacttggtgtctatggcaggtggagaaagggactcttggggtggggaaggacaagagaacggggttggcatgaagagggcagtaaaagctttattgaacaataatgctctttttctttaagttgtttcaattatccctctgtatccacccaaacaatgtattttacaaagaccactatggcacttacattatacacaaggtaagtaaagtggaaaaataggtatctaagttctgaaaagaaagcagaaagaagaagtcacctaaagatttcaaaccatacactactggaaagaaggtgtcttaatgctagaatccaatataacttgatccattcagagctataaggccctcaagacttatgggcgtgctcttttgggctaatggatgatatcacttaaagatatttcacatagcaatatactgaatatttagaccaaagaagtatt

SEQ ID NO: 155489 - DNA, 224 bp, Homo sapiens
ggatcagctggctgggaggattagtgagcacctctgtattttgaggtctgagtggtctggagttgtgagtgatgcttctggcctgagggaaagggaatggggtgaatggaatagcagccagccttgagcctggagtgagaagcagagaccaggctggccagggtctgagggcttcctgcggacgccacgcaggtgagcacagctgcccgtggggcagtgcacct

SEQ ID NO: 155490 - DNA, 169 bp, Homo sapiens
taaaatcacatagctctctcaaatggttgggttagaagctcttgtttgttttaaatggttgtgcctcttatgaggcctgtggagagaatgagtagtgagtgtgaaacaagtttggggaagatgtgactccccctccacacacacagaacttggcaaaaggtatgcaaat

SEQ ID NO: 155491 - DNA, 118 bp, Homo sapiens
actaaccagtgcattttctgtttttctgaccagaccatcatgggtacagagagccagcgtcagctcagagtgaatattcataaaacctgatttcttgcttaatcttaagcaataatct

SEQ ID NO: 155492 - DNA, 191 bp, Homo sapiens
atttcacagggatagtctcaaggttcataagcagctccaaaggtacttgaagatatttctgaaagccttaatcagaattggcaatgtttcctctgatgctgtggataccattcgtcctcctcagtaataataagcactaatatctctggagcacttgggatatgccaggcttcatcacataccatcttatt

SEQ ID NO: 155493 - DNA, 270 bp, Homo sapiens
tcttctgaggccctaataataatatgctgaatgtctggagcctctactacataacacatgccaaggatacctttgggtattaatttaatgaagaattgtagtagaaatgacagttgtgaatttaaaaatccatttcacaggaagtccttaaaaaagattatttaagcatttcatcctttaacttttctaaagtgcttactcactgtacatgatgccatttagttattaaagtgagtaacacagtctcaaacataaaatatcttattggac

SEQ ID NO: 155494 - DNA, 626 bp, Homo sapiens
gcgggtggctgtcctgtgcattgtagcataattagcagcatccctcgtgtttacccagtagatgccaatagcacctccctctccagatatgcaaaccaaaatgtctctaaacatttccagaagtccactggggacaaaatcgtctgagattgagagccacagcactacactgtcctgcctcccctcatgtaagtgttttctgaggggctgcaacaactccaccttgtccagtgtcttcagctgtccctcttctttcacggtgatcttcatgaccgtgcaggtagccccttgtctttgccacagtcaacagaaggcttactagccgggccacctttcctagcaactcaacctctctgtctcccaggcacagaaggcacagggcttggggcctgatagacacctctatagctcttattattatttgaatcacaggagttccctggggtcagagcctggaggagaagtgccccgaacctgctgaccctctctggcccagagctgtggacactgctggttctgtgagtttgttttcctggttgagcaagaacaccacacgatggtgttgggccaaaactggtcccattttatgctactatatctccactgcccaggctggagtgcactgg

SEQ ID NO: 155495 - DNA, 242 bp, Homo sapiens
ccagatgtggtcctattttcattgcagctaatacaaaaccaaatgggctaaggataaagttgtattcttagatataagaacttgttgacaggaagggatatgaggtaactgaacatgtataaaacatcttcacctggaaatatgtacaatgaaccaaagataacaggccatagttacaacaagtttttcaaaagtaactagccgcaaaatgctgttcttgcccaatattcacagtggcttca

SEQ ID NO: 155496 - DNA, 237 bp, Homo sapiens
catcttcattttcctgtggccttctggctcttccttccccaattcttctgaaacattattactgtagctattttctaaggaaaatccaatcatatcattcctctgtttaaaattcagcttaaaaatgctgaaaagagccaggcacagtggctcatgcctgtaatcccaacactttgggaggccaaggcaggcagatagcttgaagccagaaggtcgagatcaacctggcccacatgg

SEQ ID NO: 155497 - DNA, 236 bp, Homo sapiens
ctcccagcagccaggcgccaatcacccagattcagaataccacgtctgggcaattttaacttaaaatatcccattgcatttcctaggcaatactaaatggatagcctctcaatgatgtgactaaaagaggatagtccttgccaggtagtttctccttaggccgagctcagagaacactgaaataaaacaagtgggtgttttatcaacagaggaagaaatccatgggggggccgggg

SEQ ID NO: 155498 - DNA, 511 bp, Homo sapiens
gcttggcacgctatagatctatctgtgtcaagtgcaagaaatactcaggtggacaagacatagattatccttgactgaacacagaatagacaagacttaggtgatggtgcgtctcatagggcagacacagaaatcagtggggaagggaagggcatttcagggaatttcatataccagggatataagagcttatgatgtgtttgaggagttgcaaatagtttgatggtcctgaacactgcaggtatattgttgagtgacagtagataagcctggtccaaaagatgcaggccagttcatgaagtttaaacaccttgaacaccttgctaaggctttatcttaaaggcagtggaaggtcatggaataattttaagcagggtattgacttagctttgcattttggagagattactaatcatgtggaagatgagtttgtagagagactaatgcattatgcaaattctatagtaattcaagtgaaagatcatgattgcctgagtgaaggtgatgagtc

SEQ ID NO: 155499 - DNA, 444 bp, Homo sapiens
ctagagcgcgtgccctccagctgccttatccagatgtttccccacccagcagtgcagtaggggccgtggggcctggaagggtggtctttaaggagagagttcaagagaggccagagctcttgggtcactctggaacctctgtaggaccaggggctgccaggaattcagcagggggcactttgggggtccctggttctggaaaggaataggccagccagtccaggagaaacagaatgtgagccacacacgtgtgagccatggatgtgatgtaaatgtcctcagccacatttaaaaaggccagcaagaaacaaatggactgaatgttaacgatacattttgtttgacccagtttatccaaaatgttatttcaacatacaatccatatataaaattattacagatacttcacattctttttttttcataccaaatcttctaaattcc

SEQ ID NO: 155500 - DNA, 338 bp, Homo sapiens
catccgccggtcccacacacggagacgtaggaatgcagtactcacgcacaagggaagtatgcggtactcacacacaggagaagtaagaatgcggtactcacacacagggagaagtaggaatgcggtactcacacacgggagaagtaagaatgcggtactcacacacaggagaagtaagaatgcggtactcacgcacaagggaagtatgcggtactcacacacaggagaagtaagaatgcggtactcacacacaggagaagtaggaatgcggtactcacgcacaagggaagtatgcggtactcacacacaggagaagtaggaacgcagtactcacacac

SEQ ID NO: 155501 - DNA, 480 bp, Homo sapiens
ggtctggacattactgggacgatcagtaaaactctgctccttctccaaccttttcatatgagtgagcttcaggggtgcagttggcctttggggagaatcgaaacttaagtcagaatacataggaggcattattaggtgatgatattgaggatgctaatcattgcattttgaattttagtgtcatagtggaaaaatttgagaaagcgataaggagtagaagattgacaagagaaagaaaatatcaactctgaagatggcacagtaaggagaataaaaacaaaaggctggtattttggctggtgatcaagaaaatggtgttctgaagcaagggaggttaaattttgcctagatgctaaatcccaatagtgacattatataaattggaggagggtgaaggagaagagaagcttcatgatttagctactgcctagcaagaaaccctgtctctggccataactgtcacatggggaggggagccag

SEQ ID NO: 155502 - DNA, 313 bp, Homo sapiens
cagcacaccagcagaagacacctaaatagcagattcacatcagtttctggttggttcattttagacatgaatagacttcacatcattctaaagcagctaagagatgagtatggctgcactggaagaatggaacctgaggggtgggactgctgtttccattaagcttttcagtttacatgtgtctattacattgctatacacaaaagcattaaaggacaaaaaaagaagaaagaaaaaagataagcatgcagatggcttgtcccacaccaggagatgagaactaaaggaatgatgatgtcagaaccctctcccc

SEQ ID NO: 155503 - DNA, 405 bp, Homo sapiens
caggcatgagccaccgcgcccagcctggaagttttattctttttccttaagaatgtttcttcaagcgtgagggatggccacagtgtaggtcatttaaccgagttctcagtttgggtaagagttgctcagccacggctgggtgttctcatcgttcctgggatatgccagttgccgtatgtgggattctgttcagaaccccattagcctcgagcacggaaacacgtggcagacgtcccaccctggacgcactggtgccctccggtgtttgctgccctgcttcaggcggagacacaggcctcccgctgcacacctgtggatgggctctcgcgtgggtcgtcctcccactggccgcactctgtgccccatggccctcctgcgccccgcccggcgtcctctcacggcctc

SEQ ID NO: 155504 - DNA, 316 bp, Homo sapiens
aatgttcttcctcgttttttctggaccacagtcgtctgcattagaactacctggaaggcttgtgaaaacagagttgtgactctaccccagagtttccaattctgtaggtttggggtggggcagagattctgcatggctaacaaccactcagaggatgcagatattgctgatggagactttgagaaccaccggtctagacccaattctgcacttaatttcatctaacccattccttttcatggtgagttccttatcagcagaaaccttgccttttccatcctctataaaactaagcattgcgaccggaaagctaatc

SEQ ID NO: 155505 - DNA, 453 bp, Homo sapiens
ttatatttttacatacaagtaacattttgcacagtattggacatgtagtaaatgctctatagtatgacttttaaaataaatactattgaataaatggtggaatcacttaatcacactaacgcagataacagttctaaaactgaaaaaaaaatttaaataaacaactatttgaaaacattggagacaaaccagaatcgaatagaaatgggcaaggagtgtaatcctgaaagatgatagcagcaagggggaaaatttaagagtatagctttttgcctgagggcactccccagtttatgtgctgcttgggacatcaaaaagtctgaactttactggatagaagtatcagaggacaaggttaatagctggaagagcagctggaaagttaggggaaaataatgtaaggggattagcattaattcccttctgtaagcaatgagatgtaagctacagaat

SEQ ID NO: 155506 - DNA, 554 bp, Homo sapiens
ttgttttgtaccccgtgatatttctggagagcaagcaacaagtgagccaaataatctgggcctggcaggactacagaggtcaaaagggaggacatgagaagccacgagctgtccacagagatggcagccttctccctcccatttagcggggctggaaatgagctccctgtgactcctttctgtccttccccggctcctcccagtcacctcagtgtgagtgatgagtagtgcagtgacagcctcgaccacataccacatttctgtcctgtaatagctttgctaccgacaactttctttctttttttttttggtaccaaatttctttatttgaaggaatggtacaaatcgaagaacttaagtggatgttttggcacaacttatagaaaaggtaaaggaaatcccaacatgcatgcactgccttagtgaccagggaattcgccccatggctatggggaaattagcctgaggcttagttttcattatcactgtctcccagggtgttcttgttaaagatatattctgccaagccagaatatcaggggctcctctagtgc

SEQ ID NO: 155507 - DNA, 398 bp, Homo sapiens
ctaaaaatcttaatattctttgtagtagagattcaaacagtaattctaaacagctatcaaaaatccttaaattcagttttgactacagttaatgaagaacatacagtcctttatccttttgctaaacttcaagaaagcagtagttaagcctgatacaaaaagtttaggacacatatttcatttcctacagctttcccagattccttaaaaatgttgaaaacagaccaaattgtggtattcactggagctctggagagcccattaaacatgattttgtaaacatgtcaaggttattacataacataaatttgttactctagggaaggtaaatattatatccctgttttaagtcaaattttaaaccaactacacagaaagattttactgaacgccatcaa

SEQ ID NO: 155508 - DNA, 612 bp, Homo sapiens
ctgggcatccctcagcttctgacaaacaactgccttcattagaaaggcccagaattccagccccagggccacccatcttcttggcagtcctgagctcaggtcacctcatgtttttatttttacacagcctccccctggcctcacacatgtagcctgtggcatgtgagcaatcaagcgacaggcaaccaaaaaagggtaggaggcaaagaggcaaggaataccgaatctgtgacatcttcccccaaggaacagcggcgtcgccagtgtctggataaatcacgttttatctcctttcgagagggacgcagggcagagccgcttcatcttggtgatgtcgtctgtctgcacagtgttgtccatctgacagggagatggcccggccctctggcttcagagaaaagatgatgaaggagagcttgagcaagagtccaggagaggaacaagaatgacccagcaagcactcattgagcatctgctgaatgcaaagcctagtgctccatgtagtgtgggggcagacaggaggggtgagctgcagagccatcatggagagatgagagatatccacgggaagcaggtcacatgcaataggatgcagttacacgttccactgtc

SEQ ID NO: 155509 - DNA, 412 bp, Homo sapiens
tttctttttttaaccaatgcccctgaggataaagctgttaatactacccaagctccaaatcaggtcaaataaaggcagtcttgtaagtggagttttccaggaattgagagacagtttaaataatcacaattttctggaaatgaggctttgtagaatatccaacattatatttcaatcccagtgtctgccagacttctggctgtcagcatgattgtgggctgcttgttttcaaagctactgcggagctgtacaaggagataggatagagcaagttaaaatgatacaaagctcactgtttttacttagattcagccatttttcttgaaaaaacacttcctgggttgctgcaagtctttcttaatttgagtggtttttgaaaaaggtcgacgcggccgcgaatttagtagtagta

SEQ ID NO: 155510 - DNA, 230 bp, Homo sapiens
agtgcaaaactggatgctgcaactgaattaaaatggaatcgcatgaaaacaggggctcttcacaaattgcctgtaagacacaagatgaaatccttttgaccagtcactccaggactacgtggaatagatttcttccaccttctcctgcagaagctactaaatgacaccagcagtaagacaggagaggaaggcatccccttggaagccatttaatgatcacctaattgttc

SEQ ID NO: 155511 - DNA, 873 bp, Homo sapiens
caggtaaagaaactgaggcttggagaggcaaaatgattcggctgaggccccacactaggttcctgacaagcgtctggcttctggaccagagttcacatcccatcccatcaggctggaagagactgcgggtgaactgaatgcctctcaacgtccctttccacccctggtggccaggctcattaggagaaaggatgtcagaatctcagtggaggtgtgaggatttttctcccaaagtcataaagcggaaggcatcctgcctgtttaactggcagcccgtcttctggcctcacctcccttcaggtactgcttttttatctcctcctaaaatgcggcagcccttatcgtcccaatctcaaatttcactccattttttttattacacaaaagagaaaaaaatctgtcagtaaaactgtctcctcaaatttattcgccgagactgagggttttattacgaggaaaatacacccacaccccacacatccacacacatacccacacaccccagataaagcactgaagaattatccgagtcgtaaatctctgtttcaggctgagggacaggggagtttcaaggacgagactagttttcctttggttttatttacatctgtttctctggggctgtgtcagggccttactgtcagccagaggagtaaataactgcttctgtgaaacctgcttcaggcagctggagacaagtgcttatctcagctgcagggtgagggatctggagggcaggccccactgtcccagctgtctgtggtacacactccttcctccctcagcctctcggaaggcaaaggaaatgggaggctcagacacgctcaggtggggccagcgggctagcagctatttgcaaggatgttattctgt

SEQ ID NO: 155512 - DNA, 861 bp, Homo sapiens
gctgtaccaggtcctgggaacagagccgaatagacaagaatgttcccattttgcaggtaaagaaaaatgtgggccagatcatggagggtctccacagcaaaggagctcagcttctcctgaaggcggcaggaaagagcagtgtgcgctcaggggaagcttgctgccttcacagcacctggagaagaaaggaagtgggatgagaagaggatttttctcccaaagtcataaagcggaaggcatcctgcctgtttaactggcagcccgtcttctggcctcacctcccttcaggtactgcttttttatctcctcctaaaatgcggcagcccttatcgtcccaatctcaaatttcactccattttttttattacacaaaagagaaaaaaatctgtcagtaaaactgtctcctcaaatttattcgccgagactgagggttttattacgaggaaaatacacccacaccccacacatccacacacatacccacacaccccagataaagcactgaagaattatccgagtcgtaaatctctgtttcaggctgagggacaggggagtttcaaggacgagactagttttcctttggttttatttacatctgtttctctggggctgtgtcagggccttactgtcagccagaggagtaaataactgcttctgtgaaacctgcttcaggcagctggagacaagtgcttatctcagctgcagggtgagggatctggagggcaggccccactgtcccagctgtctgtggtacacactccttcctccctcagcctctcggaaggcaaaggaaatgggaggctcagacacgctcaggtggggccagcgggctagcagctatttgcaaggatgttattctgt

SEQ ID NO: 155513 - DNA, 100 bp, Homo sapiens
ggggcaagcagtgggctatttgaaggctccacaggagcacaggagagggttacctcggtccacccactgcactctgaaacttgaaaaccaagccaattgt

SEQ ID NO: 155514 - DNA, 514 bp, Homo sapiens
ataaaaataccataaagcaaaagactggtgaatctgactacattaaaagcaatgattttagcagcacccattttaaagatccttcccagtctgcagcttacattttcaccctctcaaaagtgtcttctgtccatttcctgtggcagggtctggggaagaggctgtaggcccgtgtccggccatgaagatggcaagaagcctctgagacagcccaagaagcaggcccaggagagggacagagatgatgaggcttccagcagaaagcaaaacagaccagaacctcaaggggccgaaagcacaggccgcagggaggcccagccacagctggaactaagacccctggcggaaagcacgctgctccctctgcctgggcggtggcggcctggactccactcctgtttcaacacctgcacccccgccaggacagcttttgccatcttcagctagagtgagcgttgccctggagcctgttgcactttcaagcataaacttttctttttttttttaaattaaa

SEQ ID NO: 155515 - DNA, 602 bp, Homo sapiens
tgttccagggtcttagtgttccttgtctcttcgcagtataacactcatatgcttatggctggagagatacttagctgggtgatagttaaaggttaatccgagaatgagcagtggatatagccgggagctcaggcagctcggtggatatctgagaaatggtctaattcatgctcaggagctgtgtgcctttccatcccttgcggctccctatccctcactgccaagggttctctctcctgcttgggcttagtgtcctacatggggtggtgaagcgatggagctcctcactggcctcgcttcactactctcctccccccaggaggaacttgaaaggagggtaaaaagactaaaatgagggggaacagagttcactgtacaaatttgacaactgtcaccaaaattcataaaaaacaatagtactgtgcctccttcttctcagacaaagggaaacaccggtgtttcccatctctactaaaagtacaaaattagctaggcatggtggcgcatgctataatcctggttactggggaggctgaggcacgagaattgcttgaacctggaaggcggagtttgctgtgagccaagattgtgccactgcactc

SEQ ID NO: 155516 - DNA, 300 bp, Homo sapiens
  misc_feature (220)..(220): n is a, c, g, or t
tagtcagagatcccgagttaagggctacccatgtggctttagcacagtttttcaagttcttcatctttcaaagtaggataccagtacctgcttcaatactcagggagggaggatcagtcagggcacagaggccttttagagcaatggaattaatgtggatgacatcataatggagataaatgtcattacacatttgtccaaacccctggatgtgtaaaancaggagtgaaccctaatgtaaactatagactctgagtgtccatgtgggttcattagttgtaatgggtagcccttaaactg

SEQ ID NO: 155517 - DNA, 419 bp, Homo sapiens
tagtcagagatcccgagttaagggctacccatgtggctttagcacagtttttcaagttcttcatctttcaaagtaggataccagtacctgcttcaatactcagggaggatataacagctgcagagggctggccatgcctagagtctcatgaccccttaggaaatttttcatgatgagactcaaagatagtgttcaatgttagactggtttcgctacagaaaacaggaatacttccactgaacaaccgcatacgaaagctaaatcctgctagtgtaaaaatcatcagatttcactggatagaatgaaagaagaataaggaaagaggaatatgataaaaataaaaagagaagtaaaatttgtagcagaaattcaaattggtgatttgctgaatagcagaaaatctaaaatgaggaaaaaca

SEQ ID NO: 155518 - DNA, 401 bp, Homo sapiens
gatacatgcctccacaaacatcaagtaggtaaataaataagcagacagaagtgaaataaatggagaatcaaaagtgaaatcatagcaataattacttttaataattgctttgaagacatttccactattaattcgtgagcccagggtggaaggcaagcacatgtacagacccccaaccatgctctggtcctgaaggagaagtccattcaggaacctgtctagctatgtggtgggatccccagctagcggtggagatgagccctggccaggactgtcttatagcttcacaattaactgggcagttcgggacaggatgacctggtgaactgggagtgtcatatgctggcaagtgaggagccaggacttccaaaaaggaagtttgtcactgagtcagcgatgtt

SEQ ID NO: 155519 - DNA, 170 bp, Homo sapiens
atttgggaaaggctcagtggtgcttgccaaccccattctttttgttatcatcattcatgatagcattaaagactattaatagtgtcatttattgagtacttcctgtgtttataggcatggctctaaaccgagagcttgaggctgtcacttttcacatcgagccacatcac

SEQ ID NO: 155520 - DNA, 398 bp, Homo sapiens
tttttcacacaaaatctcactctgtcgctaaggctggagtgcagtggcgcaatctcggctcactgcaacctgtgccctccaggttcaagcgattctcctggctcagccttccaaatagctgggactacaggcatatgccaccacaccctgctcttttgtgtgtgtgtgtgtgtgtgtatttttaaagttatggcaagttttcaccgtgttgaccaggctggtctcaaagtactgacctcaagttatccacccacctcatgcctgcagttcccagccattcaggaggctgaggcacgataatcgcttgaactctggaggcagaggttacagtgcaccaagagtcgtgccactggacttcagcctaggtgacagagcgagactctgtctccaaaaaaaaa

SEQ ID NO: 155521 - DNA, 395 bp, Homo sapiens
ccaaaatttggggattacaggcatgagccaccgcgcccggccctgccctgccccctttcttttctggatgctgggtgtgaagacagagcccgcaggccaagaccgcaggaaaaaggcacgcagccgctgttgtatcttcagagtccacgcctctggcctctggggcctccggttcccctctgtggaatggggcaaaccttccagagataaggtgacccagggaccagcgctatgctaaggaggtctctggccttcgacaagcttctaatccaagaggcctcccagatgcacctcaaaatgtgcccatttcgcggacggaaacaccttccaaatagtaggctccgttccaagcgcgggggttattcctgccgggtcttgctggcagccttgtcggg

SEQ ID NO: 155522 - DNA, 251 bp, Homo sapiens
tggataaacaaatcatggtaccaccataaaatgaaacactacttagcaatttaaaaaaacactcactgatacagccaacaatatggatgaatctcaaatgccctatgctaattaaatgaagccagtctcaaaaggctgtatactgtatgcctctgttcataattacattatggaaaaagcatatatacaggaacagaaagcagactggtagttggcttggggtaaagggaggactgacttataaggggaga

SEQ ID NO: 155523 - DNA, 441 bp, Homo sapiens
catgatcctgcttttgttttgttttggtttttgcttatttcaggtatattagtatttaatttttgtgatttgtactttcatatatgaaaacaactgttaatactttttgtttcttaaccgctattaagtacttttgacctggatctcagccagtgttaatgctgttgctactacttgataccattgtaaattataagcagtttagttaatgcaacatagtatttgtcttttgataagcaacgtgaaaaatgttaaataaatcagaagtggtcagtggttccaataggctacttgttcttaacaggctactagagagaaacttctccaaaatttgttaatgctgccaacagtcaagcatgtgggctcctcctgaaacattcatttccccaggccaagaccacagctcatagcagctgtctgcttatgtgaccaggtagtgaa

SEQ ID NO: 155524 - DNA, 1909 bp, Homo sapiens
  misc_feature (1299)..(1299): n is a, c, g, or t
atcaggattcacctgtctgcctggcagtggtcagcccgttctcagcaagaaaccattgacaagaaagtaccacgtggcctgggtagggtcgaagcggaacttagtttcagagaattagaaaaatcttggaggggaaggccgaagaagaaacaattcatgatcaaccttctcagagtctttgtcagtaaccccatccccatcctgacttaacagtttctatgggaacagctcagcatcttgtgactggtggattcacttcctaaattggaggccatgacttgaggcctttgcagttttctgatttaggggaaagtgaagaaagggaaagagaaggtcatgcctttgtaatcattccgatggcctgcatcaatattttgggggcagaattagcttctgggtggccagagcctttggtctaaccctgagtgtctgggcgttgtgcagcagagcgagaaagccctggctgtttgacggggtgtgtccaccagtgcttcctggcacaggtcggccgggctgcttcacttcttgtttccagagattcacggcaccagtccccctctggtacccagcctgacagggccatgttggtgggaccaaagctgtactgttgtttatgacgtgtttcatgtcagtatttcaggcccacccactgggctccccctcccagattgccaaagttgtggagtctgtttttcttagttgaatgtcttagttctctgggataggtgaacagatctcaagagcaaggaacatcatcgcaggtctgaggaggctagattcccagtcctgttggagttttttaaatctgatttaatgatctgaccctcccactcctatctctgccccatccgagtctggctgctttcccagggggcagagcaggctgtgccaaaaggaactctaacgtgaaaagcgcccttcacttgtagcttgtgcaggccagtcttgcttacccctttagattaacaaaactgccttcacttgtctcattgggattaaaggatcagaatatcaagagagattgaagggggaagatgccagccaacaggtgatcctcttagaacctgccctctgattcctgcagctgaagagaaaccaaatgaaggcgattagtctctgcctggggtcccccttcccaagtgggtaccactagctggggaacctcgccccctccaccaggccctctccccagcctgtcctttaggattgctgagttcagtggttagatgttcttacggctcttctctgaaacggagttactgctccttcttaggcacccctggctcagccaagccctgnacccacctgacgggttttcatgtgtgcctagctgggtggtggacttggagaggcacagggacagcttggggctccaggggggcattgaggcagcactgatgcagcttaggattagcaaggtcaaggtgactggctttcacccatatgttcctctgtatggatttcactgagcctcgattgctgccccttttcatggcattttgttctgggattttgctttgaaagttagggctctttcagccttgtggtgagcagtgaattgtcctcgtcctctgcttcactttccagattttgcccagaaatttccctgcagtgcttaggaagctgcctggtagagcaggtttctaagtttgaggcgaagcagctctggaagctgcctctgtccttgctgttggaggcagtgatttaagtagcagttgcctagagatacatcctttctgttttaatctcaaagagagaaaaacccagtccctgtaatcccagctacttcggaggctgaggcaggaggcaggaggcaggagaatcacttgaacccaggaggcggaggttgcagtgaccctgagatcaccactgtgcgatctctgtctaaaaaaaaaaaaaaaaaaaaaaa

SEQ ID NO: 155525 - DNA, 272 bp, Homo sapiens
ggcagatcacgaggtcaggagttcaagatcaccctggccaacatggtgaaaccccgtctctactaaaaatacaaaagttacctgggcatagtggcagatgcttgtaatcccagctactcgggaggctgaggcaggagaattgcttgtgaaccgggaccctggaggcagaggttgcagtgagccaagatcgcacaactgcgaactgcgctccagcgtgggctgcagaggcagactccgtctcaagaaaaaaaaaaatcagctttctttccttc

SEQ ID NO: 155526 - DNA, 358 bp, Homo sapiens
tatttaagaagtgaatctggggagatatttgcacaaattgaattgtggcttgcttccagtggttgcaactatccgttgctttgattttggtgtatttagaaaaagaactggggaatgcagaaagggaaatgtgtcaggcttacaggagaaaattgtttctttagaaatgcaacaggcaggcacaccaccaaaagcatgttccataaaagaaaacaaataaatttgattttgtgaaacttaagaatgcagtgctctttgaaactctaaaatatacttaaataaattctcccctaggaagatttgtgggaactttttattggtggaaagtaggttggaacttctagtattaatagtaaaa

SEQ ID NO: 155527 - DNA, 718 bp, Homo sapiens
atccttcagagagaacaagtatacaaattcccttccaaacagccaaaatgcctattgcccctaggccccattcccatgcgtaacctaggaaatttatggaaacagctgaaatcttactaattttatgtgcttaaggaaatctgtatttgttctcagaggagttggcgtgatatggcaaagaaataccatcaaatttttgaaaattctcttagcaaagatgggaacagcataaatttagcctgggggaatatgctagacctgaataaaaaaaaggaaacagaataatctcacagtagtctgctttacacaatagtgtgctcatgaaatgctcagtaaataaatcagcttttgattattattaccatttcctcatatcaaagtaaaaaaattgggtggaagatgtgtgcgtacatagataatacctgtttttcagtcctgtggttaatttacagatcaattttaactttcaggtttgtaggaaaccatgcgagtggaggattataggaagggggtgtaaaagaattatttgcacaaacaattaaataaaattgcttacaagatctggtaaatgttaagatcgtgtaaaaatatatagccataaaatcaagtcttagtaacaaggagtacactctgcatgtgtggacgattaacatcacgatttaaaattctacagtgcctctgaattgccaaagaacaatcacatggggaaactatcgtt

SEQ ID NO: 155528 - DNA, 681 bp, Homo sapiens
ttcattcaatagaaatatagcttagatatacaatagaaaggtgactggggtccatagtacttccctgtgtattattgggtgtatacttggtttcttctaactttaaaaggaatatgagaaagatggagaaaatattttatatgtttcaatttgatctcaaattttggggagatttagtgttctctcagtttcattgactatttcttgaggttccagttgagtagtagcttcccaacaagatggactaacaggggtcagttttactttcctgcatgtagcaacaacagaaacagaaatcatatatgaaacaattgttttcaagtcatctgacattagggaatgaaggacaatgatccctgagagatgggaaacaaatgagacaagccctgcacttgccttagtttatcgtctttggagtttctaggctgtgttacagtaagggagaaagcaagtgaaacccagggaactccctcagttgaggagacagagctgagagtccagtaagaccaaagaagagcgggtgtcggcaaattaccatgtgcttttattgtaaataaagttttactggaacacagccacactgtttcatttttatcttgtctgtggccacttttaagctataatcactgagttgagtaacagtaactgagaccatatgacccacaaagcccaaaatattta

SEQ ID NO: 155529 - DNA, 168 bp, Homo sapiens
aaggatactgttgctttaccagaaaaagtgtgaatgttgataataatggaaccaaattcctaactgaccaagattgatgacaatcgagaggtcagatgtcttagtgagtctggtcacacaatgaagtctatctaaacctataagtctggctaatcatcagctctgtga

SEQ ID NO: 155530 - DNA, 197 bp, Homo sapiens
cagagccggggttgcagccaagccgtccgacttgccattcaagccttcaactgtctccaggctaaccctcccagagcgcctcaccccctttactttcctatccagcagccagtattgttaccagaagcctaggagtactcaggattttatgtactttaagttgacgtgtgtgtgtgtgtgtgtgtgtgtgtgtgtgt

SEQ ID NO: 155531 - DNA, 130 bp, Homo sapiens
taccaatctttacttttatgctgaatgggttttgtttgttttagaaaatacctggttatacagatcttcaatatttttgtgtagatctacggatttagcaagtctttgaagtcattagaatctatcatgg

SEQ ID NO: 155532 - DNA, 773 bp, Homo sapiens
atttcaaaatgatttcaaatagaaagatttcaaggaataagttatacaaagatctctcataccctttacccaaactcacctaccgttaatatttgtcctgttaacgttattatttgcacgttccctctttatatgtatatatagacatatatgcatgtacatgcatgtacattcacacacacatgtatttttttctgaacaattttagagtaagttgccttgtcatggtccattgccctatatcatatatttcttaataggggcattctcccacatgactatggtacagttaccatcttcggttaatagaacattgattcagtactttgatctaacctactaccacctgtattccagtttgtcaattggctcagtcatgcctttcatagcattttttccctccagtccaggatcaatctgtggtcaggtgtagcatttacttgtcatgctctttagtctttagatttgttgtttaaaattattgaaaccaggctgggcacgctggctcaggcctgtaatcccagcactttgggaggccgaggtgggcggtatcgcttgaggtcaagagttcaagaccagcctggccaacatgatgaagtcttgtctctaataaaaattcaaaaaaaattagcaggtgtggtggcgggcacctgtaatccgagctccttgggaggctgagacacgagaattgcttgaacctgggaggtggaggttgcagtgagctgagattgtgccactgcactccagctgggcgatagagctaaactcagtct

SEQ ID NO: 155533 - DNA, 219 bp, Homo sapiens
gtgattaggtacctttgtttggttcatttttaactaaggagatttctttctttttaaaaccattctttaatcttgtaaaaatatcatttaatgggtggatgttttagctgtgatgaatgacaggttgtcgtaaaggaagaaaggtatgtggtttccagtaaacttttaattcttttgcaaaataaaaataacagtcgtacagagagtaaaatatatgaa

SEQ ID NO: 155534 - DNA, 267 bp, Homo sapiens
agatacacaaagaaacaagaagctgatgcctagtccagccacaggataaggcttttaaaggaaacaggaaacctgacaaaagtacgaatactgatctcagcacagcacagctctaggtagcagaggtaaagagaggagggaaagtaatccactttcagcattctgacatgatatcatgctactcaaatcattttcccaaacagtatacacagacattattttatttggtattaagacaaaaagctaaaggactgttttcctatggat

SEQ ID NO: 155535 - DNA, 225 bp, Homo sapiens
tgaggctcagaaaggtcctgggactcatctaacttcatgcagaaggtaaaccgccaggctgggattacatcccatgttgacctagtgccttcctcactatcatgctgcaaaaatgttacctcctaagagatctggatcaaagacctggattgaagtcatttctactgagatgaccaggcttttttttttttgccgaattgcccttttctggttggggggattcct

SEQ ID NO: 155536 - DNA, 315 bp, Homo sapiens
aaattggagactcccctcccgcctggcgtctcttcatccaaggttttctgagcatgactctgatttggagggttaatattaattaggagccagtttagacctcagttgcttgatgaggtagcttcaactgttgtcacgaatgtggctcctttttgcttgtgcctgcttttggtgaaagtttctgggtttaaaagccaaaggaagaaatatgcagagaaagatagaggaggggacaattactaaagaagtgcaaagcattctcttagaacttgagggaggaacaagaccagagtgcctgggtgggtgtgggttctg

SEQ ID NO: 155537 - DNA, 331 bp, Homo sapiens
ggtatttgagttgggtgatgtattttaggttggattcccaaggcacgggccctaaaaggaagagtccagtgcaagaggattaggaaggaagtgctcctaggaggctagtgagggtgtggacaaagcaagacaggcatggggtgaaaaccaagcaagggggccacgggagactccagtggaactctacacggtaagttctgccccgtgaaagcgtgaactgggctttcatgcttccatactggacagttatgggaggctggggacagccagggacattaattccagccactggctgctgtaggcaaagcagctacagcatttggaggaatct

SEQ ID NO: 155538 - DNA, 378 bp, Homo sapiens
ttacaggcacctgccaccatgaccaactaatttttgcatttttagtagagacggggtttcaccacattggccaggctggtctagaactcctgacctcaggtgatctgcccgcttcggcctcccaaagtgctaagaaacaggaatgagtcaccgtgcccctgccccttttacttagctttttagcaatgcaattataacctttaccttctctccaccaggcacagcaaggttatctaacaatgtgtttacttagaagttccacagaagaaaccttgaagcaaatcaggtctctggaactctcttccaccaggagattgcttcaatttacagcttacctctgcctgcgatggctccagccagaccacccagtagatacga

SEQ ID NO: 155539 - DNA, 122 bp, Homo sapiens
ccccctgtgtttttttctgtgagtctctgtgaggacatagggtttaggaaggtggggaggaatgctttctcctgggctgaaggaagtcacttgctgccagagacaggccagcctgatttgtc

SEQ ID NO: 155540 - DNA, 610 bp, Homo sapiens
caagtgattctcctgcctcagcctctcaagtagctggaattacaggtgtgcaccatcatgcccagctcattttttttttcttaaatttttactagagatggggtttcactctattggccaggctggtctcgaactcctggcctcaagtgatccacccacctcagcctcccaaaatgctgggattataggcatgagccaccatggcctgccttgcaaacatatcttttaactcacaatccgaaaggatatagacaaaaatatcagggaagggctttgattggtctcattcaggtcatgtgtctgtgcctgtagctggaggtcagagtactgcagttgagagccccatcagaatcccaaggaatgggaaggtgcatgtcctctacaaagcaggagagtcagttaccaaaataaggacacaaaagattctggttagacccaaataggacatcttccatagccagaatttcccttatcttcatgcttcaagtttattaaaacatgggattagagtggggcacagacatttactatcctagtttctccttggatgtgctcaaatttgtcaatatccctctccaaatgtgaccctctactctgaacataatctgct

SEQ ID NO: 155541 - DNA, 388 bp, Homo sapiens
gcctttctacatccttgagtacagctgcttatggaaaatcaaacctgctctggcagggttgtctcactggcagcaatggtggatgaggacgatcctgtcctcacaggctggctgcagcaactgccctggccagccccagagatgctgtccaagcttcctgtaaggtgaattgaggaggcagagtggaggtccttctgcagtcactacctacttttttcctttatctaccaggaagcaaagatcacatcctcccaagtccaccctgagattctaagaggacagatctgacaaagctctgaatcagctagtcctcaaagagagtccaacccttttaagcaattaagaattgggaggccaggagtgctggctcacacctgtaatcccagca

SEQ ID NO: 155542 - DNA, 220 bp, Homo sapiens
ttagtttagagatcactagtttgttataagagagatacaacatttacataatgaaatatttcagaacttcattatttcagaaataatgaaagaattatttccatgatgaaagatttcagtgggatgggcagcttcatattgatgccatttcaatgacgatttatttcagtctatatactttccaagaatgtctaaataagaaaaaatccttgttgctggg

SEQ ID NO: 155543 - DNA, 153 bp, Homo sapiens
taaagaggaagtcaaactgtccctgtttgctgacaatataactgtttaccttaggagtctgtaagactcctccagaaagctcctagaactgataaaataattctgcaaagtttccagatacaagattaatggacacaaatcagtagctcttct

SEQ ID NO: 155544 - DNA, 281 bp, Homo sapiens
aatctgctgagggatattgctgagcagtttgaagcttgtggtgaaaaaggaaatatctttgtgtaaaaactagaccaaagctttctgagaaacttttttatgatgggtgcattcatttcacagagctgaacctttcttttgattgaacagcttggaaatagtctttttctagaaccagcaaagggatacttgagggtgcactgagacctacggtgaaaaaggtagtatcttcacataaaaactagacagaaactttctgagaaacttctttgttatatgcg

SEQ ID NO: 155545 - DNA, 183 bp, Homo sapiens
gatccacccgcctcggcctcccaaagtgctgggattactggtgtgagccaaggtgcccggcctcatcagtttccatatgtgctggactgctcgatgtctctgcttggtagagacctcttatgtaagttacaggcatgagttgtctttgacccagagatgcgccagatgtgcctccaggtaccc

SEQ ID NO: 155546 - DNA, 609 bp, Homo sapiens
agaaactatcatggactcaatgtcatagactgaatgactgctgtgtgcaacatgcattgatgaatgctaaattcagagagccaaactttaaggagaaacaggttatttgtataagcacaaagctatcttcccaaaagtattgactaattactgtggtagttttaaggtatgcccataaattcgtgattctcctctctccaggaagtggagcttaattcccaatcccttgaatgtgggctgcacttagtgatttgtttctaacaaacagtacagaaaaggaaaaacagtcactttctagaggagaaacctgacagatatcactttaacctgaagtgatcgaggttaacctcaccaataaccaatcatgttgatgtcttgtgcctgctcacatgacacaagggcaaaggataccacctctgtgggtctttcccaaaatccataacctctgcttaatcaaaagaaaacatcggacaaatccaaaccaagaggcatactacaagacactacctgaataataatcttccaaagcgtcaaggttttattggggaatctaaggaaagggtatccacagattcttctgttatttgcaacttttctctaagtctgaaa

SEQ ID NO: 155547 - DNA, 388 bp, Homo sapiens
gactacaggcattatttgtgatcctcagtatagcgagaagctctgggctaggaggactgacagaaaagcaaaaattagagggctcatattctaagtaattttaccttattcttctaaatgcaaaatcttcatttaaacaattttttttcattttctgtttgcttttgctatttcaaaattaaggccaacttaaaatatatgcatgcctacttagaataaccacaagcaagcatttgcttgttggcttttacagaatcctatgtccaggaaagaaactatttcctacatgcattattgaaagactaatcatttattagaccgaaagtcattaactctaattgtttcaagatttacttgcatttatgattctttcctgttatagatgcct

SEQ ID NO: 155548 - DNA, 450 bp, Homo sapiens
caacggctcagtggtgtgtgtctttcttagtctgatacttgaacttctcctttagtcataatctgcttacagatttcgtttttcatttgtttgtttctttcatgtcttttactgtgttttctgcaacgtctcttctttgttctcctatcagtttcttcttcatttctgtgatggctttgtttattcttctattttttttttttgtttagttctaccaattcatgcttccctattcctgttatctagacatttctcccttgagttcttgtatttcttgtttgtggtcttgttcttagtgatgatggcttcactgattttcttaaaatcaagcaaaattattcagttataatttttgtcttctccattgtaatttttttttagtgtactctgacagttggtacattatctatcatttttcttaaagtatctctcagtcagtaccatgccagt

SEQ ID NO: 155549 - DNA, 628 bp, Homo sapiens
tttggatgccatgaatcgagactgtggaattccactcagtcatttgcaggtagatggaggaatgaccagcaacaaaattcttatgcagctacaagcagacattctgtatataccagtagtgaagccctcaatgcccgaaaccactgcactgggtgctgctatggaggcaggggctgcagaaggagtcggcgtatggagtctcgaacccgaggatttgtctgccgtcacgatggagcggtttgaacctcagattaatgctgaggaaagtgaaattcgttattctacatggaagaaagctgtgatgaagtcaatgggttgggttacaactcaatctccagaaagtggtgaccctagtatcttctgtagtctgcccttgggcttttttatagtgagtagcatggtaatgttaatcggagcaaggtacatctcaggtattccataaaacctaccaaatcatggattcccaagatgtgagctttttacataatgaaagaacccagcaattctgtctcttaatgcaatgacactattcatagactttgattttatttataagccacttgctgcatgaccctccaagtagacctgtggcttaaaataaagaaaatgcagcaaaaagaatgctata

SEQ ID NO: 155550 - DNA, 541 bp, Homo sapiens
tttggatgccatgaatcgagactgtggaattccactcagtcatttgcaggtagatggaggaatgaccagcaacaaaattcttatgcagctacaagcagacattctgtatataccagtagtgaagccctcaatgcccgaaaccactgcactgggtgctgctatggaggcaggggctgcagaaggagtcggcgtatggagtctcgaacccgaggatttgtctgccgtcacgatggagcggtttgaacctcagattaatgctgaggaaagtgaaattcgttattctacatggaagaaagctgtgatgaagtcaatgggttgggttacaactcaatctccagaaagtggtattccataaaacctaccaaatcatggattcccaagatgtgagctttttacataatgaaagaacccagcaattctgtctcttaatgcaatgacactattcatagactttgattttatttataagccacttgctgcatgaccctccaagtagacctgtggcttaaaataaagaaaatgcagcaaaaagaatgctata

SEQ ID NO: 155551 - DNA, 844 bp, Homo sapiens
aatactgtcattacagtatttagatagattagaaaaggtgtcagtttctagtaacttcagaataataaaacagacatggtgatatgaaatactgatattttatacttttaaattaatttattcttaattattcccgcatttacagtagactttcccaatgctaacagaaaaatccattcaaaaaccaacagagtgagagacaaatgattctgttttagttttggctttgaaaactactacaaaatccaataatagtttcattcattagtgtttaaagacagctaaagaaatgccaaatatcatatcatcaactaagatggatatcattataccatcaactctatttaactacacatccttccaattgttcccaaagtccacacttccactatcctcaccacagcccactatgttgtgagagattgtccaaatgagcacctgaacaaaataaacaagctttggattgcctaattcaggtgtcactggggaataaacttccaagtgaattgtatttaatgatggatggtccaacgtaacctcatttccaagttcttaaatttgtcccttctcttcccaaacttgccagctggcagtcttggaaaatttttccacagtctcctttttctgacagcatgattggaaacgcaggcccttttcctttccgcacatatgggctaagtcaggttgaagaccctgcctgtaacagaggttatggagatctgggtggatcccacagatacctcttgcaggagatatttacaagaagttccctgaatctctttccattgtgattttgcattccttagcttatatcctttatattttatgttttcatttgtaaaga

SEQ ID NO: 155552 - DNA, 711 bp, Homo sapiens
gagtttgagaccagactggacaacatagtgagaccccatcattacaaaaaagttagccaggtggagtgctgcacacctgtagtcccaagctactcagaaggctgaagtaagaggatcacctgagcccaggagcttgagactgcagtgagccatgttcatgctactgcactccagcctgagtaacaaagtgagatcctgtgtcaaaaaaaaatgtatatatatagatacacatatttataagcgtatatatatatatataaaactgaaagtaagaattcaatatatcaatttgatgaattgaaagtatgaagagacaaaacaatagaaaagatggaagagaagataagaggcagagatacagtgacaagatctattaaagtgtaatttgagtcccagaaggagagaagagtgcagaatattttaataaacaatgactgagaattttccaaaacaaaagacatcaatccacagattatataaactctactaaaccccaagcataataaatgcaaagaaaattctctacctagacccattacagtgaattgtggggggaaaaaaaagaacatattaaaaacagattaatttcaaagatgcaacaaatatgccattgactgatttctctgcagaaataatgaaatctggaagacatatattctacgtgtgaaaagcaaattactgtcaaaacttctcttaaaaaataaagtcaac

SEQ ID NO: 155553 - DNA, 416 bp, Homo sapiens
ggtcacagtgaagggtctcagacgagccctcggggggctggcgctggtgcctaaactcactgagctaaataattacagcaaggctggggcctggaggaattcacccaggtctgctgctgttgacccttcttgcttcattttatttcttcttccaccctcctttcctctcttctttccctctctattcttgtctgctttcagtttcgtatgaactccattcagctgtgcttggttctgcaattctttgtctctccatttctttcttcccctcctctccctccctcttctctctccttctgtgtgtctctcttcccctcacttcacctctctacctctcccccgttgtctcctccccattctttccctctgtgtgtctctctcccctcactccacctctctctctctgcctctccccc

SEQ ID NO: 155554 - DNA, 536 bp, Homo sapiens
tcgacgttgtcgcttaataagcaaagaaggctggggctgggcacagaggctgatgcctgtaagcccagcactttgtgaggccaagttacaaaaaatatgtagggaaacactaagtttataaactaaaatttggctcttaacctacaattatttcactatcatgaaacattgctgttaaagtgcaaaataatgaaccatgatcatctacgctgcaactaacgagtctgtctgacaccattcagttctgagataggcatccagatccccagggagctggtgaaacttgcagcacctttgagcttcctaccaaccaatacttataagaatcgccaaggacagcctgggcaacatagtgagaccgtgtctctacaaaattaaaaagtaaattagccagacatggtgacacgcacctgtgatcctagctcgggaggctgacgcaggaggatggcttgagcttagggagtggaggctgtagtgagccatgaccgcaccactgcactccaacctgggtgacagagtgagactctgtctctaga

SEQ ID NO: 155555 - DNA, 173 bp, Homo sapiens
ccatagaagagcaagagggagaagcaacctggacctcaggacgacctctatcttccctcgactgtctgcctctaggtaaaagagaaagagacttctatcttattgtattttggggtctctttgtttatagtggcttagcctatactccaaaacaccaacgatttctcttaact

SEQ ID NO: 155556 - DNA, 149 bp, Homo sapiens
tcctgcaagcagtgtggggatgtgtactggaaaatgccataattaatggggcaatgctcagagtacacaaaagggtccagtggtgggaataattaccatcttaccaaaaagaatcaaactgctttcaagtaacataactgagttacaga

SEQ ID NO: 155557 - DNA, 750 bp, Homo sapiens
ttacatttcttctttgttcttgaaggaaagttttacattatataaaattttgggtttactgtttttctttgagtgttttaaatacatcatcccactgcctgctggcctctgtcgtttctgatggactgttaatctgagtatccctttttcatgatgaattggttttttgtttgttttttctgttctcaaaattttctttctctttggctttaatagtttggctgtgtgtcttggtgtgggtctctttgagagtatcgtatgtggacttctttgagcttcttggatttgtagattcatgttttttctcaaatttctaaaggtttttggccatgatttcttcaagtgttctctttgttctcttttcttttctggcagttttataatgcatatggtgatccacttgatagtgtcccttgggtcccttgtgctttatttatttttcttcatcgttttttctttgtgctcctcacacttgatgtcatttgtcctattttcaagttcactgtttcttgtgcctgttcaaatctgctgttgaggccccccatttctagggaactttatatttcagttatacttttcaggtccagagtatctgtttggttcatttataatctccttattgatattctcattttgttcataaatcattttcctgatttctattagctacttgcctatattttctttagccctttgaacatatttaagatagttgttttaaagtatttgtctaggaatatacattattac

SEQ ID NO: 155558 - DNA, 127 bp, Homo sapiens
aagacaactaaaattcagccacataaaccaccaaaatgtattcaaagtccccctccaccaaacccaacccaaaccaaacacacaaactttaacccacctattccatatagaggaatgtctcctcagg

SEQ ID NO: 155559 - DNA, 424 bp, Homo sapiens
aatggaaaagaaattaacccagacaaatcactaaactccaaataaccaaagacatcaaaaaatgtttcatctcaagatttgttttaaaaagtgtgatttaaaccaagatgctatttttctgcctatcaaggtcacaacttttttatgatcataattgctaggtagaatgcagtgaaattggtagcactcttatttgctgaaggtgggactataaattgatagagtctttctgtgaaataaatattgactctatttgacccagtatactcacttcaagacgaattcaatttttaggaaatggttagaaatatggtcaaagatttacatgcaaatgagcttaaaaagcactatgataatagcacaaggttggagcaacctacatctccagtattatggatatagttaaataaaatatactataaag

SEQ ID NO: 155560 - DNA, 219 bp, Homo sapiens
cactacaaaaggcactgcgaatacagtgtctgtgccaggcattgtctgaactcacctaaacaaagtataaatagaagcaaaccttttcaatgtaagaacgataatagctaccatttcctttgaggggcatactgtaatttcactttatctcacatacagaattagaataagtttattggcctgtctgggaaaagaaacctgatgtcaggagttggagac

SEQ ID NO: 155561 - DNA, 604 bp, Homo sapiens
tccatccaccactagtcctgcctccctcgtttgccaatgtctcacctaaactgtggttcagagacttaaacacaattcatcaacggtgctctaactaacccacaaaacaggacaacagactcgatgtaatctaggcacccatcagtgcaacctgagcttgctgtttttagcagccacatcacagagatgcctcacataagcctgtgcctcaataaactctgagctacttttcatctcgtgcacttgagaccgtccaccaccccccaagcatttctcaactcctgcagatcatttatccttagtatctcatgttgctgattttagaacattattacaacctattcagatcattctgaaactagaatctgctatctatagtattagtcatctctcctaattttatgtgacctggaaattagataaacttactttgatccaggtctttacagaaagaggatactgtgatttaaaatgtgctattcaggctgggcgaggtggctcatgcctgtaatcccagcactttgggagggtgaggtgggaggatcacctgaacctgggaagttgaggccgcagtgggccgtgttcgtgccactgcactccagcc

SEQ ID NO: 155562 - DNA, 213 bp, Homo sapiens
ttagtattagcttactttcccatgtgtgccaatctggtgggctgaaaagttatttgattgtggttttgatgtgcatttccctgttctttaatgaggctgtgcatcttttcatatactcatgggtcactcatgattcctctcctataaggtgccaatttgagtcttttaccgatcgtcccttatggttaccttcttcttgactcatcccagcag

SEQ ID NO: 155563 - DNA, 369 bp, Homo sapiens
ccagtcttcgtcccatcagtgtgaaccaacgaggatggttggtcacccaaccttgtttgcaggctacaaattcaaccagctgccctgttacttactgctaccaggttgccaagatcctgccagaaggctaagtggggaaactgctccattcctttggctcccactaccagtcgctggtataggaaccccccaacaacataaacagcaaccagtgatgcaaacctgatgggagaagatgcgcccatcaggaagaacagtacaatcgattcatgaaattggttggtggcaagaggagatcaagaagtaaatcttcagatcctgacctgaggcgatccttagataagcaacctactgatagtggaggaggca

SEQ ID NO: 155564 - DNA, 363 bp, Homo sapiens
tgcaggatgctgagagcagtgtcccttcaatattgtgccccaggaacctcaccttggccctggccctgctgttaagttcatgcctgtaggccaagttctacttctgctcctgagtggcttctgaccccgactggaagtactgcacataaattctgccccctcagtccccatctggtgatgcttgggaagtaagtcatcacccaacaggctcttgcttaaggcagctggcaactgcaaaccctaagagcagctgcggtcatagatttgaactggtgcatagtcaagttattgttagccctgatatcctcattggtaactttcctcatgaccaggactgttccctgctagtagccccactgcttt

SEQ ID NO: 155565 - DNA, 116 bp, Homo sapiens
ccgcggctatgagaataggaaaaaaaaaatcttctgtaaatcaagatataattagaacttatactcagattttcctttaaaggaaaacaaatcttcaaatgtcttctaaatgagag

SEQ ID NO: 155566 - DNA, 648 bp, Homo sapiens
caacattttcagagccaagactccatgacgagttaggcagagcacacttcagatttttagacatctctaacgtgcaaaatatagtgctactaacatataattcctcctctcaagaaatctagtttcaataatggcaacgaatggggtagattccttcctcttcagctgtctcccaaggtctcaccagtcaataccctaaacatattcaccctcttaaattttcattagccctcctggggtggctgggcccacagtagtaaagcatataaagagagggcagaaagaggacggcaaataaagaacctatgacattatgtgttgtcattggaagagaggccgcattaggtggccctcttttttaatcagcactcaaggagtgttgggcccaagcccacactccacatgtctccttgactggccactgttgggggtctctgtggacaaaaggaggcatcagagctgatgaaagtcagctgaggtcagtggttcccatagtgtgtccctgaaccagcagcagcatcaccagggagctggctacaaatgcaaattctcaagctcaccccccgatctactggatcaggaaccctgaggacagggccaatcatctgcccatcccctccagggattctgatgcactctaaagggtgg

SEQ ID NO: 155567 - DNA, 633 bp, Homo sapiens
ctctcgcatgccctgaggggtgaagcgcgtccagtcagagtaagaggtggaatctaccccacaattcggaggaggtttgacttggagccgcagtggcagccatcctgggaccccaaggggggcagggagggaggtgctgagtgcgatgcaaccctcggaacaaaggggctgcaacttgggcagagacaaagtccaagtaacatgcaccttgatcggaccactcctgaagcctttatctcagagctttcacctgggagctgatagatggtcctcacttcttaatgtggtgctgggcctcaggcctggatggacacggttctgtcttggaggctgcacatggcagccccttgtggcattcctgggcacaggcccagcccacagcaccacgtcaacatcagccctggccccccaacaacccttggagagcaaccgtgtggggcccgggcccgggccctgggaggggctgctgcaggggattcagtgctgttggtcaggggccgtcctccacatgggtccagagagcaggtttctggtaaagaccagcagggcgtcatctttaggttactccgactccctcccagccctaatcttagggacctcaaagatggggtgctcatgcctcccatgtaggac

SEQ ID NO: 155568 - DNA, 412 bp, Homo sapiens
taccaaatctttgaccatgccttctatctgttcctgggccacattgacatcctctgtagggccctccagggtgatcttgtcttcgccctctgtgaactcgatgtgaacctttggcatctgctgagtgattttggaggctctgagttgggcatgggcggtcatctctcgatgacatcccacatgtccgggcacagacacccagggcatcctagctgggtgagtaataggttctgaaacaaccagaagctggtcgaagtcctggaataatcgtgggtggaggaaacttcatcttgaagaaggcatctttcaggggagatgcaggggcagtctccaacaattcctgacagctgagtggtcagaaaaggcaaccgtggagactgctgggttttggttcagctcattggccaagtaa

SEQ ID NO: 155569 - DNA, 565 bp, Homo sapiens
cttaattgataatcagatacagacatatacttgatcagatattttataaattctgatttttgatgacaaacattttcaggaaatatcattttgacaaggaaaaatatcaaaatgaggtgctatagaagtctttatgaagaattatacacacatgtgagaaactggtgaatttgaaaaactaacaaaaacccatttaaagatctccattactgttcaacaaaattaaagcaaatcttatgtaaatataaaatgattcataaggaagctgtgaactataattagatggaaatattctgattgatattttggacacaactaattctcactttgccattagataacatagactaagatgtcatgaaatctgcatctgttcctagaagcactattaagaaaagagataaaggaaatgtctgctttataagtttatagcaactttgcacatatctaaaatgttacaattcagattcaagaaataagtgaaaggataaaaaggattcaagagcagccagtttatgaattgcatggactttacatgtgaaagagcttcctagtgtactcctat

SEQ ID NO: 155570 - DNA, 129 bp, Homo sapiens
aacgaacccaccaacagtcatgaataatttactggccgaattaacatcttcacagcttctatagttaactaaatgtttttcaattaaattaacacttactgaagaacttaaaggtattggtcaggcagt

SEQ ID NO: 155571 - DNA, 408 bp, Homo sapiens
  misc_feature (5)..(5): n is a, c, g, or t
ccttncctagtcaagatcctaggaaaagtagtctctcacctcctactcctggctccaaatagcctcaaaacatggcttctgtctccctccctcaattaaaactgttctcaccagagtcatcaatgacttcctacttcccaaatccatcagcacattccagctctaacagtcttccacccttcctggcagaaatgctgccgccctgctcttctgcctcccactctccacccatgcagacattactaaaccattactgctgtttcccacggagcctgtgggatcctcagaatcttctcaaggcagtgcactggaaggctgacaggaactggggcaaaatgtaagggttaggggaagagactgcatggagagactgagcagagaagcaggagtggagtccgcatttctgcc

SEQ ID NO: 155572 - DNA, 449 bp, Homo sapiens
attcccttctatccccctccccagagaatggagaaagggggtgcgaaagacttcaattcggtttgactggagaaaaacacagaggtggcgtaggatccacacatcccttgggggcagacccagcggcggacgcctggacaggcggcgggaaaggcgctgcgacgccccgggtgccccctccttcgacgccactggcatcacctccgaaagcagcaggcacgaaggtgccctgccacgggggctggacgcagtggaggcaggctcatcaagcacgaccagagctcagtcggccacacgtcctcctcaatgtcactgtctccctgctctcccaccccgcgccgctgcacctccctccccccggcaacctgggcgggagtcccaagcgtccgccccagagcggactcacagcccccgcgctccctcccgcgctgcgcccaccgcgcggccgc

SEQ ID NO: 155573 - DNA, 265 bp, Homo sapiens
gtgaggaatgagagggaattgaagggaacaggtaagaggtcaaaggtcacatctgaggtcaggacccaaggttaggggcagggggtaggaggtcacacttggggggatcaaaggtcacaccttgaggtcaagcaagattcagggttggaagtacaggtcacactgtgaggtcagggttggggtagagatcagagaagtcaccattctggggtaaaggatgaaacactgaggtcagaggtcacattatagagtcagggttgcctga

SEQ ID NO: 155574 - DNA, 455 bp, Homo sapiens
cagcactgggggtgggaaggagccaggaggaggcatgcctggtggaggaagcccagaccccaatgatgataccacaggattgggggcagagggtgaaggaggtgcatctgcaaacagctgatgagggcggtcaggctgggagagcgggttctgagctgccagaagtcgtccagctgctaagccatggcgctcacccttggagtccttctcgaaggcataagatacggtgatagggtggttacagaggtactgcccattcatggcttcaattgctgcaactgaagcatcaaatgaagcaaaattaataaaggcataacctttggagttgcctgtgtcagggtcccacataatcttgggggtttgtaagatgaccccaaaggcgctgaaagtatcataaagcaacttctcatcaatctcagggtccaggttcccattgaaaatgttggcccctacat

SEQ ID NO: 155575 - DNA, 399 bp, Homo sapiens
catatagcgaattgctaatatttattgggggtgtactgagagtgtttgtttatgttcattaactcatttatggtctcaatcctcacaattcctggcacctgtcttcatttcacagagaagcttgagacttacaagaggttaagttacttgcctgtagttaaacattaacctcacagccccatatctgcaattccaaacacccagagctctggaaaccacaatttgattgatcccttttcttttaagattggtgcagatttatttggcagaaaaacctgatgaagcttttaaaaatcatttttgttcggctgggcacggtgactcatgcctttaatcccggcactgtgggaggctgaggcaggcggatcacaaggtcaggagttcaagaccagcctggcc

SEQ ID NO: 155576 - DNA, 441 bp, Homo sapiens
  misc_feature (312)..(312): n is a, c, g, or t
  misc_feature (373)..(373): n is a, c, g, or t
gacagggtgtggatatacaggctgggagggtctgtgggcagcagccgaggcccaggttgggggagcctcacctaggatgaggctagggctggcagaagatccccacagaggagccaggaggaccccacagtcactctagctcccagggcctggaggtgcaggcgagccccgtggtctccgggcagccggccctgccccactcacatccgtactggcccgcgggccagtaatcatacactaagattaataaacagcacttcaaaattaaccgcataagggctgtgcttgcagcaaggtttcacaagacaaggnacccagattttttcttcccacgtctagcttgcagagcagctcccgtagccatttcaaaaanctctctcactccatctttggtctttgctgaacactccatgtacccaaaagcgccaatcctgtttgcca

SEQ ID NO: 155577 - DNA, 424 bp, Homo sapiens
gcacgcatgttgctcgtgtccccctcctctgttttcacagtcccattctcgggcaggtcactgttcagcagttgcagggtgtgcggccagatgggtatttgcggagggggagctggaaagcatcctgggctgggccggggagagactcaggcctgggcagccttgctaagtctcccctctctccctgtgtctccctgtttcccgccactccaatggatcctgttcttctcgcttccccggcctggggtcccaccaccctgtctccccggaaccccatgtcctgtgttctcactgacacctcttctcctttccctcctgctgcttccccctactacctgcccttcccaacccattctgaatgctccctccttgcccctgtgccctctgtgttgactctgctgatcccctcgtggccctccacgtc

SEQ ID NO: 155578 - DNA, 945 bp, Homo sapiens
atctgcctcctgtgccagctttcaggcagtactttcatgagagaaggtgcagaggtggattctgggattagcaggtgattgttggaaggaaaggggaggtctggaaggtccttgggcacgcacagttatctgtccgtgccagctcgtgggtcctgggtgtgaatcctggggaagtctgtatgaagcgcggtggaagttcagttggcatcagccagctggttctgcacagactctgctggctcatgtgggttccagccggtttcagccagttttgttcttgtcggcgtttcagctgcctgtttcttttcacgtttgccatcctgcaaactcgaatgtttgtggattttggtgtctaactctttggggtgccgttccatttgtcgggcctgaggggtctcccgtgcaggtggcttgagtcccatgtggccaggtgacaccgtcatgcgggtggctagcgtgttgggtgacagtctccagggctgtccgctgctgctgccccgggacctgtttccctttgtggtccgtcatttctcaggagacgccttgcgatggtcttagttccttttcttctgcttacaacagaaaacctaaggccatgtagtttataagaaaaggaattaacttgtcacagctctggaggctgagaagtcccaggtcgaggggccatatctggccagggccttcttcctggtggggactctggagccctgaggcggccagggtgtcacatggcaaggggagggggctaagcgagccggttccacccaggtctctcctcctcacaaagccccaggccctctgccacattaacccatctgtcccttcatccatgaatccatgaatggattcatccattcctgaaggcagaggccacatgacccagctgcctcttgaaggccccagtacctaatcctgccatctcccaataccaccatctccaacacc

SEQ ID NO: 155579 - DNA, 444 bp, Homo sapiens
ctaggccttttagaaaacatggagttgttcctttggccacgtatatgcgaatctataagaaaggtgatattgtagacatcaagggaatgggtactgttcaaaaaggaatgccccacaagtgttaccatggcaaaactggaagagtctacaatgttacccagcatgctgttggtattgtaaacaaacaagttaagggcaagattcttgccaagagaattaatgtgcatattgagcacattaagcactctgagccgagatagcttcctgaaatgtgtgaaggaaaatgatcagaaaaagaaagaagccaaagagaaaggtacctgggttcaactgaagtgccagcctgctccacccagagaagcacactttgtgagaaccaatgggaaggagcctgaactgctggaacctattccctatgaattcatggcataataggtgtttaaa

SEQ ID NO: 155580 - DNA, 488 bp, Homo sapiens
tcgactcctagtagtatcccactgcactccactaaaccatctccaaatgcgatccatcctttagagagatttgttggtgactcatgcgcgatttacatagacctcgaacagaatgctgttcttgctttgtaccgtccgtagcttccacaactcctgacttggaaaaccccttcggaacggtaaaatcctagagggcagagcctaggtgtgtaatccttcctttgaaattccctattgtattacatctggtgttcatggatgcagaacttgtcaaaactcacaatgagctgagggagtacaactggattatctaagttcagaaatgagaagtgctgattgttttggcttctacccagaatttagtagttacacagctaaagagtttctatttttaaaggttagatcatatggatatttcacaacatgctctagagtttaattactaagaaaatgactggatagggaagcttctttcaacgataggaaca

SEQ ID NO: 155581 - DNA, 950 bp, Homo sapiens
gagggaagagctatactgaggagagacggctctacttgatgtgcagagatacatcgggcagcttgagttgatctccagcttctctccagcagcactttccactagctgcccaacagcctcagtgcttaagacgaaaccaatctttcctctatttgtatttcctcctctattgccaattcctcttcaacagagtttcaaatgaaaatctcaggcacctttcgaacccacctcccatagcgaacctatcgctcactcccagggaggctccctcgtgcagcctcctgccctcactcggacccggcagtgtctctggtgcagatgcctgccgcttgcctcttccggaacaatgctcaaagttttctggtgctcagaaacctccaacccacccttcccactgcctgtgcgacaagcttcagacacctcactctggctctgcccactctcctttctacagtattccaaacctatcactctaactgcctacccttccttccttctctcccacatgaagtaggacctgcctgcctctgccttggtcatgccctaggatcaagcaaaatttatgagaattgcaaagttgtgatgttgggagaagttgccagagtattttctcacttttgtctcaactcccttgtaagacggtaaaatcctagagggcagagcctaggtgtgtaatccttcctttgaaattccctattgtattacatctggtgttcatggatgcagaacttgtcaaaactcacaatgagctgagggagtacaactggattatctaagttcagaaatgagaagtgctgattgttttggcttctacccagaatttagtagttacacagctaaagagtttctatttttaaaggttagatcatatggatatttcacaacatgctctagagtttaattactaagaaaatgactggatagggaagcttctttcaacgataggaaca

SEQ ID NO: 155582 - DNA, 427 bp, Homo sapiens
tacttaaactccagtctatatcactagtattgactataaagagcaagtgaaatatggatcgctcatgcctcacgcatgcgtcagtcactacccttgctatcaattgtatttctcattagcccgagtcctaagattgaatcccgaggctcagctgccacacctcatcagtccgttccgagctcccaggtcttgctcgtggttcctgatgttctcctgtgttaaatttttcttccactaaatctttctcaatcagtgaacataatggctcaggaactccaataagtaagaaactgccacaagcaaaacaaaaatggagtaagctatgaagagaaggcaaccaaacaatcacgattctcttcccgcaataaggtctagaaacaaaaataacaaaaagcctgggaagagcatcccaaataacaggcatgag

SEQ ID NO: 155583 - DNA, 278 bp, Homo sapiens
  misc_feature (113)..(113): n is a, c, g, or t
aacgatggtctcagctagagtcgctgggatacaggtgcctaccaccacgcccgactaattttgcattttggtagagatggggtttctccatgttggctaggctggtatcgaancttatgacctcaggtgatctgtccacctcggcctcccaaagtgctgggattccacgcatgagccatctgcacccggccatatgaaaagctaaaattccttagtgtggccaccaagaccctccatggtctgctacctcagctgaaccctcctcccccgtgacctac

SEQ ID NO: 155584 - DNA, 473 bp, Homo sapiens
gccgccttcttctcaaaaccttaaacttcaccaattctctgcttgctcccaacagtttcaaagcaatgagtgtcctgcttctccatttctttgtattttatattgcttgtatactgtcaaatagtttccctctttaccagcaaatttccactgaccaacaaacacactcggttctctcctgaagttaaagaaccaaacaagcaaaccaaaataaaaatacttgcttgaatcctcaagctgccatttctcttccatgtccatcctttcactccggctcctcactcctggtcacgatcttgcttccagaaagtaccacactctcacaccacctgtgtagtacccgatagtagtaccacactgtcacactctcatgccacctgtattccaaaaacacaaactcctatcacatctgtttcctgcccaagggctcttgggcagcctccacagtggttagaatcaatctccaggatgtg

SEQ ID NO: 155585 - DNA, 175 bp, Homo sapiens
tctggcgccctcacacaaaccgtgtttacagtagcctgtggcttggcccctctaactcggacccgggctttaccctccctcccctagggagggtcggcttggtccccaccccccagggaccttagcaccaagtcagcccccttaggatttagcatgtcccagactccctgaaaag

SEQ ID NO: 155586 - DNA, 409 bp, Homo sapiens
gaaaagactttataaactgcataacatcttctgctctttcccaggtcttcgggatataattcaatttcatgatgcaattaagaaagaagtctaaaccaaaggacacttaccgcactgcagcaacatgtggctatttatctagcgtgatttcacagagaatttttaggtcatccagggtttctgtgcctgtagtttttcatctctcaaaatgggattcctgactcatagtgtggggcgaggctgaaaatgcatggtatatatggaaatgctttctaactggaaggtgactaaggacacaggtactgtggtgtggtcctcagagcaaatcctttgtgcttctttcttttttattatactttaagttctggggtacatgtgcagaacgtccagtttttgttacataggtatg

SEQ ID NO: 155587 - DNA, 305 bp, Homo sapiens
agaccaaagaaggaaaaccatgtgaaacatcttttcattttctatcactatcagcactgtcaacggtgaaataccctcctagcaacttgttttaggaattcccagtttcacgaaagatgtttacttttattttcctactagttaggttttcttgattttttttctgtgcttagcaacaaattaaatcaagaatacattttacactgaatatgtagatagggacaatgtaactaacatgtagattactataactaccttaaaaaacaagcagtttttttttttttccttttttttctaataacttg

SEQ ID NO: 155588 - DNA, 546 bp, Homo sapiens
tccttagtggtagcttttgtatccccaggagctgggccagcctggcacaaaacgggtgttcagtgaggttttgagctaatgaatgtttgcattactggtttttctgctttccaaaatgccacatgcatgtctattctaatgatcaggcgaatgtacgcaaatggcctctggatccaatccactaagatggcccagactcacgtgaattcacaataagaagaagttcacagaaatcccaataaccaagctatttaaatatcaaagcaagttctgccccatccaatacattttgaaaagaaataatattggaagggcaagatacaaatctgaacaattctcagaagaatcaagtacttcttctatcagatgagtgaacggcttccaaatttatctcaaattttcaaacaaaccaagaccttgtctagcagaggcactgcaatgaagtgcggccattctatagaccagggtgcattggtcttaatttcttaacaagacacggccaatccgtagctgcgctcttaaatgtaaggagtaacggaacggtcg

SEQ ID NO: 155589 - DNA, 511 bp, Homo sapiens
ggctaacctggcaaaaaagaaatttactaagaataaaaattgaaaaaccagacctccaaaagtttgagaactaaggtagccctgagtatctacctgaattgacattggaatgattccattctaaccattaggtcacttctctgaagatttttatttctgacagagttgtgtatagtttgagtcatatacccattccttaggcctgagggctggaagagggaattggtcttcagggactgtcccaccacttattagaatttacttatacatttatgtatattgcttgtgaaatgacatgtacaagatcattcattcattgcagcatggtaatagcaagttgtctaccagtatcttaagtaaacaaaaagtatagactgtggatatagtatgtgtacataaagtttacacattagatttttaataaatatgtggcgtatttattgttttgaagactttggcttgaccatcttcatttacccagtctttatgccccttttatgtatacttggta

SEQ ID NO: 155590 - DNA, 440 bp, Homo sapiens
cacgggctctcaggaacctgctcctcacggtactgaacactccccgagcccctgccagctgaaggtaccacacaaagtgagaattagtcagaaccactggcccgacgcgcattttaacaaccggaaaagaagagctgcctcacgggaggctccactccttggtcttcagctgtcaagtttcttacatgacagaaaaaacgtctgttacggatctgtggaggcaaagttgacctacaagctgggcaatggaaggagaggcccaccaaggccactgtgggcaccagcgggcccgccccaccctgcgtcctgagcttggggtatggccaggagccctccctggggccagtctggcctcctgactctgagtcttcgcctgacccgcccgcccctctcacccgcgcggctgaggcaggatcccagaccacccgccctcacctctt

SEQ ID NO: 155591 - DNA, 520 bp, Homo sapiens
aaaaaataaaaacaactgaggcttcaggagtcatagaaattttgaaccagaagttagtttaggaaacattcaagggaaatccatcattttatgccagagaatccaaagcttgaagagaggcagtgacttggcccaggacacttgaaagcttgagaggcaggccagtctcagctcagctccttgttcccttctgcaactgccacaagtggagacagctgttcttccccagccaatcatacatatcccttgtgaatgcactaggggaccccaaaccaggtgtcctcctctggcctggcccatgctgctgtaggacctgtaggagctgggcgctggtccacttgctgctctccacccctgaccttgtcaggccaacagagtcaaacagtaacccagtattgaactgggacttggttaatcaaaagctggggagatagcagatatgagaggagggaataagttggcaatggggtagactagaatgctgtcgtagaaatcaggattcctgatttctgcttcatat

SEQ ID NO: 155592 - DNA, 625 bp, Homo sapiens
atgatttctatgagtcctttcagcaaatcactgaacccgagagacaaactagattcttcccattggtatctaggattcaaccagccttattatctgactccttggtcatgaccagtctctgttcagacacctaatatctatcgaaccccttaagttaaatcagcctccagatttcagcagaaataaatgcacagaaaaaataagcccatataatttgctgtagaatgtaaaaagcaacttttgatatttaggccaattacagtaataaacattaaataaaagagactgaccaactgcaaactggactattttcaaacttgtggccaatgactatcctctaggtaagagatgaaggtgcctcacaaattcaactgtataagatgtatgtgcccagcagggtcgtgcctgaagtagccatcctgcctttctaacctatcttgtcccatctatcacctcacaacattggccactaatgctgcatcctcagtagagatgggatcgtgacctacccaaacattcattataaaggtgtaagaatcaaagaagcatgttgtcagctctgcttttggcaataaaggaaaggtttttctcaggttttcctcttcacatggttttgggctgacag

SEQ ID NO: 155593 - DNA, 439 bp, Homo sapiens
aatgtagatgacgggttgatgggtacagcaaaccaccatggcacatgtatacctgtgtaacaaacctgcacattctgcacatgtatcccagaacttaaagtataattaaaaaaaaaaagataaacgagcaatcattcctaacatgtttcagtaagcaactataattctaatttcagaatcatcagaaaaaaagttctaaactggtacctttaaaggctcccttccccagaaaatgacggttttatttcatcaaattatttctttcttattttattttattttattttttcgctttttgtctcccaggctggagtgcagtggtgtgatctcggctcactgcaacctccgcctcccgggttcaagcgattctcctgcctcagccttccgagtagctgggattacaggtgcctgccactacgcttggctaatttttgtattt

SEQ ID NO: 155594 - DNA, 470 bp, Homo sapiens
tcacctgagggcaattagggagctgttgggggacacaccactttccctgcctggcctgagagtccctctagcttgattggcaacaaccaaaccaccagaagggcccactgtggggtaggacggaggggagatccagtttggaagtcattaaagttgtgattttcatctttggctccaatcttgggggaaaacatccatgtttcagacactcctggtgggcaggagaaattcgacttcctggttctcagaataaatgctggttcggggcaatagttgtatcaacaggacattctggagttggccatcagagcagcaccaatcaattacccaataacaagatgataacgcatggccccccactctcttctaaaggttactccctaataggatcagatagctgggggccaacaggaagttaaggggccttgggtgtcatttaccccatgttaaggctctttctgaacacacag

SEQ ID NO: 155595 - DNA, 374 bp, Homo sapiens
cgccgaccccctctaccaagtcctgctgatgttgattggaccaaagtgatggagaatctagtttggagtccggtaatcctggggaggcgcgagcatcactgcagctcaactgtcattcctgccttgcagctcatttaactgcctctggcagcactatttctggctgggccatctatttttggtggccagggaagttgttatttgtttcgttttgttttgatgtgttttacagtgctctagtgtgatgatgaagataacatctggttattccaggattggagggggtttgtgggtgaacccacaaaccccctcccggcggcatccggtgagctctcgctggcccttgaaaatccgggggagagggtgtaaatctc

SEQ ID NO: 155596 - DNA, 418 bp, Homo sapiens
aagctaattttttgtacttttagtagagacagggtttcgccgtgttagccaggatggtctcgatctcctgacctcgtgatccacccgcctcggcctcccaaagtgctggaattacaggcgtgggccactgtgcccggccatgttttttttaatatcagatagaagtgttggtctctgctgaatcctttgaggtacagctgccaaacagcggaagtacacttattctggggaataaagttgaacaaaattaagtttgcatctttttatccttttcataaccttttttttttttttttggacaaagtcttgctttgtcttaggctggagtacagtggcacgatctcaactctctgcaacctctgccttccaggtttaagcgattctcctgcctcatccttccaagtagctggaactacag

SEQ ID NO: 155597 - DNA, 275 bp, Homo sapiens
ccatctcacagatcatgtgttcgtccccattatggtggtatgacgaggtcgggcttaggggaagtgatttatggcatgagcgctctgtcttcatgaatgaattagttgccttttataaaaaggtctggaagcaactagcttaggcccattttgctgttctgttgttctgccacaggaggacacctagattgtgtcatctgtgaggaaggggcctccgcctgatgtggaacctgcgagcaccttgatcttgggcttcccagccaacagactgtgag

SEQ ID NO: 155598 - DNA, 363 bp, Homo sapiens
aagtgctggagatccctcccccatagatactgatgctgggtgggaattcatcccagggttctgtggggagtgggctatagctggttctggttttagggaggactttctggacatagatcctaattgcaatgaaacttacagtcatgtgagaaagcggtgcaggtgtctgagggttatttgtggttttccaaggcagaagtgaaaattcccaaggggtacacagttgttcaggtgagtacactttctagtaaatgaagccatctagcctagtcagggacaggaaggaggagcttggatgtttgctctttggtgtaatcctgccttgattcagatccagcctttcccactaagatgtgtgactag

SEQ ID NO: 155599 - DNA, 225 bp, Homo sapiens
atagaaagagcatggacattagcactagagagacctgggttcaaatctcagcctttcctcttaccatctgtgtgccttggtaagctgctatgagtcggcttggcatttacagaacggttataataatgttacttttttgttgtgtttttgggcttttattgttgttgtttttgaaatggagtctcgctctgtcacccaagctggagagcagtggcacgatctcag

SEQ ID NO: 155600 - DNA, 375 bp, Homo sapiens
gctttctggagcccaaagaaaatgtttagtacgcacctgctcttcccagcaagtctgtcatgtgcaaggagttgcagtgagtggcagcctgttcagagttgtggttcagggaggaagcattgctagagtgggctttgggcaggagcatttatctcatggagacagttttctgctgactgcatttccacctggaagggcatacagagtgttgtttcttctgcttgtgattttaaaacttgcatatcagtatctacctgttttgagtcttactagtattttatgcaggaacacaaaaaaaatacttaactaccttttttgtaaaataccgaagtgagttgttatttatttcagatttgaacttttcattaacctttg

SEQ ID NO: 155601 - DNA, 151 bp, Homo sapiens
catggttgaatgcttgcttctattgggagcagatgccaatcaagcaaaggagggatcttctttaatttgtcaggtatgtgagaaagagagcagtcccaaattggtggaactcttactgaatagtggatctcgtgaacaagatgtacgaaaa

SEQ ID NO: 155602 - DNA, 419 bp, Homo sapiens
caatctagtctcaggacatggtagatatcatagagcattgtcgaatctcacactcaacagcccaagtcactttcaaatagtttattttcaaaagaggaattatgattctgatcatttagtcaattcactaaagtgaaaagcatgaaaaaggaattaagagttcataaagcagaaagcctcgaacaatgttatgtttgtcagggtcaaagataagaaaaagcactcagaaagaaagaggggtgaccttggggataagacgagttttttaagcaccaagttcccccacgctttcctatattttcccctaccatccatgtctattaccttcacagtccagtcgtttttttcctgtggaatgcatcaggacagctagggagctttaaaaggtgccaggggctaccctaggtctatagaatcac

SEQ ID NO: 155603 - DNA, 511 bp, Homo sapiens
tcagctagtctggaaactacagggaaggtaagaaaaacaaaatgaaatacaattaccctgggcatgggtgcgggaatgtgaccggagtcgcatgctcctgtgtctctggacctgataaattctgcatacctcacattcctcagactgttctgagccgcttttctctctcaagttgatggatgtacggagttaaaacatattagagtgtggacatttgcaggtataaacataagcagctacacattttgctcatgttggtatagctttgaaactagctacgtgctcaaagtcacgtgcctactaagattagacatcaagacataaattatgtcttctgattacaaacccaggtctgtcttttctatttgcttgatttctggtgaaatcctctctgagcataaacacaaatggaggaatctcaaaggaaaacattagtagaattggctgtatgttttaaagtacatgaaataaatagcatagattcttgtaaatttgaaaacacgagtatctc

SEQ ID NO: 155604 - DNA, 204 bp, Homo sapiens
aatgagattcctgaggaaaggtgaacttcagggaatgagacaggttttaaagcaaagattctcctggttttggcaaactcagacattctggctattttactaagaagagattttctctacacttttcatcattacagtttcattcatgataataagccttatttacccccaggccagtcagatgtgaaatgttatattaatttc

SEQ ID NO: 155605 - DNA, 437 bp, Homo sapiens
ggatcgagtcggacccaaggtccttagcccaagggtcctacttctgttgttgttgagacacagtcttggtctgtcacccaggctggagtgcaatggcgcgatctcggctcacttgaatctccacctcccaggttcaagtgattctggtgcctcagcctcctgaggagctgggattacaggtgtgctgtaatttttgtatttttagtagacggggtttcaccatgttggccaggctggtcttgaactcctgacctcaagtgatccacccgccttggcctcccaaagtgctgggattacaggcatcagccaccgcacccgacccttgcttttcttttgaagtatcctattcttttcctgtcgtttctgtgaagcatccagggcttctctggtccaaagtcagtttttacatgaatgtcaggcttaagggattccagtgc

SEQ ID NO: 155606 - DNA, 489 bp, Homo sapiens
tcgccagagaagtagagagtgtgtttggcggggttagggtccctcccaggcagatggagccttttcccaggggcacaacctgggctgcccttgactgagcaggtttgaaggtactctagaccaccggatcatcttcacaacagtcccattaactagacgctcttattttcatacctttttggtgagagagtttaggtaaggtacccagagccatgtatcaggcagtaagtcactgaaccacgatttgaattcagccggtctcattcttctctgccttggagtccgggaaatggagaatgtagtggaggagtcaccccagtcaaggccaagcagtggggtgggggtggtgctggaagaggggctggatcacaaaggacaggacccggccaggtatgtgtgtgcaggaggagtggagcccacagtgggatctgaagtctgggaaggaaggcctcgttgttatactaaaatatcattccttgtttcaccgga

SEQ ID NO: 155607 - DNA, 227 bp, Homo sapiens
aaaaaaaatttgtgctgcgaggtaaagcatgaatgagtatctccatttcatatggcttccaatccagtctcacgagcttctcttagttttctatttcttgaattatctatagacctatcttgcactatactaagaagcactatctttttctcagcctctatttactcagatagtctcgtctttccataactccatgctttgtgctttttaacatagctgatacatca

SEQ ID NO: 155608 - DNA, 531 bp, Homo sapiens
gactcatgtcattaaatgtaagttacggccactagcatgtggaaatcatcgctcaagcaccttggcaataacagtggcatggtgtggcttcacgagtctttttaaggggaaaaagaagtgtttcgttcagtaattgctcctggatgggggcccagcctgcaacagcttggcatgtggaaggctctggtgccaggtacaatgctgaagaatcagatgcggaaagagagtctctctgaaccgcaaagccaaatattaggttgaaccctatagaattttaacctacaaaatggacaatttaatatcgtttcactgattggtccaaagcacattttgtagaatcaaggaaggaaccaagcccaagaaaagcagggcggggaagtcatgggggcagaactccccaccacaccccatccttcttgcccctaccctgcaccagcgatggcctgattcttgagtctggggtcccagtaacttccctagtcttgaattcttagctttgattcatccctcagggtttggggctcatgttca

SEQ ID NO: 155609 - DNA, 375 bp, Homo sapiens
aggtacctgcaaaggctggagacccggaacccactaagtcccagcctcagcctgggcactctgtgaagtcaccaagttaggttcaaaaatgaaaggaaagaggaaaccagatcatttgcaagagaaagcaaacccttcttccttgtaggatgaaatttgccagaacttagttgtgactgacgtatagctacccctttctccctctttccttctttgtctgtatcttctcattagtcaattttcattctttctttctttttctttgttgtactatttcaagatgaccactatttcagacactgttcccaccccaaccctaggtaggttgggagaagaatggataatgatttggactttgtttttgagcctaaaggt

SEQ ID NO: 155610 - DNA, 217 bp, Homo sapiens
gcagatgctggcaacacttgactcactaaaacaggaggcagttacaaaattacagtagtacagtacgtactagtttatagagttatgtttttgggggggctttcacatttgttgatttttattggcgatctctttttcaatacaatttatggcgtcatcaccatttccagtctgattatacaagtgctaagtggcagaaaggtctggaataaataca

SEQ ID NO: 155611 - DNA, 480 bp, Homo sapiens
gaagaatccttccttgcctcttcctaacctttgttggttgctggtggtccttggcattccttggcaagtaggtacatcactccagtttctccctccatcttcacatggccttcttccctctgtgtgtctgtgtccaaatttccctcttcctataaattgggctgggcgcggtggtttatgcctgtaatcccagcactctgggaggccaaggcaggcagatcacctgaggtcaggagtttgagaccagcctggccaacatggtgaaaccctgtctctactaaaaatacaaaaattcagtgggtgtggtggcaggcacctgtaatcccagctactcgggaggctgaggcaggagaatttcttgaacctgggaggtggaggttgcagtcatgcgactctaccccagcctgggtgacagcaagattctgtctcaaaaaaattaaaataaaataaaataaaagacatcagtcattggctttaggg

SEQ ID NO: 155612 - DNA, 189 bp, Homo sapiens
atgaagtgcagcaggtaggaagctcctgtttaggagttctctaaaaactcatttccttacccttctcctcctgagcttcctgaattgatgtggccacggtgggtggtacatctgcaagcattctacgtttccttgcttgtccacgaaatggactttctcatctacattttgaagctctctgaattgggg

SEQ ID NO: 155613 - DNA, 531 bp, Homo sapiens
ttggcatgtagtgatggacagtgcagttatcagaactagggccagccaggcagagggtgggtgaggattggtcagggccgttaaagggtttaatattttactttgagaggttttgaaggatccccaatacccaaatggagatgtttactagatcactgtgaggtttggtggcctcagccccaacagtccctcactgggtaccctccctcttctcttaaagccaatgtgcttcaggggaagctaactccaccccagacaggatttgaacccctacagatgtatgagatcattagcatgacacagttactattgattgcaaattacagaatacccagctcaagccaactcacacaataaaggggcccagtaagttgcataactagaaagttcaagacatccaagacaggtttcagcaatttgatttggtcattgagctgcgccctgcaaggcgtcaaatatttctgctgttctgctttgtgggcctggttctggccttcctcttggtggcaggatggccttcctcttggtggc

SEQ ID NO: 155614 - DNA, 466 bp, Homo sapiens
agttcgcagcttatttggtatctggcagggctttggagcatctatatatgctgggcacaggcccctcactgcagctgggggaaaatcaacagagaatcaagggttgacctgcaggtttacaagtctggaaagttaactagtcatcaactcaggggagagatgcatctaccagaatgccactgattaacacttttaaaataacctgggccaggcacagtggctggctcatgcctgtaatcaatcccaggactctgggtggctgaggcaggaggatcacttgagtccaggagtttgagaacagcctgggcaacatggcaaaaccccatctttaccaaaaataggaaaactagccaggcacggtggcagatgcctatggtcccagctatctgggctcaggtgggagaatcacttgagtccaggtagctgagacttcagtgagccatgattgtgccactgcattccagcc

SEQ ID NO: 155615 - DNA, 414 bp, Homo sapiens
gaggctgaggtgggcagatcacttaaggtcaggagttcaagaccagcctggccaacacagcaaaaccctgtctctacaaaaaatacaaaaattagccaggcatggtggcgggcacctgtagtcccagcgactcaggagggtgaggcaggagaattgcttgaatccaggaagcggaggctgcagtgagcagagatcacgccactgcactcctgcctgggtgacagagtgagagtccatcttaaaaaacaaaacaaaacaaggggtttgagggaaatccttcttcactgtttctggcttctcatggctccaggtgttcctgggcttgtggccacaaagctccaatctccgcttccctcttcgcatggccttctccaggtgttgtctcttctcccgtctcttataagtaccctggtt

SEQ ID NO: 155616 - DNA, 161 bp, Homo sapiens
atatccagtgacctatggggcagtgtcagatggtttaacatacctgtaatggagtgatgggagtggcgaatttgggagtgggaggagtggcagaaaaactacaagcatgaattgttttattgtgcttcacttaattgttctttgcagatattctttttttc

SEQ ID NO: 155617 - DNA, 232 bp, Homo sapiens
aaatgcaatatctgcacttgatacttcgcttttttttaattgatttataacactgctacttccacaaagcacttgaggcatcttgcaactaaaataccgatacaataaaaacaaagacatgtacaataagataaatactgagaagtaaaagaagggagaaaacagtatattcaatcaattttgatgaaagctagaagaaagtatagaatctgtctctcagcctcccatcagc

SEQ ID NO: 155618 - DNA, 371 bp, Homo sapiens
tgctggctcatttaactaacaagtcataggacaaggacactttcaggtacagctagatccaggtgtcaaatgatgtcatggggaccccatctctctccctttccttttcgcagtcctgcttccttctatggtgtcagaagtctgagacacgtggtctctacatggtggcacctggattatagcttcacagcaaggaagatttagcaaggaaaaatctctctttctatcactcccactaaagtcccagaactgaatcttatggaaccttctggggtcacatgcccacccctgaaccaatcatggaggctggaggaattaagaaagctgattggcccagtctgagtcatgtgccttcccctgagccaatcata

SEQ ID NO: 155619 - DNA, 337 bp, Homo sapiens
agctctatggacactaggaaaaaaccttgtagagagagtaaaaaatttaacacccatagaaggtccaggtatgccggcatacctggaccttctatggtgtcagaagtctgagacacgtggtctctacatggtggcacctggattatagcttcacagcaaggaagatttagcaaggaaaaatctctctttctatcactcccactaaagtcccagaactgaatcttatggaaccttctggggtcacatgcccacccctgaaccaatcatggaggctggaggaattaagaaagctgattggcccagtctgagtcatgtgccttcccctgagccaatcata

SEQ ID NO: 155620 - DNA, 190 bp, Homo sapiens
ttttcacctacttttcttttttcaaagaattcttctctttcatctgcttatatgaaaaataatgacacctctgaaattctttcctgtagttctgcagcatcaatgccaggaagacaggcctcatcctcccagcttctatgctgctcctttcagatcccttaccctgtccccattttcatgacacgggctc

SEQ ID NO: 155621 - DNA, 332 bp, Homo sapiens
tccccgtctcttaagtcctatatctgctcaatcactgagttatcagttccatcttctaaaacatttccatatctagtcacttcatctccactgctacctctcaaatcaaggtatcttccctctcccctatactaacatgatattctcccaaaggccttcacacatttacccagcctccttccatatcattttctatattacaaccggagtgatcatttaaaaacccaaataatgtcatttccatgtataaaacccttcaagagcttccaactgaatatagctttattcaggtttccaagaatcttcatggtcttttacaatggttaaaattt

SEQ ID NO: 155622 - DNA, 470 bp, Homo sapiens
atgatgacagatatgcagtcccttctctctgtggtcacatgggagaatcactcttgcctgctccccttgcattttggtggcatgttggactagttctgaggaatggcctgtgtccagactgcagccagagtccttgagtgagaatggtagagcctcctgctaccatgtgacaggcacgtaacatgagtgggaaacatgcttctgtgagtttgagccacagaacggcattcttacagagtgccttggagtaatgaaactcaaaactattttttaaattcatcatttagtattttccactaattcagactcattgtttagtgaaaagaatacagccatcggtaaggcacatgactgttattaacagtatgaatttagacaaattatgtaatagagttttagttttcttgtgtcaaaggcctcacctccacaaactacaaacaaaacttttgatgcttcaaattagtccatac

SEQ ID NO: 155623 - DNA, 309 bp, Homo sapiens
ggaggagaagattcacgagcaggagaagatacgggaggaggagaagaggcaggagcaggaggagatgtggaggcaggaggagaagataagggagcaggaggagatatggaggcaaaaggagaagatgcacgagcaggagaagatacggaagcaggaggagaaggtgtggaggcaggaggagaagatgcacgaccaggaggagaagatacgggagcaggaggagaagatgtggaggcaggaggagaagataagggagcaggaggagaagatacgggagcaggaggagaagatacgagagcaggaggagat

SEQ ID NO: 155624 - DNA, 216 bp, Homo sapiens
catagagggaggatcagaaaggagaaaagcattcagaggaaatagaaggtgcaaaagccgtgggagccagggaatagaattgtatgtttagggaactgaaagaaactcacttatgttcagagactcaagacttccctttctttctaggggagcatagagtcaatggtagatggcacaagcaggagaaagactagaaatgggtagaactcctcagtc

SEQ ID NO: 155625 - DNA, 363 bp, Homo sapiens
tgacatggagtgaacattcattaaatagcttctgagtagatgaaccaaaaagaatgtaacctttttgtctaaagataaaaaagagagaacactcaatgctgatgaagatatggagagaaggacatttcatactttgctaaaatgtgcagaacttggttcaagctttctagaagacaatttagcaaggtatatcaagaatcttacagttaacctccttttactcaagaaattcactgtaaggaatctctcctaaggaaatcattaaaaatatgcccaagattcatgtatttaaaaggttaattactataataaaaaatagtttttaaaaactggaagcaaattagacactcccaaattagagaa

SEQ ID NO: 155626 - DNA, 427 bp, Homo sapiens
aaaagtgcacatataagcatccggcgtgtggtcacacacagcaaatattagccattgtaatttctaatagctgtatctttttgtaacctgttctttttgcacacactctctctcatgtaactgtgttctggactacatctcactactctaaagctcacgtctagcacagaccagatgcttgaaaaacatccagccaacaagatgggaacacagcgctgcccttgtgaagacaaagtcaggtggggtgcagggtggtgagaccactgtgtgaggacctggggctttgggggccgctgaaggagcccctggtgggctcctggggactgggaagaggttatgagggaggtccaaagggtcggagcaggaggaaaagtgcctcaggctgaaggaggagctcgtgggtggtctggacgggacagtgtgcctg

SEQ ID NO: 155627 - DNA, 106 bp, Homo sapiens
cctgatggttgcttgtgaaaacagcactttacaaacacgttgccatatttacttgcgcattcacactttccaccaatttggagaagaaactcagaagagaggcttt

SEQ ID NO: 155628 - DNA, 355 bp, Homo sapiens
tagagggaagtagctttcaggctgggcattgaaagacaggtaggaattcacagagagaatatgtgtggcaactaaaggcagagggtaggtataggaagaatggcatatggcacatttgaaaggcaatggatagctggctttcttagtataaggcgtggatgtaggtgctatggaggacactatcttcttctcaaggagcttatggtctaactggggagaagaatctacagaaatgattcctgagttggtaacaaggcaaaatagaaaatgtgatttgtagaacaagagtaggctgtgaggccaggaagctagttaggcagatcatagatcaccttgaacgctaggcttatacatt

SEQ ID NO: 155629 - DNA, 625 bp, Homo sapiens
actaattacaggctgatgccgatggtgtagggagcacactcaagaaccaccggtgtcctgggagagagaggcaactaacctaacgcagtgcagttgctgagctctgtgtaggagaaagcttccactttgggaagagctgggaggggccacctacctagacccagtggttcagatcaggaaagtctgccctccagagatgctctagtgcgctcttgaagggtgaatcaggggtaactagctgcggaactgtgagtagttcaatgtgaggatgagaatacaggagagggcagaggtgtcaggcaaggggaagctggctgtccttaaggtccccaaaatgataataatctaatctgaagtgctgaagctcagatctgctgtcccctgggctgtagctgagtcacgggtgagcgccaagaggcagctctcaggtggatctcagtggcttcgattgacttcgagaggatctttcagctacttcctcaaaattaagagacttgaggaactctctgaggctagagtggattcagggatctggaaggtttctgttcccagtgtactaattctttgagggagtattgcacacacaaggaacaatcatgtaagaacattaaaaccatttccaggc

SEQ ID NO: 155630 - DNA, 197 bp, Homo sapiens
ggctttctacctgggcagatgagaatttcaccagtgtgctgttccacaaacccacccgtgtacacacctacacccataccccaaccacagactcacgcagacggcacacacaccagcccgatacctcatacacgttctcgcacgtgcgcgcacacacatacactttctctgcatcctacacattccatccacgctca

SEQ ID NO: 155631 - DNA, 232 bp, Homo sapiens
gtcaccttcagcctttgatctgctagccctactgccagacagatggatggatgcagacataggctcacagactctctctctctctctctctggcccatagcatctggtgcttccctcatctccatctactgagttccatggtcagccccctaggaacctgaaggcaggctcatctttatttcacttttatcttcccagcacacaggaggtgaacccttagtgaccataccca

SEQ ID NO: 155632 - DNA, 548 bp, Homo sapiens
ggtagcattcttccttgcctctccccagcttctgctgggggctggcactccttggcatttcttggtttatagctgcagccctgcagtccctgcctctggcttcacctcatgttctctgctgtgtctgtgcctccatatctatgtccattgctttgtaaaaggacacaaaacatgttgggtttaggaaccatcctattcccgtatgagtccatcttaattaattacatctgcaatgaccctatttccaaataaggtcacattctgagggactggggtaggggaggttaggactctaacatattttttacgggggaggcacaattcaaaccataacaaacactctcatttgggtaataacttttaagctacatatccttactcagtgattttgcatgatcctcccaaatgacttttgagttagtcagtctcctcagtttacaaataagaaaagagcacttatctaccctttcttctcactctttcctcgcattttttttcctgaacactcatttgaaactattgacatatatcctatgatatatgtcaat

SEQ ID NO: 155633 - DNA, 312 bp, Homo sapiens
cgaaaaggagcaggcatctaacggagcacccgctttaggacagcatgggaagaaacacttttatttcactaactgtgctccacagcttgaggacactgaggcccagtgatctgctctgtccagggccacatggctgctcagtgggcccacatctgactgtcaggctctgctgcttgcctcctttcagggcaacctgtccacccacccagcagcaatacagccattgtctgacccactcccccaaatgcaaaatatgaagaccactggagcatttgaaagctcttggccctgcccactccctgcgatgcaccc

SEQ ID NO: 155634 - DNA, 341 bp, Homo sapiens
gacgtacccctccatcagctcagattccggaatgctgcacttcccaagaagctgtactggaactcctcctcttctccccatctgcactccctcttagaaactctcatctcggccaggtgtggtggctcacacctgtaatctcagcactttgggaagctgaggcatgagaatcgcttgaacccaggaggcagatgttgcagtgagctgagatcaagccactgtactccagcgtgggtgacagagcaagcctccatctcaaacaacaacaacaacaacaaaaccaatactctcatctcatagctttaaacattatatgactcctaatttgtatctccaaccct

SEQ ID NO: 155635 - DNA, 368 bp, Homo sapiens
cattctcccaaaatggtagcaggatgtttccctgatggcgttgcccaggccttgaaagagccgggagcgatttcaaatgggctccgggctcgtgtcaggagcaggagctgcctttggtgggacacaggtcaccaaacctgacccacccaaatcttcagcactgacatcaccgccgaaaacgagaagtttgtttacgacaaggtctcatattcctgcttgttctttacctaaaaatctaaatttcccatgtgggtccttacacatctgtatcaacaaaatcacaattcgccaagatactgaaagcaccaacaatttctgagtttaaggagaagagacaaagaaatcaagacaacaggaagaaggatgca

SEQ ID NO: 155636 - DNA, 351 bp, Homo sapiens
ggcaaggatcgaaggtatcaaaatgtgttttaaaacctatctgaaggagttgattactatcagcgctaaaacccagtctttagtctcctccttaaccaggatgcagttcctagagataaaatataatgttaacactgatctaatatagtaaacaatcgtcagaactttggaaagatttctctctctctctctacacacacacacaaatagaaacacacacacacacacaaaaggatgaaatgcctaggaataaatttaagcaaggaggtgaaagatctctgtaaaggaaaactacaggccaggcacagtggggctcacgcctgtaatcccagcactttgggagaccaaggc

SEQ ID NO: 155637 - DNA, 337 bp, Homo sapiens
caggctgaggccagaccatagagggagcatttataccagccctagccagaggggaatctcctgtgccttggtcagaacttgaattctggcaaacctcgtcaccgagggccaaagtgccctggggctctaaataaaattgaaaggcagtgtaggccccatgaactacaactcttaggcaagtcctagtgctgagctggacttggagccagttgacttagcaggcacatgacctactgagacaccagccagagcagctagtggaatgcttgctcggcccctccccgccaacctcactgctccaaaagagacctcttccttctgcttgaggagatgagag

SEQ ID NO: 155638 - DNA, 301 bp, Homo sapiens
aggcagcatgtcacaatagttaaaagcaaggctttggcggcaggtcaaagctccagtgcatgttccaaagcttcctagctgtgagactttgagcaaataacttaacctctctgagtctttattttctcagctacaaactggggataattcttcctactactcagagtggacgcagggattgagtgaggcaatatatgtcaaatcattaacccagttcctggcacatattaagcatgcaataaatagtggctttaaaaaatgtgctggctggatgtggtggctcatgcctgtgatcccagca

SEQ ID NO: 155639 - DNA, 663 bp, Homo sapiens
acggcatctgtcttttctcccctatcttactgataatgtgtaccctttaatagctttctaagaggaattcaaattactgatttttaaacgtgttacaagtatttctcccagtttgttgtctcttttgccttcattatggtattgtttgcctttgtggtaggatgttttgttttgttttaatactgtgattctttaagctgcttgcttacctccccagaggtggagaaatttgttataactctgcaatagcctccctatagcagtctactgacccagtccctttatctcattttaaagtctttgccccttctacccttgaaatccttttgattgtaactagctaaccctaggatgctgagtcactaagacttttgaagagaagatatggttaggtatttcggtcaatgttgtctgtgtttacagaatacaagttgctctagcttttatgtgaaagtttccctctaaagagaaaggattgttcgatcttttatattagaaagagaaggaactgacagttacctatggaccttattaaagtttctattttatttattgtttgcaaacatcatcttcatatgttcaaggaaaaaaataggagtgtgacacagttgaaatgcagaggaaataacacattaatcactgtatagtaggacacatgccatt

SEQ ID NO: 155640 - DNA, 394 bp, Homo sapiens
aatttaagcctctaacttaaatcatttattgtgctacttcttttgtaagctcctgtatgcatacaaacaaatgtttcttcctgttgatctgtcttttgccagtttaattcatggattccttgatactaaacgttaagaggatagaggaagtttttcctcctgacactgccttgatctctgtgctcttactctggctctttttagtttttgtttgtttgttttttttttttttttgagatggagccttgctttgtctccaggctggagtgctctggcgggatctcaactcactgcaatctctgcctcccgggttcaagcgattctcctgcctcagcctccctagtagctgggactacaggcacgtggcaccacacccagctaatttttgtatttt

SEQ ID NO: 155641 - DNA, 583 bp, Homo sapiens
gtcacagactcattaattagcgttgtgtttccagctctcagatgcaatcaggcaaggagcaacttcggagctgagcatttgtacctcgggaggcagaaggagggagccaggaaatgaggagggaaagacgggggaaggcctgagtttgcaaacgctgagagaggcaaagactggggattttaggtcaggtcaatcagtggtcaggctgcgtgccctctgtggcccagccagctgccaaggactatggcttgactcagcccagggtcaagacaggcgtcttttcacctgcagaacatctggagaatcacagcgtcacggaaacagcattagacttagaggcagtggtcttggttttaccagtgtccagctgtgtgacagtggccctgtttctcaacctgggtctcagtttcctcatctgtaaaatgagaggtggtgataaataagatgatcgctgagaactgtctcgctcccaaaaggccatgacttccactgtaaggagtccaacatgctgtaccaactattttaggaaattgggccatccctccctggaaccaagattggcgcagtgaccgaggcttagaag

SEQ ID NO: 155642 - DNA, 665 bp, Homo sapiens
gcgagtaggtgtgattgacacagggtgcttcggagaggatggcaggacatgaactgggaaggaaaatataacatagaaaatgccaaaggtcctggactttattgtgttagcaagtgcaaactctcacaggtgttttaaagaagagagtggcatggttggtttaaaaatagtagcagcagggggtatactggagggaagatggtagataggaggcaggactaatttgcagttcccactcagatggacagggcagcgtgtggaaacccacattgtgaactttggctccaagaactactgcaggaatataccaggaaagccaagagaattgagcagacagaaggagatggattgctgctgtaggctctgcgggacagcagaagaactccaaaaaaaaggacataatctcttgggagctctatggccccgcccacagtgtgattttccctataataccacagctgatgcactcttgaaagcgccacctcctggctggaggccaacgaacacaaaaccagtagtacacttaacaaaaatacaaccaaggaccctcacagggtcacttcactctcctgctacctccacttgagcaggtgctggtatccatggctgaaagacctgaagatgaatcacatctcaggactctttgcagacactccccagtacca

SEQ ID NO: 155643 - DNA, 435 bp, Homo sapiens
atttgataccatattagaattaagaaagtccacagtttcctttagtccacataagctataatggtgtaaacccagctgagtgattttgtatctatatcatcactgccagggaatgtagccttttaggtagatagtatgtacaaagtttagtgaaaaccagactgtagacctaatagattatatataaggggtttcctctcccacaaatctaaattataaaatctattacagtacctgctcagatttcagacactattcaacaatatagcttatgcatttgataaatgtttttgttttttccttcaaagttgaacataggcaaaaggtataagttattgagattccaattaagttttaagattcactggttttgttatgttctctccaaaaatattgtttattgagaactatgtattttaatattcatactttcag

SEQ ID NO: 155644 - DNA, 483 bp, Homo sapiens
cacacacacacacacacacacacacacacacacacacacacacaccctcgcactctccatcgcgccctttccagcttgcttcccgctggagtcatttcattctccattgctggaaagcagatgtgagcagagctggacccagacacacacaggcactcctgattcccttgcgtttctcctcctggaatcttaattttacccatgtagtgctgaaggaacacaaatacagcactcggggccctaagcaggcctgaccgtcacctccatgagccccctctccccatagctctacagtgtccatgtagaaaaatcgtcagtgagggccagtgggctcatctttgtcttttctctgagatgcaagagcaccaggctctgggccagatgctgctaagcgctcactgtgtgacccccttgcttttctgagccgtagttgttggctcacataagattagtatttttactcgttgcttccatccaccctta

SEQ ID NO: 155645 - DNA, 133 bp, Homo sapiens
ctaaagtaagcatattttaggatggcttattctgccaggcttcacaggtgaggtattagggaattaggactttgccttctcatactttggggcttagctttttatcatttgcagattttatttttttaagaca

SEQ ID NO: 155646 - DNA, 595 bp, Homo sapiens
gatggttaaccttggcccatacttccatttatagggcaactgagatttgaacatcctgctcaggcttcctcttaaccaagtcctgtgtcctcacatgatgcattggttatacctgactgcattcattttctgatgctgctataacaaatcaccataaatttcatggcctaaaacatcacaaatgcattttcttaaaggtttttttagagacaacgtctggcgttatcatcctggctggagtgcagtggcaaaatcatagctcactacagctttaaactcctgggctcaagcaatcctcccacctcagcctcccgagtagctaggtttataggcatatgccactgcacctggctaacttttaaattttttgtagagacgaggtctttctatgttgcccaggctggtctcaaactaatggcttcaagagatcctcccactttggcctcccatagtgttgggattacaggtgtgagccactacacctgttcctcttgaagttctttatgtttgaagctctatgtgggtgtcagttggctaaaatcaaggtgtcactagggctgtgttcctttctggaggctccagaggagaactcttt

SEQ ID NO: 155647 - DNA, 165 bp, Homo sapiens
caacatagtgggacctcgtccctataaaaaaagaaaaaagttgccaccatacgacctgtcagggtctgatggcctccttcacatggctggagtcagtgcttcctctccctgagctcccacacatgaggtttttcagtcctgcctcctagagaatgcccctgacct

SEQ ID NO: 155648 - DNA, 273 bp, Homo sapiens
cagggactcaggaataagggtcgcctgccagttgggcagaggcagcaccagactgccacgaccactgaagcacagcacttgggagaattgacagtaacacccagccactcaggggaaggggtgtcacaccgtcaccaaccccctcgaccccagcactgtccgtgatccacacatgcctgctgcctcctcatgcccggggcagtgccgccaaccatgcccaggagatcatgcagcctgcaggcagtggggtttgtgatgccagtaatcccaggc

SEQ ID NO: 155649 - DNA, 217 bp, Homo sapiens
ctgccccgacagtctcagacacacaggcatagggcaggggaggcagaactgagaccaagagccttgcaaaataaagtggttttttttagcagaagtcatgctacatccttacattaacactgtaagctacagtctattaatttgatccttaagaagtaaacaggctgggcacagtggctcatgcctataatcctaggtattttggaggctgaagcag

SEQ ID NO: 155650 - DNA, 555 bp, Homo sapiens
tataaaagtatctatccagacacactctttgtgcagtactgaggacaaaaaccttttcatttgcaggatgtttggtattataagaagtcagtttccagcactagcacatctacactaagttactgttccttccctagactcttagttagtggggctgaatcagtcattttgacttagagttttagaactcaatttcacatctaattctatagaatctggcattaaaaaatcaaaatttccctaactccccaaaatagaaattatgagatggtgaaaaaacaaaagccattaggtcttgctaagatctggtgacaaagtacttcagttagactcaaaagacctacattttcatcagttttcccactcagagtgtgtccttactacacaaaactgtgctctggcctaaaacaatatagattcaaatttctaaggaaaatcatctccaattaaaatcacatataactcctcacttctatattgaagtcaagagattatgttgtattttaaagatcccctatagcccaggcacggtggctcacatctgtaatcccagca

SEQ ID NO: 155651 - DNA, 536 bp, Homo sapiens
tggtttaagtggcaagttcacatggattattctccaacctcttgtcaaggagcaataggactcgatggtcaaaagatcaagttctcttaggatataacaatctagcatacaatcttggctctgctgcttgtgagctatatgatcttggacaagtaaatacactttctccttcatttcccccttttataatggaaataataatagtaatctcccagaatttatttatttatatataaatacatgtcatactcttagaaaagtggatgccaaataataagtgttcaatacatgtgaatagttcttattaatgctaaaagaagaaacagaagagagctcataacctccatcaatgattctatataatttagcatatgaaaaaagtggcagaaggctaaagataactatactaactaatctgcaagaaagagcaaaacaatgttttccagaaacttcgttgacttctaagaaagttttcaagcatatgtgtgtgctgcttactgtgagtactcagggaaataaatcactataagaaagtg

SEQ ID NO: 155652 - DNA, 135 bp, Homo sapiens
atggggcacacaggaggcactcaataaacacctgtacccttccccagaaaaggacccagagaacagcaaggggataagctggcagagcaagaggggcagcgagaaagaggtaggagatgaggagggatgttaatt

SEQ ID NO: 155653 - DNA, 353 bp, Homo sapiens
ccaggtcagggagggcccgtaagccttgctgcaggctggattctgtccagagggctctgagcagggaagggacagagctgcacttttatgtggggaatgggctggcgagaggaagacaggaggcagacacagccagacggctgtggcatgctgccaggggaaaacgccgacagactgtgccagggtagcggcaggagggtggagagagacatgtggactggagaggctgagaggggacagtcactcggacttgatgacacctgtcagaggaccgtaaggggtaaatgagttaatccatgccactcctcatgcagggcctagcaggtcccatcttctctcgtcagcacaattac

SEQ ID NO: 155654 - DNA, 364 bp, Homo sapiens
gtgatgctgggcgtctagaggtccctgtaacatctatgctgtacatcttgctttttaatgaatgaaaatacactctgaaagctacttccttccaattacttataagcttaaatttggttatatctttatagaaatgtctgaagagactaacattttttatagttaacttggtttttcatataaacataaactttggtgttaaaaaggtaactgaaggaaagaataccagggctagtaccattatacaagtaattggtaggcttttaactgaactgttattatttctaatatatacctctagaacaaaactacattaacattatcgacctggttcttccccattccaaactaagactttccttcc

SEQ ID NO: 155655 - DNA, 580 bp, Homo sapiens
gtaattcctccttctctcctagttctctgatgactttaggcagggttttattatatatattacattattatttttattttttgagacgaagtttcgcccttgtcgcccaggttggagtgcaatggcgcgatctcagctcactccaacctctgcctcccgtgtttaagcgattctcctgcctcagcctcccaagtagctgggattacaggaatgcgccaccacacctggctaattttgtaccttcttttttagtagagacggggtttcaccatgttggtcaggctagtcttgaattcctgatcttaagtgatccacccagttagggctcccaaagtgctgggattacaggtgagagccacctgacctgactgcaggtagggttttaaaatctgatcaagctttcctagcaggatggctgggtggaatcgccagagtggtaattctttaacacatgttagaattaacttcatcaaggaccacataaagtccttcactggtctcagctggtatagcattgtctatctgaaactcttgacactattgtcattttctatacttgtctctatcgtccaattctctt

SEQ ID NO: 155656 - DNA, 481 bp, Homo sapiens
tcagagcttactaaggatcgtgctggtgtctgctggttgtcttgcagagcacaaccacacacagtgagcgtctgctcctcaacttgggtgctggtgcctgagctgcagctgcagttgcagccttctctatagatacacaaagatttaacgttccttaaacaaaaataactgaaaggacttctagagaatatccacttgtcttataaaaggactctcagcccagagagcttctgtgccttgtcgatagtggcagagctgggatcccaatgcttctgccctgctggtttgagtcacattctccatagagcagtttgcccttcccagttctgtgttagtcagccccgttctcacttgcatcctgcctcgagtcacttgagcagcctctgggttcttccacagctccttgttctctgaaatgaggcccatcctatgcctgatgccgaggctgctcttcactctccacgatcctaactctgggtcc

SEQ ID NO: 155657 - DNA, 349 bp, Homo sapiens
acctagcacttcctgtacagggctttcaaaagaaacgtaggaaaggggttttcaaaagaagggaaaaggtgtaggtgctttgaagtgaaaaataaatgtgtatgtatattgtatttgcttatgaaatagtagttgcaaatgcaggtggtttgcggcctcagcatggaaagctttaagcctctgaccagtttggacttaatccttaattaactagatgagaagtggtttttaaaatgttttgtttgttttgcttatgacagtgatatgtgtaagtttcctttaggcaatatgctgaaacattaacccagcagaattaatttgaaaagatagaaagactagagtcagggag

SEQ ID NO: 155658 - DNA, 475 bp, Homo sapiens
tggtctcaatctcctgaccttgtgatccgcccacctcggcctcccaaagtgctgggattacaggcgtgagccaccgcacccggccgggagagtgttttataagttgaaaaacactagaaaaataatattagctattataattggtccactcaacttcctcagatggagttcgccccaagcaaaacaaatttccctcaactccaccccataaactgcaagtccccataactgcccctcctcttctcctcctttccaggctcacccaaacttggcttcctctgcctgtcccaggcacaggcctggcaggaagtgaccagcctcccattagctcttgccacaggtctgggagagttcacaggctgctgagctgagataagaggaccggcaggaactgagggtttcctcaccctagaaaagcacctcctcctactactcctttgccctccagactcaaggcaggaagagaaacctgggg

SEQ ID NO: 155659 - DNA, 384 bp, Homo sapiens
cccctcaacttctggggaggggagaggaagagagatactgcaggtcaagttgattacccatagccaatggtttaatcagtcatgagtacataacggagcctccctaaaaacccaagaggacagggtccggagaggttccaaatagctgtaatagtagagattcctggagggtggctcacccagggagggcatgaaagctccgcaccccttctcacatgccttgctctatatatctcttcatcttcatcttctttttgacaggatctcactgttgcccaggctgcatgcagtggtttgatcatgactctctggaaccacactcatacgcctgggcacacatacgctcacacatgtgcacgcaccccatgaacaacccgtagacac

SEQ ID NO: 155660 - DNA, 260 bp, Homo sapiens
aagtatgaaattacaggggtgagccacagcacccggccttaaaattttttttaattatatgtttaagatgtaagtgacataggcattgtcagtggccatccatttcagtcttttccggtagcctagtttactgacccaatctcacttaggttgtttaccttttcaattcttttatgattaatttattatgttttatgtatttaatcaaataattaaatttttaattttaggaatttaattacaatttttttaatgcactt

SEQ ID NO: 155661 - DNA, 338 bp, Homo sapiens
aaagtggtgaagccactctggatggccatgaggtggtttcttaacaaagctaaacaggtcttaacacacagtccagtagctgcgccccttgctgcagccacaccacaacctgtacatagaagtttcggcaaccctattcataactaccaaaacttggaagcagccaagatgtccttcagtgggtgattagatgaacgaactgtggtccatccagacagtggaatgttattcagtactaaaaatacgtctatcaagctatgaaaagacatggaggaaacttaaatgcatgttactaagtgacagaagccaatctgaaaaagctgcctactgtctgattc

SEQ ID NO: 155662 - DNA, 350 bp, Homo sapiens
aagggagatgctggacaaagtttcagttagacaggagtagtaagttccagtgatctacagaacagcatagtggctatagttaatcataaggtaatgtatatttcaaaattgttaaaatgggccaggtacggtggctcatgcctgtaatcctggcactttgggaggccgaggcgggcagattgcctgagttcaggagttcgagatcagcctaggcaacacggtgaaaccctgtctctaccaaaatacaaaaaattagctgggtgtggtggcaggtgcctgtagtgccagctacttgtgaggctgaggcagaagaattgcttggacccaggaggcggaggttacagtgagcc

SEQ ID NO: 155663 - DNA, 275 bp, Homo sapiens
ccagctctggtcacgccccttctcctgagagctcccaggactgcaggcaacttgctgaagaacttgggtaatttcccggaggccggctcacctgtttccagcccatcagtgatcttgaaacttacaaatactcagactcacactttccgcctatccgtgcaaggtaagaggagccaaacacatctcgaaatgcaccgatttttcttcttctaagggggcagactctcgtggtgtgcccccaccctctctgttaatgcctctattgtgtaaaaacg

SEQ ID NO: 155664 - DNA, 529 bp, Homo sapiens
gatcccaaggacactggtatagttttcagtggctgagcagtactctgtttcactgaatgggggaaaagttttccccattttcattttcatttctctgatgtcactgttacttatgcctcattggatctggattatctggataagtgcaacctacatctcataagattttgatgctgaaagactgttaagtgaagatctgctctgatcagtgggcaggagaaaaactggccgaatgaggtcattatttaaaacctgtataagacaaagccatcttattttagtatactgtgtcttgaaaaggacatcccacactgtaagaaaacattccttaattatgttatctgaattcactaacttttggtgttcctgtaaccactcattttaaggctttttttccagatgtatataatatgtaatttcaacagcaaaaaagaagtaagagtgtatgatgtaaaaatctttttttcattaagattcaacattcttttctgtgtctagtcccttttcagtgtcctgaaatatatttgac

SEQ ID NO: 155665 - DNA, 328 bp, Homo sapiens
  misc_feature (254)..(254): n is a, c, g, or t
  misc_feature (289)..(290): n is a, c, g, or t
  misc_feature (304)..(304): n is a, c, g, or t
agaagtacatgctatttaaccaaagagaaccaagaaaatgtaactttcagagtgctgacacagaagtggtaattggttcatgtataacacagctgaggtaaaataactaatttctaaaaatataaaaatgatcaacagggttgaataaaaccagtaaaagtggtataaaataagtctagtaaggaatttcagctccaagcaatttctccagcttagttcgtaagaaaacccaataaccataccactgtcctcantacatgccatatggcatgtagtgaggacaggagtnngagaccagcctgtncaacatagcaaaaccctgcctcta

SEQ ID NO: 155666 - DNA, 113 bp, Homo sapiens
gtcctttaaaaatatcctgtaatcttggctgggcacggtggctcactactgtaatctaagcactttgggaggctgaggcagccggatcacttgaggccagaagtttgggacca

SEQ ID NO: 155667 - DNA, 214 bp, Homo sapiens
gaaatggctacacagaaaccactcattccagtcctagccaaaatcaaactgtcatatctgaactacaaggttacctttgctaggtctttttattttaacatttcaaccaaagtacgttttcgctaaacatgtgactttccaaagcagcaggtgtctaatataatcaagggcacaaaatatatttaaatgtttaactcaaattctgccacttcat

SEQ ID NO: 155668 - DNA, 170 bp, Homo sapiens
cacacaccccaggctttagatacatggctggtccccaacaacacccatacccaccacacacaagcaagactggtaggttgtactgggccatattatttcaaggcccagatccttgccgttaatagtaggctggtaataatttctagtttttattttactttttttttttg

SEQ ID NO: 155669 - DNA, 629 bp, Homo sapiens
gcaagtcggaggattcttgatctcctagcctgagtggaccactcactccagtgtccagttctgaacctgccaattctatagctgtgctttctctccagaaactgagtctcaaaaacatcaagaacattctccataactgcagttaatcattacagccagtaggatgagttctgccgaatgctctcacatctatgcttgtgctgggcgtgggagcaagtgtccctccctgcggtgtggcctgcctgagaggctgcggtttcaattcacagtagggcagatgtactagctggtttattcccctggggatcttagctccttcaatacctcttgttgtcttttttttttagccttacataaataagaattcacacacctcttgaattgaaaataaatacaaacaaaaaaaggaaataaaacagagatcgcccctgtggacattatgctgtatctctttgaaggtattgtgtatgcatgtttgtaggcaggtcaaaaaataggtagctagtgctatggtctgaatgtgtacccccaagattcacaccttaaaacttaattgccaataggtgaggaagccatgaggacagagcccttacaaatgggattcatcactttctaaaagatgtgtgagg

SEQ ID NO: 155670 - DNA, 266 bp, Homo sapiens
gcgagccccgcccccatcatgaatgaagcttgtgttctctgagcgacatctgttctcatccaccgcagaggaccgcagagggcagaccacccacgtctaccccgtccattcttgctcacgggaggggtgtagatgcccctgagcttgccactgggtcccggaagccatcccaagcaggatttgatactcaaacaaaagttgcctttgtgtgattcaacataaataaagcgaattcaccaagggcaacctctgctcaagggtcaaac

SEQ ID NO: 155671 - DNA, 192 bp, Homo sapiens
aaataatgttgttggtggctctgactgatgagtttatggattgttcttgctctctttttatttttgtgtgtgtttccaaaaaatttttaagttaaaagaaaaactaaaactcttttggaaaacctcagggagaatcattagtaatctaggtcaggtgtggtggcttacacctgtaatctcagtactttggga

SEQ ID NO: 155672 - DNA, 678 bp, Homo sapiens
aacatagcaaaaagttgtctccacaaaaagcacaaaaatttgctgggtgtggtggggcacagccatagtcccagctactgggagtctgaggtgggaggatcgcctgagcccaggaatttgagctgtagtgagccaagatcatgccactgcactccagcctgggaaacagagcgagaccctgtctcaaaataaataaataaataaataataaaataaaaatagaagcaactccagtgttcactgagagatgaatagataaacacaacatggtacatccgcacaagggaacactatgcagccttaaaaaggaagcaaattctgacacatgctgtaacatggattaatctcgaatccattatgctaagtgaagcatgccagtcacacacaaagaagtactgtgtgctacagaaaaatgctttagatatgagatctaggagtcaaacatatagaaacagaaagcagaatagtggttgctaggggctgcgtggggaattaattgttcagtttctttttttttattaaaagagatggggagccaggcatggtggctcatgcctgtaatcccagcactttgggaggccgaggcgggtgcatcatgaagtcagaaattcaagaccagcctggccaagatggtgaaaccccgtctttactaaaaatataaaaattagctaggcaccg

SEQ ID NO: 155673 - DNA, 677 bp, Homo sapiens
  misc_feature (644)..(644): n is a, c, g, or t
tacctgcacagttggtttagggctacggttcaatcccagaaagaatccccaagggagaggagtgattgaggcctgaggttgaagtttagacttaggacaacatccaagtctaagagagtgcaggaagagcagtagccggggcgggagcagccagagagaagagaagcaggagactgtgctgctctggaggccaaaggaggaaagagtttggaggtggaggtgggagaaggatctgagtgatctgattactggagtggtgaaaaaagaactagggagagcggcagaggattttaggtggagctcattagccagcctgtggacaggtcactttccctctctgagcctcaacttcctcatctgtaaaatgagtgcacagaagggctacagtgagatgaactgaggctccatggcaccctgatgactgtgattgtagcaattttaattcaagagaaacctaacgagaagagatgctaacctttgcagggcacctactgtgtgccaggcattttacactccccttctctgtaaccctcccagccaggatgtgaagcaggtgtaccagccccattttacacatggggaaaatggagtcttggcttgtgaggtgactgtgcatgggacggggtacgagctcgatcgacgtnttttgtctcaaaaaaaaacgacgagcaacaggg

SEQ ID NO: 155674 - DNA, 418 bp, Homo sapiens
atttcactcttgcagcccaggctggagtgcagtggcaaaatctcggctcactgcaacctccgcctcccaggttcaagccattctcctgcttcagtctcccaagtagctgggactacaggtgtgcgccaccatgcccagctaatttttgtatttttagtagaaacagcgtttcactgtagtggccagactggtcctgaactcccaacccaggtgttctgcacacctcggcctcccaaagtgctggaattacaggcatgagccaccacacctggccaatgttaatattttaaatcaactttattgagatagaatttacacaaaataggtgtacccacttcaagtatacattctggtgagttttggcaaacttacatactcatgtagccatcgtcgacgcggccgcgaatttagtagttgt

SEQ ID NO: 155675 - DNA, 659 bp, Homo sapiens
gttggccaagtcaaaggtcaataagatgacactaaggaacgtcctgtttttagagtgagatgttagttgtttactgctatttaagtgtatccccaactggtaacacttcagaccattctttttcagccttttacataataaacgtcccgcaagagagtcttcagcagtttgctaaatcttaagtatttggaattaaagtgtactttttaatttaacattaaatagaatcccttatctctacctccaccccctggccccaaataaataaagcttttccaaatcttttacgatgtgagctgctcccctcctgggaatgaaaaggatatgagacccatttgatgaattgctggcacttatatgtgtctacatttttcagtacactttttaaaaaaaaaaactagacttaagctgcctatattacatgcttcttttgtaaagatgataaagagagcaaagatttctattggcataggcctaatctatttgctttgttgtgattctttttttttctttcctttaactgttaacctatttataaatctaaatctacatacaaaggtcattggttggctgaacttaaaccattttactcagtaaatttaattaagaaaatacagtgcaactcataagcaaatgagttttttcctagttttaaacca

SEQ ID NO: 155676 - DNA, 548 bp, Homo sapiens
ccgggaggtggaggttgcagtgagctgagatggcgccactgcattccaggcctggggggtgacagagcaagactcagtctcaaaaaaaaaaaaaaaaaaagaaagaaaaagaaaagaaatacactttcaaaattgcacctaaaaggggaaatggttttagggtttttatctactcctcactttctagaaacaaacttatttgacttgtgtgtttctcctattttgatacacttttctaggaatcaattatgtaagaacttaggctactgcctaaatctaatacttctttaaaacccagaatggattttagttgatattgatgaaacagctcattcgtgtgtctagtggcctttattattaccttttaaatattttattcatgcatgtttgttatctactgaacatgaagaataggtttgcttttctttgtagtttttctcacatttatatgtcaatacgttgattgttttttgtctgttattaagaattcggtgatacatgttggctttattgctgactaatgtagaggtacttctttgggctagtac

SEQ ID NO: 155677 - DNA, 170 bp, Homo sapiens
gcgaagacagaaagggcaattggaaagtcatctcacctccatttttttcctctcccttttgatggattatggttgaacccagcagtgtcctcgctaggtgagctgcacgtttactgcacgttctgcactgggaatgcgtgttctgcccatcgtgtgcccttgaattctgt

SEQ ID NO: 155678 - DNA, 308 bp, Homo sapiens
cgcgctcggctccctacggacctgatagtgaggcaaccaggcccattccccaaactcacagggctagcagatggtagcaccagcttcagctttgctgcatgtctgatgaatcactggctcttgaccaactttccccaaaactcttggaggaaaagtgcacaatgcctagtacagagggtctcagcccactcagcttgaatggggaaggttaaggtaagggttggagtccgtactgccttctcccaaggactcctctgagaaataacccctcgaaataacccccctccctccaaacacattctacttat

SEQ ID NO: 155679 - DNA, 325 bp, Homo sapiens
taagaacctctaatattcctccaacaagcttgcaaggtcatttctgcttcctaaagccaaaagaaactgaactaatacacaccccaacatattgtagtttctgtgtgagcaggaacaacgtgttcctcattatagctccaaggccagcacggtccctaatcagaactcactgaacacctgatgaatgcctgcagctcactgcactgagtgggagatgctcctcccacttagatagggattttttttttttaactctcttgccttcaaggtcctgcgcacatctgccctggccttggtctccctgtgtggtcagctacagtggcca

SEQ ID NO: 155680 - DNA, 400 bp, Homo sapiens
aactgctcaaacttgactctgaataaatccctctcccttttctcccccacctgatttaccaaccaggacagtctggtgactccttgaggacctgcctaaatggctggtgtccagggtgattgcatggccagaccccgtgtctgcaggcagggaagggtgaaacctgggactgaggacacagagaaagagaagcgcagatagacaggaagggaaagatggaagaggaaggtgagggtacaggaaaatgataacagagggaacacacagtggggaaaagagagaaaggcaatgagaaaggaaagagaacaattaagaagtttctgtgcatgttggggaaattgtgggaaagcagggagagagaaagaccaaaaacacaagtatttcagttagagaaaaggga

SEQ ID NO: 155681 - DNA, 620 bp, Homo sapiens
caagaaccctgcaaagtcactttagcaagaagcatcccctgaccctcgacatctgatcaccctccttatctaatccgttcctacactgtcccccaggtgaagatgtccggtcactgtggcctgtcttcagcaaaaatcctgttaattggtgtagccagaatctccctcacccggggtgtttcttcttagtcattttccatgtgctgacccagctcccaccgccctgctcctcagctatcatcagttcccacttgcccattcggacttgagcttaatctctctcccccactgcagaatctcattcctgtggtccctagacctagcaagacggtcctgaataaagtcttccctacagtgctttagcaaatgtcattcagtaattctttctttaacattatcagtgttaatttcctggttgtaatcatttttctgtgattgggtgcggcattcacatttggggtaactgggtgaaagacactagaattttttgttctactttttaaatcctttagtaaattgaaaaaaaaatttttttttttgagatggagtcttgccgtgtcaccaggctagagtgcagtggtgccatcttggctcaccgcaacctctgcctcctgggttca

SEQ ID NO: 155682 - DNA, 2757 bp, Homo sapiens
  misc_feature (1422)..(1422): n is a, c, g, or t
  misc_feature (1918)..(1918): n is a, c, g, or t
  misc_feature (2449)..(2449): n is a, c, g, or t
tttaacaggagaaaccattgatggtgcacctttggtaactttaataaagaacagtatttgtcctgagtgttgcatttaagtcttgtggaagtaatgaattgtagtgggaaaaaaaatttaaatttagtaatacttaacattttaaagtatcttaacagtgtttttccatacagaacttttatttccttgttcttaaattgtttctcaaaaattgtagcaaaggtgctctgcaggcatttttaatgctgaattgaaggatttcacattaccaagccccaaatgctgactgataggcagtcatcctacacagtagagaacattttagatcaaaaatgtgtttttttcttccagaagaaaataagaattgggaaatagaataagaaggtaaagataaattatagaaggcttcaaatgaggacaaggaaaaataatgacatagtgtgtttcggttagctttctctgactggaatgggttttccctttccctctgggccttggcccccaccgtctatttctaatcttctagtaaaaacaagctacacatgttacatcagctgctcaggataccttcaccctcacgtccttttactttttccttcctcactcactttgaacattgtgactcttgactgctcatcttgcctcccttccaaccagttatagacattctcttcttcaccatttattcttctctgtctctttatattgtgatcactcttcatcaccagttcatccttccattaagtgtatttactgagggcctactttgtgcccttgcccaacccaacacccctactctcatcacctctcatttgcaagagaagatgtggaggccatcaggtgtgggttctgtccatggagaaacccactccacccacagtcctctcctttgttttatagccaggctctaggaaaaggtggtctgtgtttagtctccatttttccccttcttaacccactgcagcctggccgcttcttccactgcctcactaaactgcaccaacaaataggagtgacctccttattaaaaaagccactgggtgcttttcattccttctcatttctgctttttctctggtgtttgatgctattgcagactcctttcttcttgagttctttcttctgtggcttctctggccgttatttctatctctccttggagggcccccttcctcccgctgcctctcaaacattggtatacctgtttgtcctgccctcaaaccttttctttttcactttgcatgctctctctggggttatcactcacctacacttacctggtcctagatctagaactcatatagaatcacaagttcaactttctattggacagcttcttctgcatgtctcacacacatccaaaagttgagaatttcaattacctctgcacactgaagtttgaacagccttcttttagggccnagtacaatgtctgacatcttgctctacctggctagctgcagtcagggaacttctttaagggaaacatatcagaatcaggactcagggtggcacagaggttcctcccgctgtcagtgactgtgttcatgcatacccagtaacaaaggagcattggtttaaaaaatcactgacttctgaaagcgctccagtaagcttgaaatgatttgctttgcttcttacgttgattatcatcagtttgaggtagcaagtagcaggtgcttgttcctttctttggaggtgaaaagccaaggcccagagagagtagacataatatgcccacattcaaaaagtgactccctaaggagtcagggcaaattcatttattcattcactcaacagatatttattgaaaacaattatgtttcaggcactagaaacagagtggtgaatcagacagatacagtttttggcataatgaggtatcctttttgacgatgcttcttatctcttctttgcncctattttttccatcctgattagtgataaatgataataattagcaaatgtttactataagccaggcaatattttaggactttacacatattaactcatttaatcatgatgacagcactatcaagtcattgtcgttactatcccattccacagagggggggaatgttgggcagtaggaactttctaaatgtgtcctacctagctcatactggtagtgataaggcgtgaatttgaacccaaacaatctgactctagaacccatgctgttagcgactgctttagctattctagctcttaacactgtaatacttgcttttgctcatctgtttatgatgctgtgtctgtgaagtatgacagggtagttctcagcatgccaaaattaacctgcagctttacctaacaaacatttggacttactttgctttcttgagatatttccccccttgggcatttcgttggcagtagtctcattttctaatctgaaatcaggagaaaaggaagaaaaacttgcaataaagcttaagtggttgtnacaggttgctaaataaaactggctcaactgaagttttgagattcttgagaaacactgagaatttcttacaaaggaaattttccttattataataggaaatcatgggtcattgcacagttataagtgtcttagtaaagagagaatgtggcttgaggctaagaagcctaaaatcttaatgagattatttgtgggctgctatttatgcataatttttaaactcttagaaaatatgttttctatctgtctttagtatgtcatcttaagtttccactgctttacgtaattttgaaaatctttagggttgctag

SEQ ID NO: 155683 - DNA, 867 bp, Homo sapiens
gcgggtggatcacctgaggtcagcagttcaagaccagcctggccaacatggtgaaaacctgtctctattaaaaatacaaaaactggccgggcgtggtggcatgcgcctgtaatcccagctactctggagtctgaggcaggagaatcgcttgaatccgggaggtggaggttgcagtgagctgagatggttccattgcactccagcctgggtaacagagtgagactccgtctcaaaaaaaagaaaaaaaaaatctgaaagctaccactttcctatttataaatatattcaaatttctggcaaatgaattccataaatataaagagtgtttgcatattcatcctcttggcttgggaaaaaatgactataacatcttgtgagtagaaatgatgaacctttggaaatactgcataaatcacttgacagttttcatttcttaccaaaaaaaaactatttgaacgatctgtgtacttaaatgagttattttccttcactaagaacttaaaatgttttaaagataatatttccgtctcgtctggaagtaagggaccttttcgattacttccacttacacaggagacacaggtactgtcaaatattgatagtaaaaagctaaatattgagagtggtcttaaaactctgtctacaatcaaaagtcttcagacagaaagaccaatcggttgtacataatatagaactattatcaaagaaataatgccattccatataattaattcctgagttttttctttatccttatgattaatttctagcactttaggctaaggaaacaggaatgaatatgtgtcaagatttagctaaaaagatatttgataagttatttcgatcattttctttttaatgaaaata

SEQ ID NO: 155684 - DNA, 779 bp, Homo sapiens
tacaaggttttattaaaattaagtttaacattaataacacactaatataaagataaaatttagcttctctggtataaaaatcatacaagaagcattattaaatataaaatggtgtttagctttctttggtctaaaaactaacaaaaataggtgctaaaggaagcattcattttactaaaggatcatagaagttaaagacttaaaacaaactttggcaattaagacaggataccaagatgcaaatgcctggatgaaatggatcaaatattccatctgcacgttaaacaaaagcaattgttatgcttgtgcacatggcagggcagaggctcagaatgtcccctttccactaggtggtcctccagtcgaccaggtgtgggctgcatggtagctcttttccaggattctacagcctggaataataagtcatgccaagctctctctgctatattccgaagtccctgggggcagccaccgagggccatccagcttccatctcccaacactaacttcacttcgtgtctctcacggcagggaggagacttagcattccttggagacctgaagggatgcagtgagcttaagaattttcaagagtttatcaatcagtcagcccttgctcatccccgagcggatgtgtggtggtattgcggtggacctttactggacttactggacactctgccgaataaccagaagtggcacttgtgctttagtccatttggctatccctttcaccctggcatttcatcaaccagaggaaaaaaaaaataagacatcat

SEQ ID NO: 155685 - DNA, 457 bp, Homo sapiens
gccgtcagggaagtaccgacaagcacacagagagggggccgtgtgggcgccgtcagggaagtgcggacaagcacactggagaggggtccgcgtgggcctcgtcagggaagtaccgacaagcacacagagagggggccgcgtgggcgccgtcagggaagtgcggacaagcacacggagagggggccgcgtgggcgccgtcagggaagtgcagatggaaaccacagcgaggcccctgcacactctccagggggctcagacaatcaaataaactgccggcacctcgagctgagcaggccgcggggtgggggcctcgtccacacccggccgagcaacgcggcagagccactgtggacagcttctcatcacagccaaaggtggcccagcagtcccgttcctgggtccttgctcaagagaaatgaaaacagaggctcacacataaacgcaaatgtttaccact

SEQ ID NO: 155686 - DNA, 1123 bp, Homo sapiens
ccctccccccgcactcctgcctcgccatttcccctccctggccggccggccggccttcttcgctttgcgcacgtaccttttgaggtaacggcccaaagaggtagaagcgcttttcccgcccggccgcggggcgtggctctgcgcgcagcttgatgacgacgttttggcgcggtggcggaatggcggcttccacctctgaagcgggcgacgctatgggtcccacagtggtttgctaagaaggccattttcaactctccattggaggctgctatggcgttccctcacctgcagcagcccagctttctactggccagcctgaaagctgactctataaataagccctttgcacagcagtgccaagacttgattaaagtaattgaggattttccagcaaaggagctgcacaccatcttcccatggctggtagagagcattttcggcagcctagacggtgtcctcgttggctggaacctccgctgcttacaggggcgtgtgaatcctgtggagtacagcatcgtgatggaatttctcgacactggtggcccaatgatgaagttggtttataagcttcaagctgaagactataagttcgactttcctgtctcctacctgcctggtcctgtgaaggcgtccatccaggagtgcatcctccctgacagtcctctgtaccacaacaaggtccagttcacccctactgggggccttggtctgaacctggccctgaatccattcgagtattacatattcttctttgccttgagcctcatcactcagaagccactccctgtgtccctccacgtccgtacttcagactgtgcctatttcatcctggtggacaggtacctgtcatggttcctgcccaccgaaggcagtgtgccctgccactctcctccagcccaggggggaccagcccctcaccgcctcccaggacaccaaccatgccctttgcttcctatggcctccaccacactagcctcctgaagcgacacatctctcatcagacgtctgtgaatgcagaccccgcctcccacgagatctggaggtcagacactgctccaggtttttgttgaaatgtggcttcatcactattccttggagatgtatcaaaaaatgcagtcccctc

SEQ ID NO: 155687 - DNA, 1036 bp, Homo sapiens
ccctccccccgcactcctgcctcgccatttcccctccctggccggccggccggccttcttcgctttgcgcacgtaccttttgaggtaacggcccaaagaggtagaagcgcttttcccgcccggccgcggggcgtggctctgcgcgcagcttgatgacgacgttttggcgcggtggcggaatggcggcttccacctctgaagcgggcgacgctatgggtcccacagtggtttgctaagaaggccattttcaactctccattggaggctgctatggcgttccctcacctgcagcagcccagctttctactggagctgcacaccatcttcccatggctggtagagagcattttcggcagcctagacggtgtcctcgttggctggaacctccgctgcttacaggggcgtgtgaatcctgtggagtacagcatcgtgatggaatttctcgacactggtggcccaatgatgaagttggtttataagcttcaagctgaagactataagttcgactttcctgtctcctacctgcctggtcctgtgaaggcgtccatccaggagtgcatcctccctgacagtcctctgtaccacaacaaggtccagttcacccctactgggggccttggtctgaacctggccctgaatccattcgagtattacatattcttctttgccttgagcctcatcactcagaagccactccctgtgtccctccacgtccgtacttcagactgtgcctatttcatcctggtggacaggtacctgtcatggttcctgcccaccgaaggcagtgtgccctgccactctcctccagcccaggggggaccagcccctcaccgcctcccaggacaccaaccatgccctttgcttcctatggcctccaccacactagcctcctgaagcgacacatctctcatcagacgtctgtgaatgcagaccccgcctcccacgagatctggaggtcagacactgctccaggtttttgttgaaatgtggcttcatcactattccttggagatgtatcaaaaaatgcagtcccctc

SEQ ID NO: 155688 - DNA, 1039 bp, Homo sapiens
ccctccccccgcactcctgcctcgccatttcccctccctggccggccggccggccttcttcgctttgcgcacgtaccttttgaggtaacggcccaaagaggtagaagcgcttttcccgcccggccgcggggcgtggctctgcgcgcagcttgatgacgacgttttggcgcggtggcggaatggcggcttccacctctgaagcgggcgacgctatgggtcccacaggccagcctgaaagctgactctataaataagccctttgcacagcagtgccaagacttgattaaagtaattgaggattttccagcaaaggagctgcacaccatcttcccatggctggtagagagcattttcggcagcctagacggtgtcctcgttggctggaacctccgctgcttacaggggcgtgtgaatcctgtggagtacagcatcgtgatggaatttctcgacactggtggcccaatgatgaagttggtttataagcttcaagctgaagactataagttcgactttcctgtctcctacctgcctggtcctgtgaaggcgtccatccaggagtgcatcctccctgacagtcctctgtaccacaacaaggtccagttcacccctactgggggccttggtctgaacctggccctgaatccattcgagtattacatattcttctttgccttgagcctcatcactcagaagccactccctgtgtccctccacgtccgtacttcagactgtgcctatttcatcctggtggacaggtacctgtcatggttcctgcccaccgaaggcagtgtgccctgccactctcctccagcccaggggggaccagcccctcaccgcctcccaggacaccaaccatgccctttgcttcctatggcctccaccacactagcctcctgaagcgacacatctctcatcagacgtctgtgaatgcagaccccgcctcccacgagatctggaggtcagacactgctccaggtttttgttgaaatgtggcttcatcactattccttggagatgtatcaaaaaatgcagtcccctc

SEQ ID NO: 155689 - DNA, 511 bp, Homo sapiens
ctagacggtgtcctcgttggctggaacctccgctgcttacaggggcgtgtgaatcctgtggagtacagcatcgtgatggaatttctcgacactgggtaggtaggttggtcaccggagagaggctgggtgattcctcatggtgattccacctttaaaccactctctgaatttcttaagattaagaaacaatcaaagcaagataattcacagttcatttgccctgtttttgtttgtttgttcaatttcatgttcagtggcccaatgatgaagttggtttataagcttcaagctgaagactataagttcgactttcctgtctcctacctgcctgtaagtaaaccacagtggcgagagtggtgctcggggcagtgggccttgcacagccctgtggtgatgggcaatctcctccagtcctctgagggcaaattgaggagcgattcgttccaggggtgtgagaggcaaaggaaatgggtattgcatgactgctacccttgctgtctgcagcttttta

SEQ ID NO: 155690 - DNA, 375 bp, Homo sapiens
agttgtctattttttttcctttttgttgcctgtgctttgggcgtcatatctaattaatcattgtcaaatctagtgttatgaagttttctcccatgttttcttctgagagtgtatggttttagtgcttatcctcaggttgcttacccattttgagttattttttggcgatggtgtgaaggaagggcccagcttcgctgttctgcacatggaatgagttcccagctctgcttgttggagacactgtcctttccccactggatggtctggcaccattgtcaagaatggtttgactagctaatgcttttttgcaggtttttgttgaaatgtggcttcatcactattccttggagatgtatcaaaaaatgcagtcccctc

SEQ ID NO: 155691 - DNA, 439 bp, Homo sapiens
ctcctaagcagttaggacaagtgtatgccaccgtgcccagattttttttttcttttgtagagatgggggtcttgctatgttgcctaagctggtcttgaacgcctgggctcaagcaatttgggccctctcggcctcccaaaatgctaggattacaggtgtgagccaccacgtccggctcctgtcaccttactttcctgtccactagcacagaacctgcacacttccgacgcgtgactctgctagttagcactgtgtattttaaagtacttttatgctcctgttgggcttcagtgtcagtgttgaaggggctagtaatttttgagctggcaatacgtttttaaagttattcttttgagtaacaaatatttactgaatgcttaccatgggtaagcctatttttcaggctgtgtgtgagatttaaaagtacacaactattcag

SEQ ID NO: 155692 - DNA, 387 bp, Homo sapiens
cttcaaagaaggacttgttgacccaactattgggagagctgtcagcagaaaatcttcagctgtcagcccctcgaagatcatcttggctgcagagtgccatctggcccaggctaggctcttcccaggacattacaactcctttccaggctagtgccagacaacagagatcctgggagttggctgagactgtcatcaggcctgcatctcagtttagttttccctgtgcccactcctgtttctttccagtacctcccagagtgttgatcccagggccactccccaataaacatactgcacactaacctgtcacagagtccacatccaaagaacccaacctgtgacagcaccaaatcaaaagagactcaggaggctgaggcaggactgctt

SEQ ID NO: 155693 - DNA, 451 bp, Homo sapiens
tatagggagtagggagcagttacttgaacctggagggatgaattctttatattagtcagagttcaccacagaaacagagacaactggatgtgtgtgcacacacgtagaaaaagagaaagacttattttggctcacatgattgcagaggcttggtaagtccaaaatctgcagggtagttctgtaggccagagaaccagggaagagtttcagtttgattttaaagatagtctgtggcagaattccctcttcctagaaggtcagtctttttctatgaagacattcagttgattggttgaggcccacccacataacagagggtgatctgctttactcaaagtctacaagtctactggtttaaatgttaatgtcgtctaaaaaatacctgcatagaaacatctagaataatgtttggccaaatatctgggtactggtggcctagccaatttgacac

SEQ ID NO: 155694 - DNA, 319 bp, Homo sapiens
agtgtctgttggaaagcatgaagatgacaaggctggtttagactggtgcgcaatctagaaagtcaggagactaaaccttctgggagcatgaacccatcagaggtcttgctagagggacaagttagggttaccagaccccaccaccagtatcggttaagggtgactataacaccattgctctggcatcccattgccctgagatgaatcttttaggatattgattatctaaataacaaaaaaaccacaaaacatgttcagcccctgatattaaaggtaaagaagcaccagtgaaagatctcaaaggcacacagtagaagct

SEQ ID NO: 155695 - DNA, 313 bp, Homo sapiens
ctgctgaatctggtgttataataatccacttaaatgatgtggctaaacactgcatttttaagacactaatataaaggaccatagagaccattatccagctcccatgttccccgtgtgaagctaggcccagagaaaagggtgtgccaatacacacgacccaacctcattcttaaaggttcagtgttatgacttgtaactgaacttagggcttaaggtcactaagatatctaacgactgtatttggaatcatcctagactgcagaatgtagattttaagccaaagatcatatgtatgttttaggtccctcactac

SEQ ID NO: 155696 - DNA, 688 bp, Homo sapiens
atacaattcgagctcgtcccgcattcaatatatgaacgcaggagtgggagtggaacccagggagtgggtgatgccacgggctgattgaggagtccaaggatgtcgtcttggaataccaccactgaagggctgggtagaggaagagatctgaaagggaaactttgaaggcaaatgtatataactcttcaggtaactagatggtaaatggaaagagagagagggcaggagctggaagttgcagagtggagagctttttgtatttttctgggggatattaagagtatttatagactcctttttatacctttggacaatgattccgagccagtcttgaatgaaaacattcatatgtgatgtgttgtaaacctccaggacgatcggtctcacatttcattttgtctgttctggcttctgtacacagcagctgcagactatatgtgtttttgaaacctgtttaacttcctttcttttgtgttctctaattctctgaaatattatttccaacagccctaagattgaaattaagagaacgtttgaatcttagctgcattctggcattttcaagtgcttcctgcacatttccccttggatatcccatcattgtccaagattcagcatgtccgagacttgctcctggccctttcattctggtgttacctctagaccgcttaccggtcccgagcgtgac

SEQ ID NO: 155697 - DNA, 872 bp, Homo sapiens
gctcgaagacaggtagcatcccaggcctggagagctgactgtgctgcctgtggctgcagagacaggatgcagaggccagggctcgtcccccagagccttgcaagtgtctgtagggcgctcccctctgtcttgcctcctcccactctctggctcttctctatccagcctgccctcaggttgtgaccatccacctcccaaactgccctggaatctgcctacggcctgtccactgccctccgtacccctgcctgccatctctctggtttcgcccctgatgtcactcacatgaaccacagcggtcacccccacctgcctcctgctcctgccctctcctctgccctgcatcagccagaggggggtttaaaagcttacatttgttaataatctggctaaagcttaacatttattgtaatccatccctaaatcccagctggtggcattgctctaacagtgatgaccagcctcctcatcataatccccagcactgccaccctcaaccccccagcgctgaccactggaggctgcttctaaaacttcagccctgctctgccagcagcgcccctggggggtcttcgtagccctgttgcccatcacgatcccttttctcatgcagtccaggctgcaagcccccgccgagggcttgggctgacttgttgtgtagtcagtgctgtgtctctgcacccagccagaagtggtgggacagccccccggctgacgggctagaacccatcatccagggtgtgtggaaagagcacatctcccccccgacgccagccactgggtaatacattcccaggaatttccagtgcccagccccagctgagaaacaggtcttctggaaccctccagcaccctcatcaggggttcccagc

SEQ ID NO: 155698 - DNA, 594 bp, Homo sapiens
cttgtggaggggctggagccattatggtgagggaataggtagagttggtacggatgccttaacatggatggtctatgttagggcctgaagggtggcatttctgagactgagaagttctgaagtaacaatggagtcaagttactggggaaagagaaccgctatactatgaatagtccatgagtgataagtccacgagcctcaagattcagcaacatataaggcaagatgtgaaaccacagctcagagttcagctgagccattactcttctggaatttatctgaaccaagcaagagcagagcaggtagactgggggccattttcccaaatcaatggagatagataggtatctctacgcacctaaagtagacctgcattgggaaggggaatgatgggacaccctttgagatgggttcctacaaatccattctcccctacaatgagtttataggaaatttaagtttttctgagattcgtttatggagaaataaggaatctgtattctattctttccaatatgagtgggagtgtatacatcatttttttacacatacacatacacactcattcaaatatgaaaactaagaaaaggaaat

SEQ ID NO: 155699 - DNA, 295 bp, Homo sapiens
catacatactatgtctcttgccgatttacgattttgtgttctttctctctaactccagaggttgatgattattttacagactgtagtagaagctaggtatattgttgccttctttcacccactttttttttttttctgtcacccaggctggagtgcagtggcacaatcatgcttcactgccatcctgggcctcctggcctcaagccatcctctcacctgagctccccgagtagctgggactacaaatgtgtaactgttcttctttttttttttttttgttgtgttttcgaagaga

SEQ ID NO: 155700 - DNA, 534 bp, Homo sapiens
caggatttcacagaagaagtggttgatttcatgaggcccacagaagggcagtcttaggatgagaaccacatggaccagagccaggagggagccacacgtccaggaagtgacggccagggtgatgcagactctccaggtcatgattacggagtatcggagagggtggcagatggccacctcccgaatagctggggatgtaggcacacgttgccatgcccggctagataatttacaaaaacactttctaatgttcttcaattgatgaaccatcaacttaaaagttttatccattgtttttggtttcaccatcctgcccgtcaagaggctcctcctccgtctctgacccttggagtcacagttccttcttgctaccacctcatctcatttcacgcaccagtataaaaaaagctgttttttgtttgtttgtttgtttgtttgtttgtttttcccccagctttaagtacttttctgtctggagcccaatgcctatctttggctagagattgaaaattgcttttcatctctcctcctctt

SEQ ID NO: 155701 - DNA, 365 bp, Homo sapiens
cacctaggtaatcagcccagcatccattagccattcctccagatgcatgtgtgttttttattgtatgatttcctgagtgttctttatatggttttattgttttcatttctttgagttggatttgctgctctcttatcttgattattgaaatggaagctataacattgtcagtgcttctttttttataaaacatcgtttctttttgagtactcttttaggtatattacacaatatttcatttgttatatttttatcattcaattaaaatatttttacattctactgagattattttttaacccacactttatgtggaagggtatcatttaaacttatttaggaattttctttttttgacttttatt

SEQ ID NO: 155702 - DNA, 541 bp, Homo sapiens
ggaaaggccaagccaggcttggacctgggtctctactgtactctttactctactcagtcttttccaaggtggaaataatattttctctgaggctgatgtttttctgtttgttttgcattttggtaaattcatcaacatcaatatcccctttaatgctcacaaatgcccttagaaccagcttttattgttctcattttgcaaatgagaaaatggaggcttcaagagttgagtgagtttagcaaggttttcaactcttcttgggcagagcattagggttgcagacagttgggcaccctcttcaaatgaatgtgagccaacgttggccctgttgggtgtgcaaggagttcttgcagagttgatggagaccctgtttcgagtcacatgaataattaaagcgactattaaaattttctgatcttgaacaggattgtgagccaccagcacagaatatattagttctgagtcttcaggaaatatggatacgtatttgtataaatacataaaagtgtttcattccaaggctcaggtagcattcacattg

SEQ ID NO: 155703 - DNA, 587 bp, Homo sapiens
ggcagcttcaaaatatgactcaggaaagaatgtgacatggtaaacttagaaatcttagtaaaagtggctcagggctgggtgcggtggctcatgcctgtaatcccagcactttgggaggctgaaatgggcagatcacttgaggtcaggagtttgagaccagcctggccaacatggggaaaccctgtctctactaaaaatacgaaaattagccaggcatggtggcacgtgcctgtaatcccagctacttggcaggatgaggcaggagaatcttttgaatctgggaggcggaggttgcaatgagctgagatggtgccactgcactctagcctgggtgacagagccggactccgtctcaaaacaaacaaacgaaaactgaaggcagatctcatttgctggagtgttttgaatgaggattattatggtgagaagaggctggagaggtaggcaggagccaccttgcaggtcttagtccatttaatccgtgttaaaaattcagtgctttagcccaagaaccatggcagtctttcaaagggctttaagcaaggaggtggcctgattagtgtctccttgtgtaggaggatcatgcc

SEQ ID NO: 155704 - DNA, 440 bp, Homo sapiens
tttgtgagctcactgtctgtttctaaacaaaccattgggctgtgctgtatttggactaccaccatatttccatttcctcaaatcgaggaccaggggccatgtgtctggagctcactacgggaatccagaagaacaaactctgctttgattaaatcatagtctgttttaatgagttttgtaatcctttgcattcatggtataagcatttcaaaaatagccaagattaaagattccatgctgtaccagagagactagaactaccaaacttgtatttcaaaataaatgttgtagacaataacagaagattttgtggtaaaaatagggaggttctaaagcagcttttccttgcaactcaagacattgaaaatccttaaagctagtcttttggattaacgttaatgaaaaacatgtatgttagcgctttccctcccagtatcttt

SEQ ID NO: 155705 - DNA, 345 bp, Homo sapiens
ttgaaggagtttaataggatccctgggttcaacccacaagctaccagtagcacccctaccccatcgtgacaaccaacaatttcttcagatattgataaatgtccccaaggggccaagtttttcagaagcactgcatgagatgctcccgggggtctcttgagctctaacattccacatttctacttctattagaatttcaatcagttgacatcctataggagaacagagagtttggtgatactgtttataccaagaaacagacaaaatcttgtggaaaccttccctggggcttactaacctcaccgtcacaggcttgccaacctcatcctcatcctcatcttcatc

SEQ ID NO: 155706 - DNA, 571 bp, Homo sapiens
agctgctggataaatatttgtggatgaaatgaatatgcccagctcatgtatgtccctgtccccaaatccacatgcctttaaaaataaagcacctaccttcaagggggcaggcagagaggtaagggcctttcatacgtgggttctgggggatagtaacatggtaaacagatggtctgcacagagctgtcctgacccaaggtacagagtgccagaaacagctggaactgagatagggacccaggccttctctaagtcaggccatcctccagcccccaaggtcaggtccatggtccagttctctctgaaattcaccaggctgggtctaactcaagccgctcccatggatcggggaaggtgtttggagtttcctttcccctggggttaccagcagagtccctggagggagattctagacaactgagcacaggaggaccacggggagatagggaggagaccccatgcctttgctagcgagcatactcaagtctagtttcaccatccacatgtagggcccctgagtaaatttgtaaaaggcgccctcttctggtggatacagccccacaggcccagg

SEQ ID NO: 155707 - DNA, 218 bp, Homo sapiens
gctcctctgtgggcacagaggaactcttctgtgtgggtggggggacaccttgcaaagtgctggtgtgtgagttacacctatggatacttatcctgtgaccctcagcagaaggcaggatagagacttctggttcacagaagagggtctgagagccaggggggtttccagcaagactctgagagcatggagtcacacaagatcacatccgtactggcccg

SEQ ID NO: 155708 - DNA, 415 bp, Homo sapiens
cagctgcgaaccgagaggaaatcgagggaagagagattttggagcttgaatttaaggtaagtttaagctttttgaagtctattgtttttataggtatcacatttataggatcacatttgcacaagtgatccagtatgctaccctaaattccagacctttccttgagtagtaccttttacttctttggaagtgagctagaaagtctcaggatgtcagcagccagggaataaggaaagctgaactgggtctgcagatggagagatgcagaaagacacagagagcttgatctggggccccaagcaaagaacttggccaattctgatggtcagatagaaaatggtaaagaaaatgaaaatcacaagccagatccagatggggaggatagataaagaatatgaaaagacggactcgagga

SEQ ID NO: 155709 - DNA, 263 bp, Homo sapiens
cccatatcaaataaactatcatcagagtaaacaacctacagaatgggagaaaatttttactatgtattcatctgacagaggtctaatatccagagtctacaaagaacttaaacagatttacaagaaaaaaagcaaaaaaacaatcccattaaaaagtgggcaaaagacatgacagactgaaatggtctaaaacacttatagatggagttccaggagaggagagaaagggacaaaaacaatatttgaagagctactgctactgc

SEQ ID NO: 155710 - DNA, 427 bp, Homo sapiens
ttagttcctagtccattcatgtttctccttttctgatggagttatggagttgcagatatttttcttatctttactttaacccacctggctatattcctgtattcattctcgcgctctctctgtctctctccctcactgtaagctgcttcaattcctctttagaagttggtagctgttagatttagggacagatgactcacttggtagtgtatctcagtgggcaaaggttacttcatcttttactttgaaattttatttctttttgacacttctcttcatctctacttgatatttttttctcacctgtgtcctttatcagttagctctgagaaaggaataacaaaaaattaatgaaaaaggacaacacgtctgtcaatatcctgtgtttttttagctcctctgagagcattgctgttttgctgaaggt

SEQ ID NO: 155711 - DNA, 228 bp, Homo sapiens
cgtggttgacatgacagaaccaactagcagcacataaagtcacccactaaatgtcacatcagtgtgcaggactgagccatggaattattaaagccagacctacaagtggagtgggctcctttcaggtaagagcataaagggctgaacacttgcactgttaagtatgatctattaaattttctgaaacctaccgtttttgttgactcagtagatctaaagcacagagct

SEQ ID NO: 155712 - DNA, 315 bp, Homo sapiens
ttcagaggaagcggcactaatgattcacagctccctgatgaggctgcattcctaagtccgggaccaagaccagcgaaggtcgccgtgctgactgctgctgcacttccaggggagaacaccctggcgatgctctccttcctcactggggacagaggggacgtacacggcacccaaagggacggcctgaaacaggaaaacctgaaaacagccctgactctgggtgggccactccagcccaaggctctcctcccctcctgggagggccattcctactcttagcttagtcctactgcacacaggcgtgaccccaaacac

SEQ ID NO: 155713 - DNA, 580 bp, Homo sapiens
aggagagcagggaggacagctaaagctggactgtaaagggccttgaacactacactaaaggaactgggagtaatagggagcccatgaaggtttctaggaaggtgagtaacatgatctgattttagaagatccatctgttggtgataaactgcatcaactgctgcaaggttaaaaggcaatcacccaacacaaaaggccagtggatttggtaactaaaatatctgaaggtgcactgtcacagtgctattgcaactaagtggaaggagattaagtatcgactgagtatcgcttaaccaagatgtttgggagtagaagtgttttagatttcaaattttttcagatttgggaatatttgcagatacaaaattatcttgggtataggacccaagtctaaacattaaattcatttatatttaatatacaccttatatacatagcctgaaggaaattttacctttctcttagggacacggaatcaattctatgttgcatgactgcattttgactgcatttggaggtcaggagtggtgttttccacttgtggtgtcatgttgtgatcaaaaagtttctgatttggatc

SEQ ID NO: 155714 - DNA, 184 bp, Homo sapiens
tgagcccctgaccctcaactgtctcatttataaagtagaaataacaggtgctccatcagatatgacataatgtatagatagcagttagcatgagctaggtacaaggtagagaaaaagagaagggaggcggagcttgggcgcctggagtggaagacaatgaagagaaggtttctgaacagaggag

SEQ ID NO: 155715 - DNA, 400 bp, Homo sapiens
ctgccttagcctcccaagtagctgggactacaggtgtgaacaccatgcctggctaatttttgtatttctttttgtagggatgggttttgccatgttgcccaactcgaactcctgagctcaagtgatccaatcctcctgtcttggcctcccaaagttctaagattacggtgtgagccaccatgcccagcctttttccagttgttttaaaaatgtatttttacaggtggactgttcaaatcacgatccaaacaaaatccatacattgcatttggctgttgtatctaaatgcatttttaatgggaagataaagtagataaaaattttcagtgttcattgtcctgtaccatgtattatcattaatttagaataaccgcatacaacagaaacatcccttatcaag

SEQ ID NO: 155716 - DNA, 474 bp, Homo sapiens
tctcccgtccctaaacacttaggtgagcaaaacagaggaagaaatcccgaacctctgaacctgaactgctgtaagaaccagcagttggggtggacaaatctccacccacttcccactgtctccaagagatctgaattgccatctaagaatgtctgaaaccaaactcatcattgtctcttttaaaaagtaagccctcttcctgccccttttctaactgtgagtggtgtccaaagaataatccttgccccactgtattctcaccaaaacactgccaaataacccaggcctatcacgtttaccttcataatctctaccatccatacgcccaggtaagcatgcctacctgggcgtatggagacatatcatataagtaatgctagggtgagtggcaggaagttttttcataggaggtgtatgagttggtcatagcggaatcgggggtatgctgttcgaattcatacgcccaggtaggca

SEQ ID NO: 155717 - DNA, 427 bp, Homo sapiens
gtggttggactgtaaacatcctcatgggccatatgaaagagcccagacaccatcctaagggtaacagaaagcagaatggttttaaggcgagggatgttttcagatgtacatttttgcaacaaccactctggctgcttttgcatgtggggggtgtgtgctgatgtgtgctgtgtgtgcagtgatgtgtgctgggtgagtgctgacggggtgctgggtgtgcactgtgggtgtgctgggtgtgtgctgatgtgtgcgggggtgctgggtgtgctgatgtgtgctgatgtgggcacgggggtgcggggggtgtgcggatgtgtgcggggtgcggtgatgcgtgcggtgggagcgcggatgtggtgcgggggtgagtgctgatgtgtgctgtgtgtgctgtgtgttccagcgtgtgtgtgcttcagggtgt

SEQ ID NO: 155718 - DNA, 241 bp, Homo sapiens
agttcaggagagcaaaaggcagaatcatatgtcaagaaaatcatgatcctagtcactcaaacggttccaagcctcagtttccagcaaaagttacaccatcttggttccttcaatatctttcatactgctccttattcatctcatttgttttttaaagtgggtttttctcttttggtcccttaggttgtatttcttaagatttacttcttgatccccgagaacagatactgaagttagagag

SEQ ID NO: 155719 - DNA, 153 bp, Homo sapiens
ccacgtctgacaagtccatatctaaggaaggtcactccacagattccacttctggggcaggtggcaggaaaagagggacccgaggcacaagaatgttgattcatcagccaggactgggctgggagacaggcccaaatcacatgagtgattgag

SEQ ID NO: 155720 - DNA, 301 bp, Homo sapiens
acactctgttcaaatattccccacccaacattactccctgtctttgccgccagtcttgagcaggtatccttgattttcactacacagaaaaaaagtcatcagtagaactcgaattttaacttctgccccttaaaacctacaatgtcactttgcatatgcacccagacagagagcaaagaggcaggtttccttctgtagagaaccagtctcccaacaaacatggaatcccattcttgttttccagcttctatttttcacctttccctctctgctgactcaaatacaacagcatttaatacac

SEQ ID NO: 155721 - DNA, 161 bp, Homo sapiens
ctgctctagaggttcccgagagggtgggaccacggggtaggccttgggatgtggacatttgagaataagaaactcccaatgcccgcgagcgctcttgagaaggagaacagcccctcttattagaagacctcacatgaggcaggcgcttcacaatatttttt

SEQ ID NO: 155722 - DNA, 846 bp, Homo sapiens
agctccctgaaagctaccgccattgaccagatttctatcagtgcatgcagtcaagctgaaacaagttatggattggggaaatttgaaaccaggccatctgagtttgcagagaaaacgacaaacggccacaaaacagacccagattgcaaactatctgactcttgtggctctatcagcaaagctgatcattctgggagcttggatcccactaataaaggagatgcaagggaaaagaagcctgcatctcctcaggtagtaaaagaaaaagagtctactggcactgatacctcggatgccaaaaccctactgctcaatcctaaatcccaagaaagtggaggcacagaatcagctgctaatcctacaccctccccaattaggaagaaccaggagagcaccttagaagaaaacagacagaccaagacagccaccagcctgagcctgccatctgatcccatgggtgactccagcccaggttctggcaagaagaccccatctcgctccgtcaaagccagcccacgcaggcccagccgcgtcagcgagttcctcaaggagcaaaagttaaatgtgacagcagctgctgctcaggtaggactcactccaggagataagaaaaagcagcttggcgcagactccaagctccagctgaaacagtccaagcgtgtcagggacgtcgtgtgggatgagcagggaatgacctgggaagtgtatggtgcatccttggacgcagagtccctgggaatcgcgatccagaaccatttgcaaagacaaatcagggaacatgagaaattaatcaaaactcaaaatagccagacccggagatccatttcctcagatacttcttcaaat

SEQ ID NO: 155723 - DNA, 173 bp, Homo sapiens
aatgaaaaagttatttctaggttaaaatgcaaactacaactatttgctacacaggactatctcctgcatgtggaggaaagctgggtcatggtcatttcaagatggtgggatctgctctgctttcgttcaaaccttttcttccattttcctttttgtgttcatccctctccacc

SEQ ID NO: 155724 - DNA, 419 bp, Homo sapiens
agacactgggtccatctcccttcgtcatagttaaactgaaaccttaggccgagcacagtggctcacacctacagtcccagctatacgggagactgaggtggtaagatcacttgggccaggagttcgagcagcctgggcgacatagcgagaccccatcaggaagacggacggatggaagggaggaaggaaagaaggacggaccagccgggcatgatggcacacacacatagtcccaaaaggctgagggcaagagtactgcttgagcccagagttcaagaccagcctgggagatacagtaacatccccacctccaaaaaaaaacaaaacaaaacccaatctctcttacccccaaaccaactccccttcctgactttcctgtctctattaatgacaatagcatccttctagtttcatttgag

SEQ ID NO: 155725 - DNA, 117 bp, Homo sapiens
taccaacctattttatccagggcaaatatttagtcgccttatcttgtatgataaatttcaagcctatgttcaatatcacgtctcctaatgtgacttcaaccacattcccactgagtg

SEQ ID NO: 155726 - DNA, 376 bp, Homo sapiens
cccagctccctgcactgtgcccagggcttccccttccctgtgggactccagccactctcttcccacgcaagctctccttggcccttctcccttccagctgcccactccaccccagggtgcgcttctgttctctcctaccaacaactttacttactttcttctaccagttcctctttgagtagtccttttccagaagcttctctactctcatcctcactccctgcctttggcattctgttcttttctctcatatcctttgtctccttcttttgttcctttaaactttccctgtcacgtccatgcagacaaggttggccaatgacaagagggcagccagtgacattcatggcttgctctacctcagacacatccagcc

SEQ ID NO: 155727 - DNA, 762 bp, Homo sapiens
ataccaaagcttgctctgtgaaaattcccgcataaccactgaagtttgcgacaccctaaccctgcacaccttactcctggtatcagagagcccagttgaacataaactgtgtagaggtgttagactcagtctaccctagtaggcccaacctccgagaccaaccttaaacatcagtagactgcgagctgtatgtggataggagcagtttcgccaacccctgcaaagtgactctgaaaaagacgacaagccctgctccagtcgcacccggaagctgactggtccacgcacggccaaaacatgaggaaactcatcgcgggactcattttccttaaaatttggacttgtatagtaaggacttcaactgaccttcctcagactgaaggctgtttccagtatatacatcaagtcactgaagtaggacaaaagattgctacagtcctattattttatagttattatgaatgcctaggaactccaaaaggaacctgtttgtataataacacccaatacaaagtatgtaatccaggaagtgaccagcccgatgtgtgctatgacccctttgaacctcctatgatcacagtctttgaagtaggactgagaactggtcattctctaagtgacacaagtaaagtaatagctagaacagaagaaaaaggggtcccaaaaatgtaaccttaaaatttgacgcttgtgccactattgatagtaagcagcatggaataggatgcggttctctaaattggaaaaaaaagttacacggta

SEQ ID NO: 155728 - DNA, 477 bp, Homo sapiens
gaaactggtttagggattatctctctatgaattttcttcaagctaggtaaatatttttgttcccttgtttcaatttccctggattttgttggaacatcatttttgttgtatatctcacatgcagttttgattttgtttctataaacttaaaaaaaatttaaatcggccaggcatggtggttcacgcctgtaatcccagcactttgggaggctgaggtgggcagatcatcaggtcaggagattgagaccatcctggctaacatggtgaaaccccgtctctactaaaaatacaaaaaattagccgggcgtggtggcgggcgcctgtagtcccagctactcgggaggctgaggcaggagaatggcatgcaggagaatggcgtgaaccctggaggcggagcttgcagtaagccgagattgtgctactgcactccagcctgggtgacacagcaagactctgtctcaaaaaaaaaaaaaaaaa

SEQ ID NO: 155729 - DNA, 558 bp, Homo sapiens
taaacagtggttattaggaggaaggtgggaagtagagaaaatggaagatgtagttcaaatgctacaatgtaggatgaataagtctagagatctaatgtacaaaatgaggactatagttgataattgtgtattgctttggagatgtttgctaaatgagtagactgtagctgctcttgccacacaaaatgtgagtgccacacacgatgtgagatgatggatatgttaatttacttcactataggaaccattttactatctatatgtatttcacaaaatcatatgctttaaatatacacaataagaattatttttaaaagatttcggtaccccactttcaataattgataaaacgaagactttagcaacactatcattaactgatatttataaaacactccactgaatgacttcagagtactcattcttttcaagtgcacatgtaacattctccaggatagactatgtgatagagcccaaaacaagtctcagtaaaatttttaaaaagattgtgattgtacaaagcatgtgctctgaccacaatggaatttagagatctat

SEQ ID NO: 155730 - DNA, 587 bp, Homo sapiens
agggacaaagagtgtcatgtggcatggggccaatgccaggctgctcctggctcatacctggccctgcgaagatgctcctggctcacacctggccctgggaggatgctcctggctcacacctggccctgggaggatgctcctggctcacacctggccgtgggtggtggtccaggctcacacctggctgtgagtgctggtccaggctcacacctggccatgggtggtggttcaaattcacagctgaccgtgggtggtggtccaggctcacacctggccctgggtggtggtccaggctcacacatgaccctgtgaggatgaccctggcttacacctggccctgggaggatgatcctggctcacacctggccatgggtggtggtctagacccacagctggccgtgagtggtggttcaggctcataccttggctctgggtgctggtccaggctcacacctggccctgggtggtggtccaggctcacacctggccgtgggtgctggtccaggctcacacctggccgtgggtgctggtccaggctcacacctggccgtgggtgctggtccaggctcacacctggccctgggtgc

SEQ ID NO: 155731 - DNA, 381 bp, Homo sapiens
attttccctattgttcataattatttactggttagatgtttgccctttggccatctggccctcaaactaggcatggtctctgcatttttagcatctagcatatgtatgttcctacttcacaaacaaaggtttgaaggagttgctggtgtctgaagaccctcatcagaagctagcaatgttatcatcatttgctgcacatttgacggtgtaccagcctttcccctacttccttttaacatctgtattttctctgctgccttggaggcaagggatcggactccggcactttgcctgcttagttaaattaattgtttaaaaataagtgaaggctgagtgctgtggctcacacctgtaatcggaacactctgggaggtgaggtgg

SEQ ID NO: 155732 - DNA, 146 bp, Homo sapiens
ctggtgggtgagaaccagtgccacatctaagccctgtgaaaaggcctggcagcgtcaggctggggagcaatgacaacaaagccagaggtgggacacagactggaagaatgttttaaaagcactgaatttttcagaaaaatccatca

SEQ ID NO: 155733 - DNA, 351 bp, Homo sapiens
atacgttaattttacgtaaaacaagggatttgactttgactcatttccaaaaggccccttgcagggaaaattgtcttttaaattgttttaaataatctcattttcagcaggaagaagtagaaaggataaaatggatcctgcaccacgggaacctcacagcacctcactccttgtggcttttcctgtttgatactctgctttctgaaagatgcaattttctgcctccatttctgttgccgacgtgccaggatttctagcaaagtgggcctagagttttgctggaggttacttttccttggaagcaattcaaatacaatcatcattctgtttctcccttttcattcgacattt

SEQ ID NO: 155734 - DNA, 274 bp, Homo sapiens
tacagtatgtggaatttccacgcaagcacggctccctttcctcggatggctgactctttgtgctgctgtggtcctgcatgttccaggagcttcacccagtgaggaccaggctgggagagaggctgcaggccatgctgtgcctccctgtggacactagggggcagaaccatccctagcccaggcagggttggccctttgcacagagggtgcattctcacaaaggaggcggtggcccaagaaacacctgcactcctgtttgcttttcatttcatgc

SEQ ID NO: 155735 - DNA, 240 bp, Homo sapiens
ggtgcctatctccccagctggcctgtgggctgggtgcctggcagatggggctcccagggaggtgcccccatagacttgggctccacagcaggctgtggggctggcattaatgtggctgggagagcctggctgtctttttagccatttgtttcggaggccctgggggtcatacttgtgcttcctcgtgtatttttagatctcttatcaccgtacacaccacctccctatcagagggctgtc

SEQ ID NO: 155736 - DNA, 752 bp, Homo sapiens
  misc_feature (122)..(122): n is a, c, g, or t
gcgggtgttcggctacgtcactggggcgctacggttcctggagctgggcagtcttctcgtcagagtggggactggtaagagcgacctccccgccaggtcctgtgtgttgccggctgaagaanggatgatgattattccccaccttctaagagacaaagaccagcgagccaccacagccaccagtcccagaacccgccaatgctggggaatggaaaatgagggagttcaactctggccctcacaatccagtggaggagacgaaactcatctgcctctgtccctctgggcacacctcatgccaggtgcatctgtggacaggggccatgctcctgggcttccaaagttggagaaagctgccaggctcagacccacctaagctgaagattcccttgagaacaagtactgtcctgtggtttcatggcctttcttccatttgtggttcttgcgaagtggaatttaaatgacatcttatcaagatggataaaccctagtttcccagtgctggaatatagaaaatggatggacaagtaaatcccactcagcacccatagtccaggcatggggacctcaacacacctgagccccagacatcacctttcattgtgagtagctctgagatgacacttctgctgttcccaattccagcattaattggattagatagttattttatgaagaattttcatatgccacaatcctgaccatatcttcaagtgaacagaaaaattctattaaaaagtcaaccttctgtc

SEQ ID NO: 155737 - DNA, 360 bp, Homo sapiens
tagttgggattacaggcacctgccaccactcccggctaatttttgtatttttagtagagacgaggtttcaccatgttgaccaggatggtctcgatctcctgacctcgtgatccgcccactgtggcctcccaaagtgctgtgattacaggcgtgagccactgtgtccggccaagatgtctttttaagattgccttctaaagcatttctgtttgtggacacaaggtgacgatcagttcgtgccgtcagagcctcatgccatctgttgagcaaatggatggtgcatgaccaccgggttcttccagctaagcccccaaggcatacagagccgggtcagctctgctcccagtggcactctgacgg

SEQ ID NO: 155738 - DNA, 317 bp, Homo sapiens
tcccagccaagcccccccgccccaaatgctaaacgttcccagtgatgctttagacaccaagtgttacggaacaggtaatccaccacttttcacagaaagctttttagctcctaactaggccactgtacctgatattgggaaacgtttttgaaggatatcaaggagatggaggagttccaagggagagcagcatgaatcgcaaaggtccgggaaggtgagcccacatggaaaggtctaggaggttaacttaaaagacctcagagcattgagtcatgagattgaaaagggggcggcccctggctcggcgggtaccgagc

SEQ ID NO: 155739 - DNA, 369 bp, Homo sapiens
cagatgcagaagctgaggctgagagagggtaaggagccatgagatgcaggactcagtccagactgtctgacccaggagcacccagtgaccaagcacactgccactccctggtgtctcaccgctgtgtccctggcttgtagtaggggcccatgtttgatgagtgaatttgtgagtgaggggcacccaagagcaggcagacactgtttttcacccatacattgtgcctcattaccacagagtttgttgtgcctcatgcattgtcactagggtaggggactttgcacagctggctacccactctcccccatgaccagcaccctcatttcagtatgacctcccctgattcagtcacctgaagaacagagcagc

SEQ ID NO: 155740 - DNA, 523 bp, Homo sapiens
gttttccacaggcaaacaaatcagctctgttgcctgggcaacacgtttctttcctgtgttcatccagttccagataggggtccattttaaccataagtaaagctatgtagattatatcccctaatgaatgatagagattttatcaaatgtgagtaatgaaaattgcctctaggagaaattgctctttatagagcaattgagtttagggttgagatgcaggattacatgaacataatctctccatacctattgaacattcattaggaaacattctctgagcacataagtaatgtgtgatgtatacagaaagatacagatccatgctctccaagaattcatggtaagagggggagatgagcaagaaaataaaaaggggaaagctgataatactttctcataagaaaatgataagtattctgttttcctattacaacgggccacagtggtatgagacagttaattctcatctctagcatgtggtctactcaccaaagccatgtctatatatacctgtggaaaagta

SEQ ID NO: 155741 - DNA, 710 bp, Homo sapiens
ggagacctctcctcatctgtgcatggacggatgaccaactctggggcccaggctgttgcttcccagtataatgatgaatccgccatagtctggtgagtgtagaggctgactctggagcccaggctgtaccttctcggtctggtgatgaatcctcaatcgtgtgatggagtctcgctctgtcacccaggctggagtgcagtgcagtggtgcgaactcggctcattgctggatcttacgtgtgaagcactctccccaccccgctggtcatgtgaagatgtgcttgcttcccttttgccttcaaccatggttttctgtatcttctaagaggagcacttaggccatttacagctatgactcaaacagacagctcagcgtatggaggcttgcattaggaattttagttccagaacaacttcaggaataaatcaggaatcctgagaggacccacagaccctctgaaggaagtggactgcttgtacaggacccaggagcaccccaaatactctaagaggcgggtaacctggagcaagttctcagctctgcttgcctactgtctggaaacagacttggcgctgttcggaaggggcacggtggaagtgagaccagcctttcggattgcgtgggagctgggttgaccataaaacagcctcaggcgggtacttcagaaggtattccagaagaaggcattgagctatcacaggaaatgatag

SEQ ID NO: 155742 - DNA, 176 bp, Homo sapiens
cgaagtcatatcatgtgcgagggccaaaatctcccagaatcttcaggaaggtagcacatcaccattaaggagacatgtgctgatatcctctggctcctctgaaatcatctggtgatagcactagcgctcactagggaccactaaattcagctgtgcttttgcaacaacgataataa

SEQ ID NO: 155743 - DNA, 420 bp, Homo sapiens
tgcacaaccacaccaccacatacatacacacctgcctgccattcttgaaataactcccagctcttatgtctagtgtcattatcattggcatactttcaagtgctgtttgaagccacctcttgcctgaaagtagactcaatgcagaaaggtccccaataacacggcattcctaagagctaaactagagtggtggtcacaaaaatctacttagagagggacagaaagaggatgggcaaggtggctggagacgagagaattatgctgtctcatgcgcaatttattttcagagatgctaaactgtcaggtcacaaagacttgtaggaggggtggtgaaccaacatttatcacagtggtgagagcgttaaccctttctttacaatcacctattttaaacgcatgtaaatactgcatgcgtggcat

SEQ ID NO: 155744 - DNA, 183 bp, Homo sapiens
gatctgtagatgcttgaactcaatctgtccataaatgagctcatccatctgccctcccaaacctcccaggcttcctttcactgagtagcagccagatcctcccagaagtctgggcactgggcttgatgtttgcctctccccattcaatcaactcacagagattctcctcctcaaccgccatac

SEQ ID NO: 155745 - DNA, 349 bp, Homo sapiens
tgatttgaaaactttatcaaaatccaatcaaatgtcaattaaccatttaattgtggatgagtaaggagactattttgaccaaaacatgttagaacaattaccacttatagaaataatctatgttttaatgttttagttgaattaaacaatcttttatattctgtccaggcacagtgctgggattacaggcatgagccaccatgcctgaccatttttaaatattaatttttatgaaatattttcaaacacattggaaaagtcaatcatgatttgaaaactttatcaaaatccaatcaaatgtcagttaaccacttaattgtggatgagtaaggagactattttgaccaaa

SEQ ID NO: 155746 - DNA, 279 bp, Homo sapiens
ggctgcatctgcatgtgtgttgggggaggttggtaagatgctcctctcaggagcgcagtggcagaggaggaggccttagaaaccaaggccagaatgtgaagggccttgcaagctggggaaggggatatggactctgtcctggaaaaagagggagaccatggaggttgccagactgggctgtgaccaggtcagagccctgcagcttcagccgtgccgaggcctggcggagagaggctgaggctgggagtcaagggggaggccgggcagttgttgcacgtg

SEQ ID NO: 155747 - DNA, 219 bp, Homo sapiens
aaaatattttaattttttccctcttgggctacaaaagcccttaactttatattgtttccatgagagaataagttctcaggtacgtcctagctttcaaaatgttgtgatgaactactgttctatacaatagcatcgataaatctcaaagactgatactgagtgaaagaagccacagagaagaatatattcaactatggttccatgtatatgaaggttagg

SEQ ID NO: 155748 - DNA, 443 bp, Homo sapiens
tcagttgtctttgaaacttccctcctcttctccatccaaaccatcaccaactcttgtctatttcagtagtcaaaacaattaatagcagcaacggttattaaagcattcactatgtgccaggtactcttgtgatgcatatacagcattattaactcattcgattttcataacaacttcacatcatggctcctatgattattttcatttaacggtggcataggaaaattaatttgcccaaggtcatacagctagtaagagaggaagttagtactataacccagtcattctggcttcagaacacacacttttagccatgacactctatccaagataatccccaatccattcaccttactcgttttccactgtctcattttagttcaagctcactgattttagtcattgctcactctagcaacagcaaaggtctcccaagtggtcgt

SEQ ID NO: 155749 - DNA, 365 bp, Homo sapiens
aaggtgattgcatcatcctacccattcattaatctaactccctacaggatactttcctaggagacactgacaggtctgttttctgaaatccagagaaaggcagcaatggggaggggtgcagtgtatgtatgtcatacctgtgcttggtatatctgagttgcctgtgtatgatagcagctggggaatcaaatcatagataaattgttctcatacaggtttgtcctatgactacctattcttattaaacaattggctatattgaccctttttggttttggaaaaataataataatttttttaagagagaaaaagaaacaattggctacccttcaacagtgatgttaaaaccatttcacattctttag

SEQ ID NO: 155750 - DNA, 395 bp, Homo sapiens
agcagggaatagggaggcattatagcctattgatttgtttggaattaaatgtggcaatactatatatagaaatgtctaagaaataaaatatggtagcaaggaaactgggcatgtgactactgtagtaatctaggggtgaagaaacctgaacagcaatagtggcaggagaatggaggtgaaagaataaatttaagatatttcaaaggaaaaagttgttgaatatcatgatgggttggataaaagggaggtgtaaaagattatacattttctatactggaagacaatggagttaccaatgaaagaaaggagaatcgcttgaacctgggcagtggaggctgcagtgagccgagatcatgccactgcactccagcctgggtgacagagtgactctgtca

SEQ ID NO: 155751 - DNA, 718 bp, Homo sapiens
ctaaaaggctttttctcccttaaatgagtcctagcattaggtatccctgattacagtaagcagttcactcttccattaaaaaaaacaaccttcattatacaaacacagactaatggagacaacgccctagtgcctgtgatcattcttcttacgctggaaaatacctgctttgcctccagcctgtgttctgtggccaggacagctgtcttggtagaggcttcttgtgttttcatcctggtgtccctctttatggggctgctccacctcagcactccttctaaaaaccaaagtgctgggctacatgcgtgagccactgtggctggccaaaagagatttcttaatctaccttccttcttgtgtacaaaagggccacaaagctattaaaataaatcataattatgtctgttccaagtccattacttgaacatgacaaatcagtaagagacactcattttcttctagagaagtaggtatcttcaagggccctgggctcaccacaagttcacaaatgcatagcttcttggacatgtctggccttagctgacagtaaatactaaaatatacttcagatacaaaacatctactacatctaactcaagctagcaatgtctgattaccttggtcttaacatctaaaaggctttttcttcccttaaatgagtcctagcattaggtatccctgattacagtaagcagttcactcttccattaaaaaaaaa

SEQ ID NO: 155752 - DNA, 621 bp, Homo sapiens
ctggccagatttggcccgtgagctatagtttgctgatccctagactagagttcaaagtgcaggccccaatctcagagcattatgagttctgtttgtgatgcctgtggggttttgttttattattgtctttgtatttattttggtcattcaagaaatattaaaccatagccaaatccttatcctaagtgaactatccccagtagtgaagaaaacatgattcgtgcacacagaagtttaatcttgtaacttttaagaaacagtgcaaccatagaagatatatgatggcaaataaatacacaaaaagatattaacatcactagccattagggaaatgcacattaaaaccagaataaaatactacatacttactagaatggcaaaaattaaaaatactgattattcaaatgctggcaagtgtgcagagaaactggatctcttctacattactggtgggaatgtaaaatgatacagctactctataactcagtctggcagtttcttaaaaaaatagaaaaaaaaagaaactaccattaatcacctagcatttatattcctgggcatttatcctggggaaatgtaacttatgttcacacaaaaacctgtacacaaatgttcacagct

SEQ ID NO: 155753 - DNA, 509 bp, Homo sapiens
aaaaagtttgcctatttaacatgtttgctgtctgtctcttctacaacataaagctccatgaaggctttttgcctgtgctgttcagaatagtgtctgggacaccacagaggctcaatatttgtagaatgaagaaactgttgttctctaataaatattttacagaatgttaagggcaggtaagatttcagagttgggattatggccgggcaccgtggctcatcccagcacttggggaggtcaaggccggaggatcacttgaggccaggagttcgagaccagcctggccaacattataaaccccatctctactaaaaatccaaaaattagctgggcttggtggcacacgcctgtaatcccagctacttgggaggctgaggcgggagaatcacttgagcccaggagatcaaagctgcagtgagccgtgatcacacccctccactccagcctcagtgacaagatcctgtctcaaaaaagaaaaacttccagagacaaagggaaacacgggtacc

SEQ ID NO: 155754 - DNA, 325 bp, Homo sapiens
aacgggtgatgcggttgcagactcagggccttgagcactgttctttctcatcttcgtggtgggggattatggggtggaaatgcactctcccggtcggatcacatcccactactcaccagcgttatatcccatcgcggcttcacatatattacttacctggcccgggtggcattttactttgcatccttgattgggagtctcaggggctacgaacaaacgttttacccccgggtagcaggcgggtcaggagcgagtattcgcggagcgggataagtggggatgtcgctgcgccctcgtcccttcatctccgggggacggccactct

SEQ ID NO: 155755 - DNA, 405 bp, Homo sapiens
gtgtccatcccccttcgtgtgtccatcccccttcgtgtataattcccatagatctagaagcatacctctgttggagcacttctcatgcgccatcataatcattttctcatgtccatctcccccaaaaaaatgtttctcgaggagtaggctaagcggttcattctacaacttcttcagtaaatacagggctcggagtcctgatgctgccatttacaagtcgggggaatatctaaaggtccctaacatctttgatcctcagcttcctgatacacgaggaggggcagtgatagaatataattcataatgttgttatgaacaataaatacaataagagaagtaaagaccttaatagaatgcttatatatagttaatgctgggtgatggctattatcattatatgattac

SEQ ID NO: 155756 - DNA, 137 bp, Homo sapiens
ttattatcaataatttaacacgagaagagcctagcccttagcaaatatttaatttcaaaacatacctactgatttactcagatacagcatacatactatattacaaatatattgcaggaagccaaatgccaataaag

SEQ ID NO: 155757 - DNA, 493 bp, Homo sapiens
tctgcttggtctgcagtgcagtagagtcaataaagccaatctaagacaaccttcattcttgagatgtatgctggaaaaaaattgtttagaccctatttctgggggtctacacatactcactctattcgtatgtcacagggtccaaattgatgaaagctggccgatgctactttgaattctaaaaccccagttcataacactgtgtaaaatatgctcatcagcctcacccacagggcccatacttttggataagaaatatccaggttggatcaattaaaggtcattataaaatgtggattttactaccttctcttacatacaacctccagatggttgttacaacgtcgtattccccttcctgtttgtctatgctttttatgagcaggacaggaaaaggacaggaaggcagctggggatttggcagtcaagtgagcatacttgatgctcacaccctctcttttcatgctcccagtactgtttgttgagtccacat

SEQ ID NO: 155758 - DNA, 316 bp, Homo sapiens
  misc_feature (86)..(86): n is a, c, g, or t
cccgggtcagtacggatgtggtgggaagacctagagaggttatggtccaccttagcactagctctctgagctataaggcctcaggntctgtggcattccctactcactgaaaagaagggaatttaaaacatgagttccaccacccagaaatgaaacagtgttcatttccagaatccagccatatagaacttatttctcttccaactacatgtcctttcatctcatttatacatgttgactaatgtggtgccctattcctggagtgctcagcctttcatctccacatagccaaagtgtgcacatccgtactggcccg

SEQ ID NO: 155759 - DNA, 291 bp, Homo sapiens
taatctgtaaatttatcctatgtattgacttatgctaaaaatatttaaattcagactaaaatgatctatataaaaaatttaaaatgtacacaaaatgatctttatagatggcaagtataaaaaatataaacagaagtgaccttattatcacgaaatactgaaaactgctttatgatatttccgtggtatttgtaaactgttgtcttgttttttatggctctcagaaatcacttagttttaatttattcaaccagtatgttgagcgctttttttttttttttgagacagagt

SEQ ID NO: 155760 - DNA, 278 bp, Homo sapiens
ggtgcacagtgccctggagtgagatttgaaataaacaattaaataaatgtgatccaaactattttccttaaagataggctttataaatctgtgtgtttgtcagacttttaaaaagaggcatctttcttcctgggggtagagctgaaggccaacctgataggtcctgtttggcagctggccctagtctagagatagaccagaaagagagaagttggagctcaggaagtaccagtcatacactaaaggttcttcactaatcatatattcacagtggaaaa

SEQ ID NO: 155761 - DNA, 916 bp, Homo sapiens
aactcctggcatcaagtgatctgtctgcctcagcctcccaaagtactgggattacaggcatgagccactgtgcccagctggaaatatattttttttttaaaaagggaaaagtttgtactgtattatcaaagaagaaatggttttggttgagataaaagataaaccatgtatagaacaaatatgtaataaaaagccaagattgacaacacaggaagatcatatcttctattaggcaagataaagtatatttagaagtatactccctaccacacaggatatgccgagtgcacagagagaggtacaaaggcggtgctcagagcatggagggaggggagttggcgtatgactttccccctgtgtctcccctagaagacaaaagctttattttgggacgggagcaagattacaagctagattcaggactgtgttagaggaaagggcgggattattgaaggattggcaggatcactgaaaatgccatttccttggtttctggggataaactgccttgcccaggactgaggcttaatcagaataagagaacaacctccgaccctcattccctactacaaggctgacaagcatggattgacaagtaatatgcaggaaagagactttctctgagacatggtgcacaggaaagactgaagtctgagagtgcagcagtcactggaaaatagacttggcaatcagcccttgccctgaacacagggtatcactagaggaatgtgaggctggcaggtcactgagagtaaccacagagacaacaaacctccaagtcagcccaactcctagttagatcaactcaaacccttacactagacacctagcagaactagcagaaggaaagatgtgcccatttccaggcattaaaatgtatttacccccatctttattctcccacactttcaatata

SEQ ID NO: 155762 - DNA, 400 bp, Homo sapiens
tgaattttgtgggggatgaacatttagtccatagcaacataaagtagaacataagattatagtcagttactgattgcagggcaactaaaataccagttttccattgggaagatgatttgtcttgaaactaagacaaaggattaagagagtaatggctttctttgttttccatcaggaatactcgcctgttactagtagtacaacatttgtatcgtaggtttagtactgtgctccctctgcctaccccagaggtcattcctgtcattctccccttgctcactagtaggtccagccacaggagctttcttgagggctttgaacttgccccttttattctgaaatagaccttccttcataatcttgactaccctgtgtaaattaactcatttccattccaacc

SEQ ID NO: 155763 - DNA, 564 bp, Homo sapiens
ccgcgtgtacagcctggatgtgctatcccatcatgcggtgatcgagagctgcgggagagaaatgtccctcttctctgcgactgaatttcctgaaagcagctgctgagagggtaccacgcgccatctccctcttgtgtggtcagcctgcttcacacccacacagctgagtcccgggctgttgtcctgtcagagcatcacccccttctggatgattgactgctgtcagccttcaagccccacatctggacaacccgctaagaaagctgggcttcctcctccaccctgccgttctctcacgccactcttgggctggccttggagcctgccccaatctccctaaaagcctcactacatggggaataaaccttttcctccctccttgtgtgtgtgtgtgtgtgtgtgtgtgtgtgtgtgtgtgtgtgtggcatggccagtctcaatatgtaaaccaagcttaagtggagcgtccttccagcaacaacaccccctccattcctcagaccaacagatcttttccttacatcccattcttagggggcttagaaactggactctgatctctaa

SEQ ID NO: 155764 - DNA, 3165 bp, Homo sapiens
  misc_feature (1433)..(1433): n is a, c, g, or t
  misc_feature (1620)..(1620): n is a, c, g, or t
  misc_feature (1754)..(1754): n is a, c, g, or t
  misc_feature (2427)..(2427): n is a, c, g, or t
atgattgtaccactgcactccagcctcaaaacaaaatgaagagatgtctatacaaggcaggaaaatgctagagacagagtaagagattcaggcacatctggttagttgtccagtctttttcttttttaaaaatatcaggccaggtaaatctcccttggatgtcaaattggccattttggcacattaactgggccaggcaagaatcctaaatccaaaccctcttacccattaacactgaggagaagcatacttttctttgataaggaattctaatttacatgggtatttgcatgtttaccactaattaatcccctttatctatagtgcagaaagggcttaaccttatgctggaacctgggggacagaggctaacgaaaaattttgaacatagctagacccaaaagaagtctaaatcttcacattccaaagatgccttatctaccctttgacccattctttgagacaaggaattaagccagtaaaggtgggagaggtggataacattcaggcttctctggagttgatagttatcctacatgagatacttctatgttgaagatattcctacttctatgttgaaatatatgctgtaataatttaagtaaaattactttcttttgtggaaatgtagaacagctgctcactgaaatggatatttcttcatatccttgaaaactgttgagtcacccttagtattctcttcttagatataataagttctaatttttccttacttggctcatttttaacccttttatctttttattattctgaaatctctccaaggccctcacatgtcctcaagttgtagagtcttaaattggacaacactttaattacagcctgaaggttaggtagttgttattccatttatatatcttagtatttgagtttacttttgaaatataaagtcttagtgactaatttagcatgtggttctctgccactcccttcctgaccacccaccacccctcattcttatcttctttttttaccttgtttgtacaaaaaccagttgttgcctattttatttcttctgtccataccctgtctgtctatgcatttaaaaacagagaactcattccttataaaacagacaaaccagggataattgtcaacatcaaaaaagaattctttaaatcactgcaggcttcctttaaataggtgtttcctgtggtggttttaagtgtttttatataggtcatcaactgcttgatataaagaaactaaagataaagggttaagaggcagtgccagttgaagaacagttagaaattgggataaaacagtagttcttaggtaaacagtaaaatacattcagattcacagaaaaaaaatatgtatatatatattttttgagatggagtctcacagtgttgtccaggctggagtgcagtggcgtgatctcagctcactgcaatctctgcctcccnggttcaagcgatcctcctgcctcagcttcccgagtagctgggactacaagcgtggcaccaccatacccggctaatttttgtatttttagtagagacggggtttcaccacgttggccaggctggtttcgaactcctgagctcaagtgatctgcctgcctcggcctcccaaagtgctgggattacaggngtaagccactgtacctggcctgatttatgtattacttttcaagagaatgttataccaataatattttttgtctagatacagtgaacttttcatcatctgtactaatggaggcatgtacattttaattttgttangcatttttgttgtaacatttaaatatagggatgtctaatcataaaatttaaaaatatttcataatttcatcatactgaagactcaggaagatctgaaaagaaacagaaagagtaccagacctggaatagaaacctgacttctaaaattggctatatagctagctataggaccttagttgaattgcttcaccattttaggcctgttttctgaactatacaatgagggatttcgactaaatgagggattttgaccaaatgatctctgaggtatcttaaatctctagctttttatgatttcccacccttgccaaggagttgagtaaacattggaggtgatgccaccaaaaaagtgaaagcacaatttttcctttatatgatggagtttgctgtagtgtagttttctctttcagaaatgaacgattatcctgattagattttgtttgcccacatcctgttatatcaagtcatgagtatacccccattgaaactcagagttgatttggtttacagttgttctaattgtatcctaagtcttctagctaaaattttaaaatgaagtagtcaccccatggcgttatttatttattttttgagagggaatcttgctctgtcgctcaggccagagtgcagtggtgtgatcttggctcactgcaacctgtgcctcccaggttcnagcgattctcctgcctcagcctccagagtagctgggactacaggggcatgccaccacgcccggctaatttttgtatttttagtagaagcggggtttcaccatattggccaggctggtctcaaactcctgaccgtatgatctgcccacctcgacctcccaaagtgctgggattgattacaggtgtgagccactacgcccagcccccatggagctatttttatttaaaacacatacattataactctattgatctgattacaaaagtgcctattttgttaaaatgttttattgtgataaaaattcaaaaattattaatgttagccaacaaaattcaagcaaaacataaatgtgtaaagtaaaaagtgaaagatttttccttagtccctctcaccactcccattctccaagaataacttaatttggtgtgtgtcttcccagatgttgttctgtttgtgtttatatattaatatacacatatatacatatatgaatacccacacatttgtatataggttttttttaaatgaaatgggatattatatgtactgttttgcaacttttttcactttgcattgtattctggacctcctcttgcattaatacatggaaatttacctcatttaaaaaatgactgcataacatttcatggtatggttgtatcacaatttaatgattcacctattgatgcaaatttgtctccaatcattcactattataaataatgctacatataacctt

SEQ ID NO: 155765 - DNA, 1262 bp, Homo sapiens
atgattgtaccactgcactccagcctcaaaacaaaatgaagagatgtctatacaaggcaggaaaatgctagagacagagtaagagattcaggcacatctggttagttgtccagtctttttcttttttaaaaatatcaggccaggtaaatctcccttggatgtcaaattggccattttggcacattaactgggccaggcaagaatcctaaatccaaaccctcttacccattaacactgaggagaagcatacttttctttgataaggaattctaatttacatgggtatttgcatgtttaccactaattaatcccctttatctatagtgcagaaagggcttaaccttatgctggaacctgggggacagaggctaacgaaaaattttgaacatagctagacccaaaagaagtctaaatcttcacattccaaagatgccttatctaccctttgacccattctttgagacaaggaattaagccagtaaaggtgggagaggtggataacattcaggcttctctggagttgatagttatcctacatgagatacttctatgttgaagatattcctacttctatgttgaaatatatgctgtaataatttaagtaaaattactttcttttgtggaaatgtagaacagctgctcactgaaatggatatttcttcatatccttgaaaactgttgagtcacccttagtattctcttcttagatataataagttctaatttttccttacttggctcatttttaacccttttatctttttattattctgaaatctctccaaggccctcacatgtcctcaagttgtagagtcttaaattggacaacactttaattacagcctgaaggttaggtagttgttattccatttatatatcttagtatttgagtttacttttgaaatataaagtcttagtgactaatttagcatgtggttctctgccactcccttcctgaccacccacactccttcagggcgcatgagaccatattaaattcctatttacctattttggttggacaaaaaaaacacaacacacccaacagagaacacaccaacatgacacgacaccgacataaacgactaaactaaaaaaaggggggcgggggccaaaaaaaacactcccggggggcccgcgtcggccacccggttttttgtaaaaagggcccccagaaggggggcttaaaaaaaagaggcggggcggtaaaacaggccggcgaaaagccgcgggtgtggaaagccccctggcggggactgccc

SEQ ID NO: 155766 - DNA, 2367 bp, Homo sapiens
  misc_feature (1433)..(1433): n is a, c, g, or t
  misc_feature (1620)..(1620): n is a, c, g, or t
  misc_feature (1754)..(1754): n is a, c, g, or t
atgattgtaccactgcactccagcctcaaaacaaaatgaagagatgtctatacaaggcaggaaaatgctagagacagagtaagagattcaggcacatctggttagttgtccagtctttttcttttttaaaaatatcaggccaggtaaatctcccttggatgtcaaattggccattttggcacattaactgggccaggcaagaatcctaaatccaaaccctcttacccattaacactgaggagaagcatacttttctttgataaggaattctaatttacatgggtatttgcatgtttaccactaattaatcccctttatctatagtgcagaaagggcttaaccttatgctggaacctgggggacagaggctaacgaaaaattttgaacatagctagacccaaaagaagtctaaatcttcacattccaaagatgccttatctaccctttgacccattctttgagacaaggaattaagccagtaaaggtgggagaggtggataacattcaggcttctctggagttgatagttatcctacatgagatacttctatgttgaagatattcctacttctatgttgaaatatatgctgtaataatttaagtaaaattactttcttttgtggaaatgtagaacagctgctcactgaaatggatatttcttcatatccttgaaaactgttgagtcacccttagtattctcttcttagatataataagttctaatttttccttacttggctcatttttaacccttttatctttttattattctgaaatctctccaaggccctcacatgtcctcaagttgtagagtcttaaattggacaacactttaattacagcctgaaggttaggtagttgttattccatttatatatcttagtatttgagtttacttttgaaatataaagtcttagtgactaatttagcatgtggttctctgccactcccttcctgaccacccaccacccctcattcttatcttctttttttaccttgtttgtacaaaaaccagttgttgcctattttatttcttctgtccataccctgtctgtctatgcatttaaaaacagagaactcattccttataaaacagacaaaccagggataattgtcaacatcaaaaaagaattctttaaatcactgcaggcttcctttaaataggtgtttcctgtggtggttttaagtgtttttatataggtcatcaactgcttgatataaagaaactaaagataaagggttaagaggcagtgccagttgaagaacagttagaaattgggataaaacagtagttcttaggtaaacagtaaaatacattcagattcacagaaaaaaaatatgtatatatatattttttgagatggagtctcacagtgttgtccaggctggagtgcagtggcgtgatctcagctcactgcaatctctgcctcccnggttcaagcgatcctcctgcctcagcttcccgagtagctgggactacaagcgtggcaccaccatacccggctaatttttgtatttttagtagagacggggtttcaccacgttggccaggctggtttcgaactcctgagctcaagtgatctgcctgcctcggcctcccaaagtgctgggattacaggngtaagccactgtacctggcctgatttatgtattacttttcaagagaatgttataccaataatattttttgtctagatacagtgaacttttcatcatctgtactaatggaggcatgtacattttaattttgttangcatttttgttgtaacatttaaatatagggatgtctaatcataaaatttaaaaatatttcataatttcatcatactgaagactcaggaagatctgaaaagaaacagaaagagtaccagacctggaatagaaacctgacttctaaaattggctatatagctagctataggaccttagttgaattgcttcaccattttaggcctgttttctgaactatacaatgagggatttcgactaaatgagggattttgaccaaatgatctctgaggtatcttaaatctctagctttttatgatttcccacccttgccaaggagttgagtaaacattggaggtgatgccaccaaaaaagtgaaagcacaatttttcctttatatgatggagtttgctgtagtgtagttttctctttcagaaatgaacgattatcctgattagattttgtttgcccacatcctgttatatcaagtcatgagtatacccccattgaaactcagagttgatttggtttacagttgttctaattgtatcctaagtcttctagctaaaattttaaaatgaagtagtcaccccactgcactccaggctgggcaacaagagcaaaactctacctcaaaa

SEQ ID NO: 155767 - DNA, 469 bp, Homo sapiens
  misc_feature (1)..(1): n is a, c, g, or t
  misc_feature (3)..(3): n is a, c, g, or t
nanggagaagattcattcattcatccatcggacagcagccacctcctgccctctgggagcctggcctgcaggtgtgggatccaggtgtgcaatctcaccttaactcattctctgtgtgtgctagccaggccttggacaggggaggggcctgcccctgcagtctgttcttcaggacacagaccgtggttgtgcatctgtgaagtccggtggtttgggtagataagtactatgggaccagggcccagccacctgtgccccagcatccctctgtgtgttggtccaatcttgcttttctgctccctgtgttccttgcattttgccacaaaagtgagactgatgctacccagcacgtcccacgaccccagccccctctgtccttctcacctccttgtgaagaagctgagccgaaggtgcgtgatggggcccagagcccctatgctgggctcagccctgtgttcccgggaccctc

SEQ ID NO: 155768 - DNA, 1083 bp, Homo sapiens
tgacatgtaaatagaattgtggtttttctcactgccacattgtgtgggtggagggagattctaaagggttttaggaatcggaaaattagggagaatcaaatcatgggtgcttaaggcctcagtgaaacactgtaaattatactgctgacggcgaggaacctgcttggcaatgtggcaaggggattttatccactcaaccaacacgtctgagtatttccgaataggttttattaccaggtgcttaaagaatgtgtggtgacataaatgggttttatttggggttctgttagtacaaacggtaactttttgctattttgattgttttaattatttaaaaatatgtagtattacagagttttgaaagaggaagagctagatctcaaccatttatagaagtctcgtttgttttttccatttgttttttatatagttattttaactgtcagtgaaaaaatatgtgttgagtttatttagtggccagactcagcaaactggaagtagccaagacagacatagctcctgccttcatggagtttacagtccaaacagaggataaccattgagctaattatcactatgtaaaattaccaagtacatttacttgtttacttgtgcatgtatcccctccctagaatataaggtcgcaggcggcagggatcttgcatgtttcaccctctatccctgtgtataaaaggctctcaatatttgaccaagtaaacaattctggtattaaaaccgttaagatggaaaatcgccggctgctgtggaaacgcttgcctttccgcctggtttgggatatcagagaaggtttttctgaagaagtgacatttaagatgagacttgaaaccactgggcaaagaatgatacaagcagaggaagttatgtgaaaaggctccgaagctgagacgttctaaaaatctctgaaagctagtgtggctggccctcagacaactgaggcaggatgtggaagcagaggacagatgccatagaacagaagaaggaatgggaagccctaggaggatttcaagtgggttgtatcctttttttttctttttttcacttcatgtagcctattattatatg

SEQ ID NO: 155769 - DNA, 498 bp, Homo sapiens
gacagataagaaatatagccagcaggacaccagtctcacaagagaacgaagaatagacagtaggtagtaaactatggatataatttcctggctttgaggaaacaggtatgggggggaaagcaatgttcaagacacattaacaatgccacaagttcctacaaaaagtcccggagctcttacaaattttcagttttaaaaaaagatggcagtgcagggcgcggtggctcatgcctataatcacagcactttgggaggccgaggcggcctgaaatgctcatgacctcagaggtcctgaggtcagagtttgagactagcctgacaacatggtgaaaccctgtctctaccaaaaatacaaaaattagctgggagtggtggctcacgtctataatcccagctactcaggaggctgaggaagaagaatcacttgaaccaggaggcgggggttgcagtgagccaagattatgccattgcactttggcctgggtgacaagagcaaga

SEQ ID NO: 155770 - DNA, 524 bp, Homo sapiens
ttctacctgcttgtttgcttgcttgtttttgagacccccagatgcagaaggtggagttaatcatacttttatcctattgtagcatattttcatcaccaatctgtgcaaggttcccaggtcactttgttgtctaagcatttgtttccatttatccccacctccaactttcatttcctcccctacccatttacgcaaggattttgttctgatcgcatgtagttgcttcttatgttggtgttcttacaaaataggtattgtggtggccgggcgcagtggctcacctctgtaatcccagcactttgggagaccaaggcaggtggatcacctgaggtcgggagttcgagactaccctgattaacatggagaaaccctgtctctactaaaaaatacaaaattagccaggcgtggtggcacatgcctgtaatcccagctacttgggaggctgaggcaggagaatcgcttgaacctggaaggcagaggttgtggtgagccgagatcgcgccattgctctccagcctgggcaa

SEQ ID NO: 155771 - DNA, 596 bp, Homo sapiens
caaacaaacatttagggagcatgtgggaaaagggatactagccaaggaggctagagaaaagtagtcagaagtaggtggataatgagaggtgttgacaatagctgtgtcacttctcaaggcatggggtgtcccaaggcaatgcagagacttaattctgattccagaggcactgacttcctcctcggtgttacacatgatatcaggaagagctgaaatgacacgtatgcaaaggttctcagatgacaagggaagtggtgagcagcagacaagaaggcaaaagaagccaggaggaggcctgtcctggagggcttcatatgcttaattgcaaaatccacccaaaaggaagaaaaacgaatcaacagcgtcagtgtattccagctcatggcagaaacaggaaactcaatctgaacaagagtaattggctcatgttaattttctccactttcattttatcacgttgtgagtcaaagaggtaatttacagaaagggctataaagcattgtgtatgttatgtggagtctattatgcatcattattacttcatttatatcctaaagtaccaatttcaacaaagtaatcaggttccattatctctc

SEQ ID NO: 155772 - DNA, 360 bp, Homo sapiens
cagctcatcagtgtatttcatgtgtagcccaagacaactcttcttcttccaatgtggcccagggaagccacaagattggaaactcctcatctaagccttgggctcacacacttcggtgtaacagtctggaagccctcaagtcagaggtaccccatgtaaaaatcctggctctactgttagcagccgttcttcctcaaatgaaaatgcagagaacacctaccacacctggtgataattaccaagatatgtatggaaaagggcttagcacaaagtaggcacaaaacactattccttcaccctcagttcttgctccagcctaccctccacactgctcctggagaggtgtggttacccattctg

SEQ ID NO: 155773 - DNA, 545 bp, Homo sapiens
ctgtctacctcttccaacaccctctgtgtactcatttcaacagcactggccttcttttttccaacaaagtgagctcaagacatctgacttccttttcctgtatctggctgtctcctccaagcggcattccctacctgaccctctaatggaaagtagtcctgtcccagtcagtcactttctcatctattgctttgtagcagacaactgtaagaaattattcatttactacttgtcttctcacccacaaagaagaatgtcagcacgatatgtacaagggcaatgtcaatccttgtgtgcttactatactgcaaagaaccttccacagagaaaaacattgtgaccctgaggaaaacattcaaagtggagcaaaatgcaacctaatatgattctaaggatttttatactacgcaaaatagccaaacagacacgtttataaaaggcttagcttttcttcctactgacaattgaaggctcttacttgaacccttgataatcaacaagattagaatgactaatgaagggtattcttgaggaaaaaaaaaaac

SEQ ID NO: 155774 - DNA, 288 bp, Homo sapiens
acctgtctcgcagagttgctgtgggcgtaaaatgtgacaagggatttaaagctcagcacagttcctggcacagagtaagctctggacacgccatagctctggttgtttattaccggtgataaaacagatgggtcctggtgacccagtggactggaggagatgcagggacaaacgcggccaagtctgaagtttcagatcaggaccaaagcccgggtctctgcagctggtatctgagcacagaccaggtctccaggtgctctcttccctgctgaccctaagggctggggc

SEQ ID NO: 155775 - DNA, 383 bp, Homo sapiens
agttcgacggagactctcttcacatcccagcctcatgcccttgtcttcctctcatctcctgctggggtggaagagaggatggagaagcagggagaggggatccggaggggcccacgccaggaaaccaggctgtgtctaggtgcagctgttcttgccgagtctctcctgtctgcaaagtgagggtgataaacgcctgtcccacgtatgtcctggggctgttgtaaaaatcagctgagaagctggatgctggcgacgtgtgttcacggcgctgttctctgccagagtaagggataattgttgctgttgataaacactcactgggtcctcaccacgaactgagtcttttcacatcctcagttctgctgggagtctctaacctctgg

SEQ ID NO: 155776 - DNA, 259 bp, Homo sapiens
ctacaaaaattcatttgacctcattaactgtaaataacatctagaaggagcatctttgtgacatactgatttgaagatctgggtttaacttcaattgatttcggtgttttgtcatagctgaaaaagataccatacaaagatgtttagatccaaataaaaatagtatatcattgattatgctaaataaattacaaaagttattttaaaatgtcttccatcagtcatgcaaaggtgttattttaaaatttggtcagcaaat

SEQ ID NO: 155777 - DNA, 670 bp, Homo sapiens
  misc_feature (535)..(535): n is a, c, g, or t
tgccatgaggactagaaacctggaaacctacgtttcccagctactccatctccccacaccgcaggctttctgttatgttctgatgatgaactactgcaggaacatatcaggaaagccaagagaatccacagaccctttgaagaactgtaccacccctgcagactccctgagatgccaaaaactgtgaatctgcttgctttctcaactgggaggctcatggtctgggcttaactcccacttataagtgaaaatacgtaatggtctccaactccatccaggtgtctgtgaatgccattatttcattcctttatataggttccccagtgaggattgtcaggcctctgagcccaagctaagccatcatatcccctgtgacctgcacgtatacatccagatggcctgaagcaactgaagatccacagaagaagtgaaaatagccagttcctgccttaactgatgacattccaccattgtaatttgttcctgccccaccctaactgatcaattgactttgtgacaatacaccctcccttanccttgcggtaatgtaatttgtgatattccctcacccttgtgaaggtactttgtactatacaccctccccacccttgagaaggtactttgtaatattctcccctgcccttaggaatgtactttgtaagatccaccc

SEQ ID NO: 155778 - DNA, 374 bp, Homo sapiens
aatcaggcagcaaaatttaagaaaaagcattattcttccccttccatccatcaggggacatgggatcattttcctcccactgggggtctgagttcattatgtggctttactatatgccctattcacaagccaatatagggtaacttctcttccaatgagacaatcagattactcattgggcaggacttcctggctcatcaagggctctattagagaggatagtagaaaatcatctatttgttaataaatacctagtcaaaatagctttctccctgcaaggacagttgctgtagtattgatgtttttatgtatttcacaatacagtcttgctttcagtctcattactataatgctgtgtttgtaccttccatcat

SEQ ID NO: 155779 - DNA, 522 bp, Homo sapiens
agtagtcagttgtcctttgtgccacatttcatttatccatttatctttctatccactcatctgctgatgaacatctgaatggtttccagtgggtctttcttttgggctgggggtcgggggaatcccgggaggctattatgagtaatactgctaccagcattcatacacaagtcttgtgtgggcatgttttcatttctcttgggtggatcccggaattgctaggtcacagggttggtgtatattttccaaaagtcccagggaaatgtgaaaaagcggccatgtttcagcctgacctttgagctccaagaaggtattacaaagcactgcgtgttgcacagtcgagtggtaggaacaaaagcatagaaatgcctatccgcgaatttcaattcttttaactcaccaccctccatctactttttccttcttcttttcaaggcaacaatccttggtagcaccaaataatgtgaaactttaactccttatttatctgatgccatcaggaaacaaggttgtccaaacaag

SEQ ID NO: 155780 - DNA, 421 bp, Homo sapiens
aaaggaaaaagaggaaaagaaaagaaaacttatatcgtgttccagagtaaaataattacttggggtttatctgttactaccctcccacattagaataataattgagaattaactacagttcagttacaactaattatataaatccttataggttactgtgaataccagcggaacacagaattgtttatagtattagtatttcaggattcaaattggttcagaaagaaggcttggaaatctatttgttatatgtatttctttattatatatttaatatgtaattattgagataaaatctgtttattatagggaaattgggttattagcccctcatattctagtctggagctgtttctaaccatagatttttaaaattacagtaaaactccgtgtctccaattactgtgaaaccatataatga

SEQ ID NO: 155781 - DNA, 270 bp, Homo sapiens
aacagtaggggtgcatatgtagaatgagctatgacaattttttaggttaaattgatttctctagaaagtagccatccaaattaaataaaagttaatgccaaaagccacacctctggcaatacaatccagggacctggtccaaatgtggaaaatttcccccagtttcacgtggttaaaagtgacttattaaagaatattttacaatacaaactcccttttggggcttagggtattaagaggaaaaaaattttttaaggaaaatattacaag

SEQ ID NO: 155782 - DNA, 177 bp, Homo sapiens
tctcactctctctctcccttccatcttccttgggtgtgtgttttgttccttgtcctcccctctagttcccctcatctccttcctcctctctgagtgtcagtgtctgcctctgcccagccctcaagctttcatttgaacaacaacaaacactactggatagtaaacagggtccttttg

SEQ ID NO: 155783 - DNA, 235 bp, Homo sapiens
atttttcttcataaaaggtttacaagtaaaaccagtcaaaagaatagtgaaaataaattccttccccatacatagatcattttggtctggtcaataattcaactgtcttagataacaaaactgtaaaataaaaacttttaaaaagcaattttaaagattgttgctggaaagtaagttttttagtttacattgaacagaaataggcaaatgtctcatattgcaggtggcttaaaaa

SEQ ID NO: 155784 - DNA, 220 bp, Homo sapiens
ataaaggataagcacaaataaatatgagttcacatggattcaatcaccatgatacctgtacagaagtcatacttctgttcaaataattcctaatcacatacatcacttagaacagagtcaggcatttagtaagtactctgtgtatgtttgttaaagaaataaacagaacacaattactatgaaatggatgaaaaatcatttcacaagtgcatgccaccta

SEQ ID NO: 155785 - DNA, 513 bp, Homo sapiens
tatatatactttaagtgggggtgggaggagggtgagggatgagaaattacctgatgagtacaatgtacactattcaggtgatggttacactaaaaagccagaccactgctatgctatatatccaaaactgtaccccctaaatctataaaaattaaaaaataaaatagtttaagatgaagaaatgcctatttttccagaaggctccttgaaactgttgcatttaaattatcttaaatgtttcattacctctcatcttttaaatagttcatgataagtttttggttttttttttttttagtttttttgagacagagtttcactcttgttgcccaggctggagtgcaatgacgcgatctcggctcaatgcaacctccgcctcccagattcaagcgattctcctgcgtcagcctcccaagtaggaagattgcttgagccgggaaggcagagattgcgtgagccaagatcgcaccactgcacactccagcctggacaacagacaaagaccctgtctcc

SEQ ID NO: 155786 - DNA, 136 bp, Homo sapiens
aaaaaaaatatatatatatgtatacttgaggcaagtacaagtcaagtacccatctctctctatttttaaaattcatgctttctctgctatcataacattcggtctataaaacgttgatttcattaccaaggcaaag

SEQ ID NO: 155787 - DNA, 609 bp, Homo sapiens
ttctctccccaccccctccaagccaaaatgtcagaaaagggcctggtttccctttatggagtgcaaaataaacagatcctcagcagcaggagaggggcccagttccccagcccataatgccagagctgggggtgggggtgctgtggggaaaagcagttattcttctgtctggttagtatttggcattgactttcattttctccaacctctgttttctagaagcctgcctgtacgggaagtacaggaataaagagaagctgatcgtgggggttttcttgccagacttcaaaggaggtggatttttgatttttgatagtttggagagctagttccaaaagtaaaagctgctttggggacttgaacctagacactgggatcttagccgtgtgcccatcagagccgctgctctgctcctgatggaatggagtgctctgggcttcccactctcctctcccagtccaggagggctggagctctgggcatctcagggtcagctgcggtgagcctggccacagggctctgcattccttctgggctttgcttggtttgagtgggtgtgaccgccagtttactctggagaaaactgagacaaagagtctaaattgggca

SEQ ID NO: 155788 - DNA, 465 bp, Homo sapiens
agatgcaccaatacttactgttgtgttccaactgcctctagtattcagtacagtaacatactgtacaggtttgtggcctatgagtaataggctataccatatagcctaggtgtgtagtaggctatactatctaggtttgtgtaagaacacactatgatgttcacacaatgaaatcacctaatgttgaatttctgagaacatatccccagagttaagcaacatatgactgtattaaaaacccattgacttgtacacttcaagtgggtgaattttattgtatgtggaaaatatctcaataaagctccttttaaaagtgggagatgtctagagctgagcaaaaattaaatgcagagatataaaaagaccttcaggttcaagtcaaacccctgatagaaagacttcattcacaaagaggagatctatggcaacagaacctgggtttcttcactaaagacaaaggcacct

SEQ ID NO: 155789 - DNA, 506 bp, Homo sapiens
ttactatatgccaggcagggaagagggtcagagaggcaagcaatacacagaaaacaggtacagaaagaggccttcactgagaccttcactgagacttgatctcagctaaagaaaggcacttcccccaaatcaccgcaccttcccaggtaacctacatccaactacttggtggggagagagagggggtataaagactcagcccctttgacccaatttgggagtacttggaaaggttagcctaggtccagagctccttgctggactgggtaagccctttgttatagctgcaacacagttcaatttctccctctgccccaatccagcttcctgcatgcaaatatccatcttcacagtctgcttcctggggggaacttgacaagtgagggagaggatgaaccgttttcttttcttttcttttttttttttttttaagagatggggtctcattatgttgcccagtttggcctcaaacttctgggctcaagcgatcttctttcctcagcctc

SEQ ID NO: 155790 - DNA, 726 bp, Homo sapiens
ggcacagaatgaggcttgacacagactatgtcactaacttaagacaaaattaaaaaagaaaatcaacaaaggagtggaagctacagtcagtttttatgtggatttcccctttggtagaagaaaatgtcgatttctccgatgtgttctgaacagtggtttcaggttatcccgagttgttctcctcctatggtgatttttttcttccctatgtatgtgtcatttatgtgggttttgggcacagtgaaattcaacctaagaccctttagggagttcatttgtggtttgactggttgagtttccccagtcaggattcatagaagggccgagtaagtcgcagctgtgccctcacccagccacttcccaacataagattaccctgcatgctctctggtaggaatgctgctgatcattaattggagctcttttaggctcatttcttgagacttctatttttctagctgagctcccagcacgtggccttgtaaatgtgaaaggtcgtggcagggtctctagcggtctctggagcaactgtgggcacccatgaatgggctgcctttctgtccccctttgacttcctctccccacctcagcttggattttggaacgtcaggctcatgcttggtgtactctgaactgtgcagttgacatgttcccagggcctttgtcctgggctgtgagggttaaccttgctgctttatttatattccgaagccggttgttattaat

SEQ ID NO: 155791 - DNA, 291 bp, Homo sapiens
cttgcacccaggaggtggaggtttcaatgagctgagatggtgccactgaactccagccgtaggcacagaagaagactccatcccaaaaatcaatcagtcagcctaagggcttaaaattttgtgtgtgaatacttttaggcaccatcagagagaaggcctgtactcttcaaagattacggataccaccatttgtctgacatcttacacactgaagacttagcattttacctgcattgcctctaggaatttgagtttgtaactcctagttcagacccttatcaaatggccact

SEQ ID NO: 155792 - DNA, 446 bp, Homo sapiens
ttagtgtccttatttataaaataaagtctttggactagacatctcaaaatccccagccagggcaatcctttcaaaatcctttgtagctagccgcagtttaggcaatagatggaaaagcactttgagaagtggttaaaagctcttaacacatttcaaaaggtgttatttttgcagagcagagcatgaaattatacatatagaaaaagaaaaaagaactttgaaattttagtagctcaaacttaaatgtaaaaatgttcattttaagtgtccctcctctctctccttcttatcttcaacaaagagggcctattttaatgtacacagataatttaagtattcacacctatcctgtgtttaaccacaccagagctttggtaaggtctaaaatagtgcatggatcttacccctttgtttgccttctccattgataagagttgttaagagtc

SEQ ID NO: 155793 - DNA, 453 bp, Homo sapiens
aggaagctcatcctgatttttaccctcaatccaggccacacagctctgtggtttgaatgaagttgtaggcagcagaacagagtgtgctgcttgtctgtccctcacatgctgtgtggtcttgggaggattactttacgtctctttatccttagtttcttcacataaaaaaattcagattactcttctaatggcctagcttactactctgttgagtctgctttgtaaactggtgtacactgggggtgggaaaggagggagaaattgacacagacagctatgtaactgtcatggacataacagactggccagcagcacagggaaccctcagtacatcagtctgggttgctaaggtttctagacatctgagggtttacacttttaagcaaataacactttttaaaaataaaaacaaacatcttaaacagaaaactttataaaacatattacacaaga

SEQ ID NO: 155794 - DNA, 187 bp, Homo sapiens
agcctttacatattattcattcttatttgaaattcactctctgaatgtccaactgctgggattacaggcatgagcttggcctaattgacatttttataacacttgacccagcagctgtagaatgaagaaaatctgccaaaaagtaccacattctgggtcataacaaatcttaacaaatttaaaagaa

SEQ ID NO: 155795 - DNA, 129 bp, Homo sapiens
agttaatgcaaagcagtctggaggactcctaaaatatctttttaaggatggtttaaggagctaagtaaatattttaaaaatttttttaaaggaggtggacattcaatttcagtcaaagaatctaccaac

SEQ ID NO: 155796 - DNA, 441 bp, Homo sapiens
gctcgtaactgctacctgggcgtatgcgactacagacacatgccactgtatgtctaatttttttttttgggtagagacagggtctcaccattgttgcccaggttgaatctcgaactcccggcctcaacgattctcctgcctcagcctcctgagtagctgggattacaggcactcatcaccacgcctggctaatttgtgtatttttactagagatggggttttaccatgttgcccaggctggtcttgaactcctgacctcaggtgatccacctgcctcggcctcccaaagtgctgggattgcaggtgtgagccactgtaccaggctagaatggtaacttttgaaacccatttttgttattctaaagtcttcacggtgtggtgttgggaaggctgggttgctgtgtcagatgggtaccctcaccccagttatggctgttctca

SEQ ID NO: 155797 - DNA, 239 bp, Homo sapiens
gtgtgtgcttggaaaaaagaaggaggagaaatatagcagggagtggtatagagaagtcatcagattctgcttgaagccaccttgaggccccacagcctggcagcagttagtgcttgtgtcagcccacctgttcatcctttgttctctggaagcagctgtcttatcccatgatcctccatgggccctgattttgcactttgggaagttcggagttgtccattaccctcacttgtcacatc

SEQ ID NO: 155798 - DNA, 228 bp, Homo sapiens
catggacttatttgatgttacttcagactcgggaatgtgtagttttatatcttttcgctaaatttgagaaggtccagccattacttcttcaaatactttaaacacctctttcccctccttctgatgttacaaatgttagttcttttgttattgccccactttccaaatactgagagaaccaaactacatcccattccctcctgccttccggctctgtctaagctacca

SEQ ID NO: 155799 - DNA, 529 bp, Homo sapiens
ggcagcctgcagggccctcggaggcactccttctgactcaccattagagatcactgtccagagatggaggaggagatggcatatagcatagtcctgagaagttgtcttactgatgtcatctttaatattagcctgtgttctatgacagcagggggctttattcctaattcagtgggtcttaagcagagggattatgtgagctgattcgggctttggaaagattaatgaccacaaggtagtctgcttcaactatggctgacccacttatcccagacccttctctgccctcactaccctcttccagaccctgcaagacagaatctggggtgattgcctgttcacttcagacaccatttttcctacttgttcagggcaaataccaccatccgacacagtgaagccatacctgtagccaccttgacaaagtgctcctcgtgacctggtccagccagaaatcgattttgctatgacttggtccacatctgtcattcttgaccactgccccaaattgcagacctttgcttgcact

SEQ ID NO: 155800 - DNA, 139 bp, Homo sapiens
tttgggagactgcgtctgctgttgatctttccaggtcttccctctcctttaggaggcggcctcatccttctactggcacatctgacacttctgacagttggagctctgacgaaaagctctcatggtgggccacgtggct

SEQ ID NO: 155801 - DNA, 172 bp, Homo sapiens
tgtaagtattgctacctatagatggaacctcagatttactgtattccccaagcctggactgtaaacaagacttctcatcccttcctctatggccatcttctcatttcacctcacatttggttatgacagccccatcactgtctatgaagtgctggctgtaaactcgtcatct

SEQ ID NO: 155802 - DNA, 293 bp, Homo sapiens
tgatgtgtgctttcacttcacagagttgaaactttctttttattgagcaatttggaaacagtctttttgtggaatctgcaaatggatatttggagcactttgaggcctatggtgaaaaaggaaatatctcacatgaaccctagacagaagtattctgagaaacttctttgtcttgtgtccattcatctcacagagttgaacctttctttggattgagcagtttggaaacagtcttattgtagaatctgtgaaaaatatttttgagccctttatggcccatggtgaaacaggaa

SEQ ID NO: 155803 - DNA, 680 bp, Homo sapiens
caaacaaaatccaaattcatagtttaaagttgttttccatataatgtaggatacaatgcaactaaacttcctgccactacgtaacacaaatcccctttcctcctgtttccaataacatgtatcctcatttcctttcaagtcctcaccaacaatgcttttaatgtctatatttctatcaaaagtttgtttatgaagatctaggtattaagtccatggtaggttttctccactgtgctcatttccttttaacctccacgggcagtctttaacttccaaatttctactaagagtctgttcaaggtaatctaggctttttataaagcatgctcctcaaaactcctctagtctctatgcattaccctactcaaaagccactttcacatttttaggtattggttacagcagcaccccacacttcctggtaccaaattctttgtgaatttcctgaagttaccttaacaaattaccacaaactgcatgacttattttatcacagctttagaagccaaaagttggaaatcagttttactaagctaaaatcaaggtactggccttccttctggaggctgcctgcgtttctggacttgaggccctcctccatcttcagtgtacttcattccagcctctgcttccattgtcccatttcctttttctgcctttgaccttcttgccactttttt

SEQ ID NO: 155804 - DNA, 197 bp, Homo sapiens
gcaccagcctgcacattgcctctccatacggcagccctttatttggaaacttcctaaatcactttgctgtgtgtgtttacacgggtgggttttgctttacttgccctgagagcacacgggagtgcagcacacaccccaacccacatcaactgccattaaagaaaagaaatttcagcccagaatttcatgtccagcaa

SEQ ID NO: 155805 - DNA, 266 bp, Homo sapiens
tcagaaccctggggtttgagaaacaatgctgcagaatatctttcagtcttgtccttcatcactctatttactgaatcaatttggcctagaggatatctggtgccagggttgataaaagctgtcttgggatttttacagctgtctggtcagaagacatgcttatgccataacagctccagctccttctctcactctctctctctctctctcacacacacacacacacacacacacacacacacacgaacagcactagaatgtgcttt

SEQ ID NO: 155806 - DNA, 341 bp, Homo sapiens
atctgtctgtccccagcaaacctgtctcatttgtacttcagtctcgtaatcatggtatctgtctctgtgcctttattttcatacttttctaccaatgccccaggaaaactatattttctcacaaaaccagcgaagattttctacaaaagtcagtggtcaagcgtgcaatgttagttgaacatcaaaagagcagtgtgccagtctactatggggaaagctaaataaaagaaaagaaaagaaagaaatatccaccatttcaaggatcccaggtgaaggccactttcttgcaatgtttccaagatttgaaagagttagttttgaaggacattttgttacatttt

SEQ ID NO: 155807 - DNA, 110 bp, Homo sapiens
gtagtgtgataggatgctagacatggggactccgtcagcagtgatttatttttattgggacttttggtgcatttatgtgccaaaccaatgagtttatagtttactgtagg

SEQ ID NO: 155808 - DNA, 581 bp, Homo sapiens
catgcttttttttatggcaacgaagtattccatggtacaacacattttctttatccaacctggcactgatgggcacctgggttgactccgtgtctttgctattgtgaacagtgctgtgatgaacatatgagggcatgtatatttttggtagggtgatttcttctcctttggatatacctctcatgccttctgccttctctctacctcgttaatccttaagcaatggccatctggcttctgcttccaccagccactgaaacctctttcaaagaccatatactgacactcctgtcttcacgctcttcattcatctagccactgtggctcatattctcctcagtctgtccctccccttcttgggttcctcatcctgctcttctaaatgtcgagatgcctgcagcagttacgcttatctctggccactatctctgcttttatctcctttcttaaaagtcttcaatgtctctaggctggtgtgtaaagtcctctatcttcagttactacacccttttcaccttcaaaatcctatgcgcacctcaaactcagcaagtgttaactgaattagtcatctttgctgccat

SEQ ID NO: 155809 - DNA, 650 bp, Homo sapiens
agaccccttatcatcatttttatttgttctagcagtagaaggggttaaatagatgattgatagggctgtggcaatgggtttgatctcaggtttctagttcggggatgagttagagcatttatctatccttcaatttgtggatgatactctttatttatttccagtaatggaaacagaagtaattacctttgtgagacttcttagatgctttgaagtaatatttggtctgaaaattaactactccaaaaggtctttaattggttccggctctctgggaggcggaagttgcagtgagctgtgatcgtgccactgcactccagcctggttgacagagcaacatgctatctctaaaacaaacaaacaaacaaaaactcaggttcccacaccctctaaaccctgcctcctctcaggctacagagacctctccaggaggctgaagtgcccttaccccgaccatctgaccagccaccgccccatgcccgtgccccaccgagggcggaggctgctcactgctctgttttatctctggcctctgatcctgcattcttgtgccagggcttagacccagggcaaggtcttagacccagggcaggggtagggttaaaggctttcaacccaggggccagtgccttaattcatgcaacaaatgt

SEQ ID NO: 155810 - DNA, 593 bp, Homo sapiens
aaggggagctgggagatcccatggcaagaggcagtgagagtgacaagggacaagcttctttaaacagccagcctcttgtgtgaactaacagtgagaacccactcattaccatggggagggctccaagctattcattacagatctacccccatgacctaaaacctcctaccaggccccacctccaactttggggatcacattttaatatgaaatttgaaagggacaaacatccaaactatatcagcacttaccttttaggattgctgtgaggcttaagtgagataataaatgtaaagtttctagaatagtgaatggatcacataacctcctgtctaaattttagctattattattgatgctgttgtttttgaataccttaaaggttatatgttaaacaaaattgtaaattgaaacacagaagccctagagatactactggtcaaagaatatttaggtaggtgttttgttttttcttcaacctaggtattcttttgcaacgcacatcagtctccctcaatttcatttattttgtaaattaagagtttcctataccaggtgttctgaaaactaggtatctccttttttcaaaaatg

SEQ ID NO: 155811 - DNA, 604 bp, Homo sapiens
tgtgttcagaggaactggttgtttagagaagttttcttttgcctagaggaactggttgtttgacctaatgttagcagtctcctagtccagcagtttctaaactttgctgcaaattggcatcaactgtgaggtctctaatgacgatggatgcttctgggtttcacccccagacattctgatttaataggtatggggtctgacctgggcatcgggatttttaaaggatcctatggtaggctgaataatggcctcccaaagaataatggtctcccacttcctaatcctggagcctgtaaatatgttaagttacatggcagagtgaagttacggaaaccgatggaactaaagttgttaatcagttgaccttaaaacaagggagatgcgcctggattatccaggtgagcacactgtaatcaagggtcttttaactgaggaagagggaggcagaagagtctatgtgaaagtaatgtgacttgagaaagacttgatcagccactgctagctttgaagaagaaagaggtctatgagtcaattaatgcaggtggcctttagaagctggggaaggcacgaaaatggattctccctcagagcctgtagggaagaa

SEQ ID NO: 155812 - DNA, 343 bp, Homo sapiens
atgaggatgtgtggtgacactgatgaactgagtattcaggaaccaagtcccgtttaggtagaagccagcagatctcaggactgcttggcctgacgtccgttccgcggaaggtcttctggtgacatcggtgtctgggatcataacccttgaggcattcattgcagaaacctgtgctgtcttctgaatcgccacagacagatgacattatggacaggctggtttcagtattaaggtttttagtattttaacgttttgaaaatcgccaggatgtgtgtggcgtggatggaacctactatctagactctgccagaacattctcttccatgattgtcttaatgggctg

SEQ ID NO: 155813 - DNA, 417 bp, Homo sapiens
aagatgcgctgggaccagcagccactcgctgtaaagagctgggggcttacttattcttaatacaaaaaaacaaaaaaaatttaggtgggcacagtggcaggtgcctataatctcagctacttgggaggctgaggcaggagaatcgcttgaacctgggaggcggaggttgcaatgagccaagagcatgccattgcactacatcctgggagacagatcaagactctgtctcaaaaaaaacaaaacaaacaaacacctcgggaatttctggctcaagcctctgatcctcaccaccactatcaccaggggatcttttgctgttcacccaagtccagccttcatcccctaaactcctggggaaatgcgaccagactctccccatctccattccgggagtttgcctcaagccaatcttgttct

SEQ ID NO: 155814 - DNA, 537 bp, Homo sapiens
ttgaggccaggagtttgagagcaacctggtcaacatagcgagatcccatctcttaaaaaagatacatacacaaacatacacacacacacacacacatctgtcttaaagtttgagttcagctaaggggtcagttatgtttcaggaatgtccatgcagaagaaaagtgatttatgtattgaaaatctgtgtctggtcaacatgagaagatcgtttgaagcttgaatggtgtgttcttctgtctaccttgaaaaacttgtcccaaagtgagttttcaagatacaggatgtatgactgtctaatgcttgtgaggagcttagcaagaatgaccagcgaattgcttatgagtctcattagctcatttacagttgccttaaaacatagctgcattgggctaacccaaatgcctcatcaacatacctgtagagattcaaatatatgagaagtcttccctctagagagtgagcccttgcttagtgctgcctttacagcactgtgcatcttctggattgttccattcagtggaagagaagcaatgac

SEQ ID NO: 155815 - DNA, 387 bp, Homo sapiens
cacctccaccacctccttctgttgcttggataaagctgaggcatgtggcactgttgtgagattcttagaagatacaggcaagtagtcctggctaggaccctacaattgagtttgcaccatgaggctctaaatctcagcctctctaggtcctggtactgtatctttggaagacacacacaggaaggacttagataccttctgaaaaagatgggacaaagaaagcttatactcctcctctcccctcctcttgcttggaagatcatttaagattaagagatgaagtgacttttcccactgaaggggacacagggcaatgctatgattcggagtgtccagaggcctgtgttccagccatggttcccctatgtcctcaccttgggacccagc

SEQ ID NO: 155816 - DNA, 542 bp, Homo sapiens
aagctaatgcttacaagaagcaacctataattaagcttttattcctgttttggtttacagagttagaagatcatagaacattagggtctgaagggactttagcagtaatcgagtccaattttggtcattttaaagacgtggctgcgtcactgaaagtagatttaaacaatgagtccctaaatgcactctctccttcccatgagtccacaccacaccacaccagggtaggaggcactgaaatgaaagcaatgccgagaaactaggaagtgatgctcctggctgacacttgccaggccctgatgataggaggtccaactctgggcgctgaggttctctgggttcctggcctaagctgggggtgggcagggagagacatgggaaggagggaggctaataaagagaatggactcacaagaatgctgccgggctctcacccttcaaaattgtcaagatcagatgacatcttctggtcctgtccaactctattattctacatcaaccagagaccacagggccaggaagaggccgtttagcctggagct

SEQ ID NO: 155817 - DNA, 274 bp, Homo sapiens
attgtggaaaataggttaaagtatgtatttttgaactgttcataatggcactaaaaagtccaggttaatattctgaactacgtcttcccaatctgtgcatatataaaaatatattacacaaaactatctttatatgctcttattaaacaattcatctgccacttggtatttaggttgtttccaattctttattattctaaatgcgattaacaggttttactggccaggcccagtggcacaggctgtaatcccagtgtactcggagaattgcttg

SEQ ID NO: 155818 - DNA, 293 bp, Homo sapiens
gcttttccctatgcctcccactaagtacaattaaaaaccctgagcattttatataatgcaaacataagactttgaaagatcaggagaagaaagcagaacagctagagtccttgagacctgaggaacaacccagttttatgttccctgggatttctttttgttcccagagttggtgctggagaagctagcaacccagaagcacaaaccagcaaaaacaaaaaacaaaaactaagaaaagcctgtcctctctagccaaatgaccaggaaagggaccgcctatcagacaggaaacc

SEQ ID NO: 155819 - DNA, 426 bp, Homo sapiens
atagctcctaaactggcggtcgatttataacagaggtaataggtgatactaatacatgtgactgtggaccaccaagataaaaaagtacattcttgtcttggaagactttaaaaagacattacaaggactagaacaaataatttcatgcccatacaccaggcaagtactgggcaaatactgtatgatgctgcttaagattacaccaccattgagtacttggacagtattcttatcccattcaaaaccccttaaaatttttctgactggtacattgaacttttctaaataaatagcatatcctcaggtttcagtactagtcatgagtcagtagggaatggttggtaaatctgaatctgtaatagtaattggaaaaaaatcagttcatgtagtttgttaaaatataggtgtgttgggtcggattaatac

SEQ ID NO: 155820 - DNA, 540 bp, Homo sapiens
gacactcgagtcggtacctaggggatccttattaaaaatttttatttaatcctacacataactaatagaatctcttttttcccctgtggaaataaaaaaactgcttattaaaaatgcagagccccagacgaacagtacactttgagagaatttcagtgagtctggaataggcctgcaaatcagcattttgatgattttgatggaggttgtgcactgtgagaaacattgctctgtttcttattacctccagaggcataaatatgtaggtgctgtctacataaaataaattaggaatggtatgcttccagcttgaaaatgaacaaataaatgtacatcagaactccatgtatgttggtgtatgtttcacataggaactgaagatgatattagcacagatgtcagataaagggacaaacctaccatccacaggttacaagtgtttagtattacagaaaacattttaataaggatcccctaggaatttttaataaggatccccctaggggatccttattaaaaatgcacgttggccaggtgtag

SEQ ID NO: 155821 - DNA, 638 bp, Homo sapiens
gacactcgagtcggtacctaggggatccttattaaaaatttttatttaatcctacacataactaatagaatctcttttttcccctgtggaaataaaaaaactgcttattaaaaatgcagagccccagacgaacagtacactttgagagaatttcagtgagtctggaataggcctgcaaatcagcattttgatgattttgatggaggttgtgcactgtgagaaacattgctctgtttcttattacctccagaggcataaatatgtaggtgctgtctacataaaataaattaggaatggtatgcttccagcttgaaaatgaacaaataaatgtacatcagaactccatgtatgttggtgtatgtttcacataggaactgaagatgatattagcacagatgtcagataaagggacaaacctaccatccacaggttacaagtgtttagtattacagaaaacattttaataaattacctaggggatccattattaaatataattgttgtttgactgccttctagtcttctgtttcctatactaatattctctcttgttgatattacagaaagtagagtatttgaatatcctacaatatattgtattgctctctttgtgtgatcagggggatgctctagagctg

SEQ ID NO: 155822 - DNA, 364 bp, Homo sapiens
ctgggggcttcttgttcactagagcccagggtctggtcatcagctctgtgaatggaaaactggactttccctgaggtgaccaacaggtcttagtgctgttaagtcatgggacatgggaatgcgtcatgggacattcctcctgtgatctggaatggacacgcccctcactagggatcacctgggttcctcccatcaggatacctgggaaaccagattaaccagatgaacaaccccatgccttgtacaagtagaagcagagcaaatcatgataaacagaaggcagtagactttattgagcccttacatgtgccaggccctgcgtcagccactttacatgaatgatctcatttggtcctcattgtaa

SEQ ID NO: 155823 - DNA, 370 bp, Homo sapiens
cagcattcctcaccacgagggcctcgctggtaccctcagaccctgccattaatgggggtttctttaaaagtgaagctggagagaggagcttcagcagacagggatcttccagccaaaaggaaggctggaagggagccgctgtgagctaatcccctgcagggctgtccttccaagaaaggaacccagacaacacagaaaaagttcttgagcaattcccaggcggtccagctccacagagccccagggtaggggccgcaggaaaagttccccaaaggcgtcttctcagctgggaggaaggccgtcttctcagctgggaggaaggccgcagtgagctctgttcccactgtgcggcaggaaggtgctgaatagg

SEQ ID NO: 155824 - DNA, 530 bp, Homo sapiens
tttgttattttcttgtaaatttgtttgagttctttgtagattctggatattagcccttcgtcagatgagtaggctgcaaaaattttctcccattctgtaagctgcctgttcactctgatagtagtttcttttgctgtgcagaagctctttagtttaattagatcccatttgtcaattttggcttttgttgccattgcttttggtgttttagacatgaagtccttgcccatgcctatgtcctgaatgagatattgcctaggttttcttctagggtttttatggttttaggtctaacatttaagtctttaatccatcttgaattaatttttgtataaggtgtaaggaggggatccagtttcagctttctacatatggctagccagacaaaactgtactttaaattcaattttagagttctgttttatttgactgctagttttgcaaggtgtcttgtttcgtaaattctttggaaatgtgtactaattcagctacattacgtgttgatcagatgactggcctaagaaggtaaa

SEQ ID NO: 155825 - DNA, 525 bp, Homo sapiens
gagactgggagatggaggttgaggtgagccgagatcgtgccactgcactccagcctaggctagagagtgagaccctctcaaaaacaaacaaaaaaactggaaataggtaaatttctttttctgtacagagaacttctttctatgttaaaggtagaatttcctattaaacagataggttactgtattaaagttttctgataccttagttacatgactttaagttgggtctagacagcaacatgttgaatgtcactcattcttatcacttatgccctactccatcaaaagtatacttgaatacagccatcacgaacctaaaaacagaacaacaaccctaatccaaagatcagtgagcttaactatgtaaaatttgaatacaaacttactgacttacgggaggcgggggtggggggaccatttaaacagacagatctggacattagccttatgctcaatcttcaagttaaaaagacacatcagaggtcatttagagatcaatttagtattcaaatatattgctcactt

SEQ ID NO: 155826 - DNA, 234 bp, Homo sapiens
  misc_feature (45)..(45): n is a, c, g, or t
  misc_feature (212)..(212): n is a, c, g, or t
agcatccccctctaggggactccttattaaaatactgtttttttntactgtacttaatgccacttcactgtacacttaaaacattattaaaatggtaaaatgtatgttacatgtatttaccacaataaaaaaaaacatttttaaaaggaagtagtaaagtgttgaccctattaaaaaggaggagggcagtattttgggatttttaataagancccctagggtccgaactgagtg

SEQ ID NO: 155827 - DNA, 363 bp, Homo sapiens
gccatttactaatgtttttttactgtacttaatgccacttcactgtacacttaaaacattattaaaatggtaaaatgtatgttacatgtatttaccacaataaaaaaaaacatttttaaaaggaagtagtaaagtgttgaccctattaaaaaggaggagggcagtattttgggatttttaactaggggatccttattaaaaatacaaaaattggctgggcgtgccggtctgtgcctgtaattttagctactcgagaggctgaggcgggagcatcgcttgaacacaggagttggaagttgcagtgagcacgccactgcactccagcctggcaatagagtgagactctgtctcaaaaaaaaaaaa

SEQ ID NO: 155828 - DNA, 335 bp, Homo sapiens
gcctcagcctcccaagtagctgggactacaggcgcccgccaccacgcccggctaagttttgtatttttagtagagatggggtttcactgtgtcggccaaaaaaacccctggatccacggcggctctcatggccggcattcttgggcagcggcgctgccctcgggggaagagccccaggacggaagatggcccctgcaaggcccggcggtggctaaggacctcggcgtcctgagactcttcctgcaacaccttggaaccgttttcgactccggttttcgagagagggagctgggacccagagaggagaacctgctcatctgaggtcacacagcgat

SEQ ID NO: 155829 - DNA, 284 bp, Homo sapiens
atgagtttagaatgacccatggcagatgatccagcaaaatttttccctttcatagcaactcttagcaaccccaaactagcaactgtagcttagagtggccagaatccaaacttgatgcagtgccagcatctgtcccaaaaactttcattttagctatttttcattacagttaaaaataagaaggggattgtatatttagcttgtttctcattttacattttgttgtatattcagtgagccagctctacaggagctggttctatcattgtatattttactggtaa

SEQ ID NO: 155830 - DNA, 703 bp, Homo sapiens
attctaactctgtgacatgcagtctgtgacactgagagttacttgcaccttcctctggactggagatcctttctagtgcagacattttataattctattctgtatcgtgttcatttaagtagtctgctttatcattacattaacatttatgaaagacttgctggtatcattggcttagcgattatttttccatctagatgctttttttaaagaaatgaagagaatatgtaatgttttaaatgtacattttagttttgatttaaattttaatcaaggatttttattttatacattacatactgatcactgttttatgttaactctggtcctaataaacagaaaataacaatttggaatatctacaacaatgagagctcgaggtaaaatatagcataaataagacatatatgtgtatgaactgagatatatagaaataattaaatgtaacacatcttttggaccataagcctcaggaagctataaggattatttgcattcttacacctgggcactcttcctttttgctgaataccagtttttcaatcttttctatttttgaaataggtaagaaaagaaaataattttctagaatttgaagaaaaatcttaaaacatttgaaattctttgttatgatgactaatataacgaatagcactcaggtttatcaaatattaacatttttccatatttgttatagaatttt

SEQ ID NO: 155831 - DNA, 676 bp, Homo sapiens
gacctgaagagctcaggacaccaaagaccacactgtgcagttcataaataatcaaattttagaacttttgagtaaacgattaggtaagttggccagccagtgaatcagcctttggtgaatggattttcagcagccttcctagaaccaactcctacaaatggccatacgatactcatgtataggtcacaaaagcttcatttgttcaaagacactaatttttaggaaaacatcagatcatttgaatggctctcaaagactcctccaatgtttagctgagggtctcatggagcagaggcatagttaagagaagaagaggatggaggggatagacgagttcagggaggagtgatagccgaaggtggactgagtaagtattttatcaaagtctatgtggggacctgggcaaaagccagagtgatgcacattcagctttggcgaagagggagaaacccagcattgatctgaaataagtaaaatggtatctagctgagctgccggcaattttagccattcgttgttactcttctgtatcacagaaatgcgtacgttgagagcctttgtcctttgcctagtatttagaattaagattttatttatcatatgttattcattgggatgatgtcagttaattaaagtctagagaaatgtgggtcaatgttggtaattcattgacttt

SEQ ID NO: 155832 - DNA, 203 bp, Homo sapiens
ttctaggggatgatcccacaaatatattcaaatgtgtgagaggtgttcaggattatttgacatagcaaaagactattaaaactgtttttcagtgctacactaatggttaattaaatgatgtaacatctataccacagagatgaaaaataatattgtagatgtatgtataatgaaacaaaataataaaaaagctatgttgttga

SEQ ID NO: 155833 - DNA, 547 bp, Homo sapiens
tgtctagaggatccctcgctattcatcggcaccatctcagattcctgaggcagcatgatcttttctccactccttgggatgcctgacaatttgtaaatccacgaggaagtgtttgttgcaagggccttccttaacaatctcatgcaaacagcatgaagtgatcaaaagaaataagtcttgtgttagatttgccttgtccagttctgtggggtggcagaaccagtacctcaaacacctttgagaaatggtgttcagggctggaaattgggcgaggtgagagaagcttttgccctgggcaccaaatttaagaggagacccaaaacctcaggaatcaagataaatgatagtttcatgcaatattttcaaactatcaaaataaaatattttcaaaataatcaaaatttaaaaaatccaggatgaacagaatgtcataattttaagtgaagacagtataaatattgatttcaaagctgacatttaagtactgaattcactaggggtggaaacaatgaggacaccaggaaactagcagctgtagccatgggtg

SEQ ID NO: 155834 - DNA, 249 bp, Homo sapiens
caaagcacacagagcagagaggcaggagaacggctttccagggcagccctaggatccctctctgtgtgaggacagggagctgggcgggaaatagtcgcccagggccccttagaagatgcccaatagggctggaaagacaatcgctttttgtcttaaatacttgaaaagttaaaagaaccaaaatgtaagcccgacagtgcccttgacttacatttaagcaattctggatgctattgagcaaccaccaaa

SEQ ID NO: 155835 - DNA, 678 bp, Homo sapiens
tacatgtagctagtggcaattatatttgctggggcgggtagagaccatttaatcaacacagagagttctagggacagtgctggcctccaatgacccccaggtcctgaggataacgctattaaccattgcaagggaggtaccgccccatttcacagactgaggaagctgatgatcagatgactgaccggctttgtcgaaatcatagcaggagaggtagggcctggatttgaatccagattcggccgactgtccaactgaggctctctgcagaacaccatgccaccatctcttccccatgcctctagctgaatgcaattccctgtctccatgaaacagggggcgaggtcatcagtgaaaaacgagacggggcagggaaaccgttgtggctgagtctcaaaatagtcctgccactgccaaaaggaatagctctgatctcatctgcgctggtaaaaatgttttcctcctaaagtatttgtttcagaaataagcctttaatttgaatgctttcagagccaacatttctgtctgctgaaaatatttatttctattgtttggcaggaatcaatttgttagggcaccagccattctggcaagggctcccttccccttcgcgaggagaacactggcagggaagccacccgcgggcctgtggctcactccctgttggggtttctcagc

SEQ ID NO: 155836 - DNA, 520 bp, Homo sapiens
aaagcacagtctcatatccttgttgggtttctgaactgagaaatgatctttggaccttacagagggtagttgatcattttagggttcagaataaactgagttcagtctatagactgaatagactgcagccaatagagcttactcttccttggtctaatgaaaataatagaggaatatgccatgtttctccttttgttgatacatctgatgaattctaatgttttaagaaattcttcaaaggtattgtaacatgtattccctggttaccatatagattggtggaggtggatagtgaatcatacatagtgggtacttagtatttcatttaaggtttgctttgaattctcagaattcaattattttagttgaagaaatcgatagttttctccaagaagtaccaaatgttataagtagtctcattagaaaagaaacttcatctttaggaaaaatatgttcattttattttgtaaaatgttgattatcaataaagagacctcaccctttaaagagataaaattca

SEQ ID NO: 155837 - DNA, 603 bp, Homo sapiens
atttgagatgcagttaaatcatcaccaactccagggaggcttttctcagtcctcttctcctccttctgcagttaggggcagacacctaccctctcccactcccttagcagttctgtacttacatctccaggtacttaacatctccagattgcagtgaaccatttgtcatttttcttttctagcttatgtctttcatctccgtattctcagtgcttggcacattgtaataacattcatttcttcgttcacttattcaagaggagctctgttaacaagttagatccatctcctattcttacagaccttataatctttttaaaaataattttatttcatttattttttgagacagtctcactctgtcacccaaggtggagtccagtggtgcaatctcagctcacagcaacctctgcctcctgggctcaagcaatccttgaacctcagcctcccaagtagctgggactatagatgcaccctaacatgcccagataacttttgtatttttagtagacatggggttttgccatgttgcccaggctggttcaaacttctgatctcataatctgtcgcctcggctctcaagtgtgggatacggatgagcat

SEQ ID NO: 155838 - DNA, 249 bp, Homo sapiens
aagtgagaaggggagggagtgcctaagtctgtgctctaagttcaaggttatgatgttcacagtgaaaccagccaagttgatactggtttctgaaggtttttaccccaaaacatcaactttcttattatgctatccctactccctaaaatctatcctttcttgcttcccctccctctcttcccccatactccccgccgactcctttttcccgctccctttactcacccttctctagccattctttccatc

SEQ ID NO: 155839 - DNA, 439 bp, Homo sapiens
cctcggacctcgatgggcaggtgtagtgatacatactaggcaggagatgggaagaattggcgtcgaaagattctcccatctcatctacagcctttttcgtcactattgaaaatgattttaaacttcgaaaaataaatctaatttatttagttagtataaataatctaatggcctggaccctctctgtcactgcctgccccataccaggattaccacttttctgaatttcatcaccgttgataaatgtttttatctgttcttgaacttcttttacatattattattaatattacatagtacatatcattattgatcgtacatagcacatatcatgtcaaataattccagtcaacatgcgtatcaccaccattagatcacgagcttaattaccatgccgcgtgaaaccagcaacccgcttggcagggagagagggtccagg

SEQ ID NO: 155840 - DNA, 289 bp, Homo sapiens
gggagttcaaggatgcagtgggccatgattgcactattgcactccagcctgggtgacagagcaagaccttgtcttgatttttttttcaaaaagaatcacaatataccttggttcacaagtcatacaagctttttagaatgggatgctttaaatttcaagtttattttgatcattaaaaagtaataggcaaaattactgttgggtaaatgcaacagaattcccgcaaggatgttgtctctgctctgtagtcacagtggaatgttaagcacatgggctttgaagttaaatg

SEQ ID NO: 155841 - DNA, 246 bp, Homo sapiens
ctactgggctggtgacaccttgtggggacttccgtattggcctgaggccttggtgccactcagctggtaggtcaggctagctgtggactggccaggaccacaggaagccctccacccatgctggggacacctgtgcttgagctgagaatgtccagggggaagactggcaatcaaaaacataccaggaacacgcacagggcatcagatggaagagaggaaagcaggcaggcaaaggaggatgtcaga

SEQ ID NO: 155842 - DNA, 782 bp, Homo sapiens
ttcatcagcaattttatgggattgattttccacacttctttctctgtgtgatttcttcagtactttccagtttcctggggatctccttttttgtattcccccaagaaagctgggttttattgaccctgctctgttgttcactcccacaactgcgtccgcattcagggccaagtgcttggaggacagagagaaaaggccaatggggatttgccccaccttttggtactattgctcctctgattagagaagaacattcccctccctaacagttttaggtgtctggggccccctttgccaccatggtctaccaggacacctgtttacagttcctgaaacttggaacactgcactgatgcccacttctcctctctccaccccttcactctttccaccccactaaggccaggcaaggttattctggagtttaaacaaaatggtaagctctccactggtttggtggtgcttcgagagctgatcctcctccccagtccttttctgtttttcagagttcctaagttgcattctgttcaagttttataactatattcagtgggggagagccagaggggtcttgcttatgtcattttccctagaactggaaccccactacccagaaatcaacactgccaatattttggagtctttttgtccagtgtatattctggacacacacactcactgttgaaatcacaccctatgtacagtttagtcatttacttctttcaatatcattgtgagaagtttccaaaatattattaaaatatgaataaaatattttaaat

SEQ ID NO: 155843 - DNA, 255 bp, Homo sapiens
tgctgggattacaggcgtgagtcaccaggccgggccgggctctcacctttctatggggagtagacccagagcacacttcagcttcagcctagcctttcccagcagtttggccaaagaatctaggcagatgctccggaagctcacggtcaggagtctttgtctgtagacccaccccatcatcctgtgctttcctattttcctttctggtttctattaaactcagtaacaattaggggtggcattctttaaattcag

SEQ ID NO: 155844 - DNA, 563 bp, Homo sapiens
caggagtttgagaccagcctggttaacatggcaaaaccccttctctacttaaaaaatacaaaaattagctgggcatggtggcacacatctgtaatcccagcttctcaggaggctgaggcacgaaaatcacttgaacccgagaggtggaggctacaataagccaagatcacgccactgtactcccgcctgggcgacagacagagcgagaccctgtcttaaaaaaagaaagaaaaaacaaatggaatttgtgggcatttttaggctaccagagatcacaatcttttttcacattttaaaaggctcattcttgctgctgggtaaagagtgactgggaaggggccagagaggagcagttagattgtcatcctttaggcttccccagcatcctgtgggtgtctttatcaatgcgtagcacacagttttgcagttatttgttttgcatgtctgttttctccactggactgaacttctgaagataaagactctctctcatctccatacccccaaaacctggcatctcattactagatgcttaataaatttgtttttttttttttttttca

SEQ ID NO: 155845 - DNA, 450 bp, Homo sapiens
tacattattattaactaaagtccatagtttacatctggtttgctttttgccttgtacagctcagtgggttttgacaaatgtatcatgtcttggatccaccattacagtgtcacagaatagtttaattgcccccaaaatcccctgtgtcccacctattcacctcttcctccatccacctgaatccctggaaaccactaatctgtttatttactgtttctgtagtatttccttttcaagaatgttgtatatttgatattattagtctttcttttacctaacaatgtacagttaaagttcctctgtgtctttcaatagtttgacagtttatttctttttaattgctgataaataatcaatttatggatttactacaatttatccatttacctatgaaagggcatcttggttgtttccacattttggcaattataaataaagctactatcaaca

SEQ ID NO: 155846 - DNA, 492 bp, Homo sapiens
ccctcctccactcccactcctcaaagaaccagtgggatatatattagttctgttctagattactacttatggactatttcattgctttataaaagtcgttaggctctctttctagcgtgttgaaagggttaataggggttgcttcaatggctagaaaaaggtatgcaattcaaataactgctttccaaaagaacttctaacatgtacccggtgtatatggtggtggtaataccacaggctttctgggtcaggcccactttgccacttctccatttaagcccgttacttaacctctctgtgctgtttcctcctgggtaagtgagggtgatggcagtacctcccccaaaaggttattaggaaaattaagcaggttaatactgtatatgtaaaacacattaaacaatgtctggtgcagagttaagtgcttaataagcattagtgatgaccatgatgcagcaaaattcatttcttttttccaaaatgaaaagaaga

SEQ ID NO: 155847 - DNA, 318 bp, Homo sapiens
agtgataatgaggtttattttctctttcaacaaattattgagagcctttgtgcttgaggcataaccccaatcctggcatgtggcatgatttgtcaggacagagttccctcaattgccccaggcctgtagctgtcagttgactcctccaagcccgtggactgatgtggtcagtgctctgatggagattcccaggtggaagaagagacggcagtcgggaggctctcagaggaagaaattctgaaacttgtgggtagctgagggaagccttccaggcagaagaacagtatgtgtgaaggccccagcgggggaggaagtggc

SEQ ID NO: 155848 - DNA, 276 bp, Homo sapiens
aaagcagatcagtggttgccagggccagcagtggaagaaagaaatttactataaagggataagagggaacttttgggggtgatgaaaatgttctatattatgatggtggttacattactatatatgtcaaaactcacctacttgtacactgaaaattgtgtggatttaatgaatgtaagttcaataaaactgcttgagatcacacagctgattagttatatgcattaggtaatttaaggaatgtgaagctaaataaaactattttaaatgaaacga

SEQ ID NO: 155849 - DNA, 441 bp, Homo sapiens
tccaacatgcatccagtatcagtatcactgtggtagcctgggggaatcactgaactgccaccatattaccggtggcttcacataacccagctactttagctccacataacccagctattttagctccttttcttgaggtttagcatgagccaaggatacacaaggccatctaggactctttatgttttgttatagaaaagtttaaacatgtaggaaaatagatggctgggtgcagtggctcatgcctgtaatcccaacactttgggaggccaagataggtggattgcttgagctcatgagttcgagaccagcctaggcaacatggcaaaaccccatctctacaaaaagttaaaaaattagccgggcatggtggtgcacacctgtaagtcccagctactcaggaggctgaggtgagaggatggcttgagcctgggaggcaga

SEQ ID NO: 155850 - DNA, 224 bp, Homo sapiens
agctttaaaaatttctctctttgtactctttccctttatttctcagactggctgacacttagggaaaatagaaaaggactcacgttgaattatcaggggcgggttcccccgacatcattgaagatatgtagaagaactacgttgtaatttcagaactagaaattacaataactaagtaaaaaactcaatgggtgaactcaatagcagaatggagatacaacaga

SEQ ID NO: 155851 - DNA, 382 bp, Homo sapiens
aatataaaagactgttttggttgccacacacaaaaagtatggaatgcttgagacttttggaaatctagaataaactctccagtttccaggctcaggaaatcttgtttgccactattatgcatataaaagccacattaaaaaacattctgattaaacattttggcttatacttactatcacatcactacatgaactgggagtgtgaatgcagctcaagatgagcagtttccatcagggacaagtttacgataagaattggactgttattatttctttaaaaaaaaaatcacatttacagccaggcaccggtggctcatgcctgtaatcccagcactgtgggaggctgaggcgggtggatcacctgaggtccggagtttgagac

SEQ ID NO: 155852 - DNA, 265 bp, Homo sapiens
gccgtgtgtagcatgcaggctgctggtgatgggaattgagcagattaaagtcaatgtttggttttgtgataatatcttgatgatctattcctggtgatattttctgggcttttgttttctagaaattaattggtttaaaaatggccattatccataaaagaatttattttgtatatgaacatgggccaaaccattttctccttcttatctatggaaaatagtcagctttaaggagccggtattttaaaggcattttgtatgaata

SEQ ID NO: 155853 - DNA, 412 bp, Homo sapiens
gaaagctcataatcttagtcagcctcttctatgctccccaggccactgctttgctgagtcattctactatgcagcccctcagacacaaagcccggcggccacctgcccacagaggcacagagggccagccaactgcaagcacggaacttcaggatcttgcttttcgggttattttcactactgtaatttttttgtccttaggtaaaaaggataataattgtggaaaattatgtccttaggttaaaaagatcctggatcatgccagatattaaaatatggataaaattggcatgatcttggaatctgaacagaaaagaagctgcttttagctgttttcaactgtttttagcttttctgtctaaacagctgtttattctgtttcacaaactctcttagcagaatatttaggcaa

SEQ ID NO: 155854 - DNA, 420 bp, Homo sapiens
cttggaaagcaaaggcagggatgtcctcctacgcggactgctggtctcccaggaaaagaatctgtggctcttacttgtcctgagtgatgctaagaccctgctaagtcaaagaagctgctataggcacagagccagtacccatggtcatagcagacagtgggcaatagaatacaaaaggccgaggtgtccagaggtaaaggtggactgtgtgttccctagtctcagactcttgtgtcttcagcatgctcctgagggttctgaggcacaccctccacgtggctttttttgtttgtttgtttgtttttgttgttgttgttgtttttgagacgtggtctcactgtgattcaggctggagtgcagtggtgtgatttcggctcaatgcagcgtcaaccttccaggttcaagcagttctctcacctc

SEQ ID NO: 155855 - DNA, 622 bp, Homo sapiens
agagccaaattcctataagttaatctttaaagtccaatattaaaatttggggacttatgggcaacgttggtttaattcatcttcaattgactcaaggaatacaacccattttctaactgctaaggagcttgggggaacttatctccaaatgaccataaaatttccaggaaattctaacttgacctaggagttaacaataataatctctgacaaaaggataatgcaggtttaataacacagaagttgcagtttgcttgtggacttctgctgggttatgtcctagaattactgcagaggactacactcccttaatttatgccatttggtcaacactaggggtaatatggtttggctgtgtccccacccaaatctcatctttaattgtagctcccataattcccacatattgtgggagggacccagtgggagataattgaattgtgggggccgtttcctccatactgtcctcgtggtaatgaaagtcttacgagatctgatggttttataaggggaaacccctttctcttggttctcattctctctcttgcctgtcagcacataagaaatgcctttccccttccaccatgattgtgaggtctccccagacacttgcagtccagag

SEQ ID NO: 155856 - DNA, 253 bp, Homo sapiens
atcccccacaaaagcacaggcaggcactcacacacacatgcgtgcacacacatacacactcatacccccacataggtacaggcaggcgctcactcacacatgcgcacacacacactcatacccccacataggcacaggcaggcgctcacacacacatgcgtgcacacacacacacactcatacccccacataggcacaggcaggcgctcacacacacatgcgtgcacacacacacacacactcatacccccac

SEQ ID NO: 155857 - DNA, 489 bp, Homo sapiens
acgatcagaattgcttccatgctgcagggctgatttactgtgaaggggtagggttgttgcaggactggtttcccaggctctctggaacgcctggtctctggccaggaggcagcctggagcctcagtgcaaggaggatccctcccctaccccaggtagggccactcccacacatgtgcacacccacactcataccccacataggcacaggcaggcttactcccacctatgctcacacacacactcatacccccacaaaggcacaggcaggcgctcacacaccccatgcgcgcacacacactcatacccccacataggcacaggcaggctctactcccacccgtgcgcacacacactcatacccctcacataggcacaggcaggtgctcacacacacgtgcacacacacacacactcatacccccacataggcacaggcaggcgctcacacacacatgcgtgcacacacacacacacactcatacccccac

SEQ ID NO: 155858 - DNA, 358 bp, Homo sapiens
ctaatcaggatcacagggaaggagtgaaggaaatgtgtgcaacttctgggtcatgctctttgaagcaggatagaattcaggagctccactaatttggggggaagggggcagaattacctctttattttcactaatctctaacagaaattcagcattttcttcaattaggaatataggcaaactatagttttcatgcttacaaatttgtcaccaacagaaaccacaggtatattatcacattgcagttttgttggtttattttgttgaggcagggtctccccatgttgctcaggctggaatgcagtggcacaatcacagctcactgcagcctcaaaatcctgggcttaagggaccctct

SEQ ID NO: 155859 - DNA, 109 bp, Homo sapiens
gatcatatgcataaagtctttttagaccttctaagatactctttcaatcctccctcttttactcaaaagtaataacctttttactttcttgccctgctatagtgcactg

SEQ ID NO: 155860 - DNA, 148 bp, Homo sapiens
agtatttctagaaattcttttcatgaaaggaaatttcagttcacaaagatcctgggaatatttattttgactgcaatcagcatgaatctgcgaagtttaaggaaacccagagcatccttcctaagccatggtaaagaggcaagagcca

SEQ ID NO: 155861 - DNA, 561 bp, Homo sapiens
gctggctccaaagtccatgctgaatgctacctgtgactcaagccaggagaaaaaaaggagttgctcaaataaagcgtccctggcagtaacgaatcattaactttcagcccactccaaggaatgggtggcctgagggtcacgtgctaaagaggaaaccctgagtgagtcaatcatgaacacatgactgttcttagttccttataggtttgcttcctcaaatagccttcctggagtgctgagccaagagatggattgggaccagtttcagttctgggaaaggggctgaaccccatctagccaatgcctgcacccacgcttcagctctgtgcatgctggtggccgaatctaacacaggccacagggacttcctcaaactgggaaatgcctgctcatgttgtcaagagtcctcagcaacagcttgtttgccgactaaacaaggctgccacctcacacaggcagcctcagaaagatcagggagttaatagttacatgaagacagctcagagaacagctcaagtgacagtccagacaaatgcagatcgtataatgggtacctggtta

SEQ ID NO: 155862 - DNA, 609 bp, Homo sapiens
gctctagaggatctcggtgttcctttgtctttggctgtttttgtgcacaatggtacagctacaaaaattaacagtgtagctggactcagatggctcacacctgcaatcccaacacttgggaaggccaaggcaagaggatcatctgagcccaggagttcgagaccacactgggcaacttaaatgagacccccatgtctactaaaaataatgaaaaaaaaaacagcggggctcggtggctcacacctgtaatctcagcactttgggaggcagaggcaggaggttggcttgaggccaggggttggagaccatcctagccaacagagtgaaacctcgcctctactaaaaatacaaaaattaccgggtgtggtggcgcatgcctgtaatcccatgcctgtaatgccagctactcaggaggctaaggcagaagaatcacttgaacccgggaggcgtaggttgcagtgagccgagattgtgccactgcactctagcctgggcgacagagcaaggctctgtctccaaaaaagaaaaagactcaaccctaagtcagctccaggacgtatgtgcctactctacatgtgtgagtccgaggggaaaaaacatcatatgacc

SEQ ID NO: 155863 - DNA, 115 bp, Homo sapiens
ttcctctggatacttctcagagtcaccctgcccccacacctacttccctctgctaaggaccttgtccagcctccattcctgacaccctctctgaaaggatatcacttctgttaga

SEQ ID NO: 155864 - DNA, 368 bp, Homo sapiens
tcccaacttattgctctttctataactctctttacatatattctgtcttaaaccacttttggacctatctagtctgtgtcctttcctagatggcttttgtgtttcctcctcacttagcaatgacaccctccatcaccatttccaaacacacacacacacacacacacacacacacacacacaaatgaggtatataaagggtctcctaaaatgtcatctgatatttgttatttcatattctcagatttttaatccatttaggtaggtctattttagatagccttgtctgaaacagagctgggacctgatgagtgaaaatgagctcaccagaagaaaaatcaaacaggcatttcagagattgaggccaag

SEQ ID NO: 155865 - DNA, 366 bp, Homo sapiens
ccaggctggagtgcagtggcatgatcttagctcactgcaacctctgccttctgggttcaagcgattctccgcctcagcctcctgagtagctgggactacaggtgcccaccaccacgcctggctaattttttttttggtattttttagtagagacagggtttcaccatgttggccaagcgggtctcaaactcctgacctcatgatccacctgcgtgggcctcccaaagtgctgggattacaggtgtgagccaccatgcctgaccgcctttttttcccttcaatatctttggcccctttcccacatcagctaaggcctcagtcatccagaactatttttaatttcactccatgcctcatcggggtatc

SEQ ID NO: 155866 - DNA, 443 bp, Homo sapiens
gaggctggggacacaccagctcctgattcttggccaccatgaaaccacaggccaggctcaggtggggccttgaccccaggcctcagtttcctcatgggacacttgtgaggatttaacagattaatacaggaaaaactctgggagcagggtcaggccagagggagtggacaggaactatcaggtatggttcttagcttttttcttttgagatggagtgttgctctgtctcccaggctggagtgcagtggcgcgatcctgatccactgcaacctctacctcccgggctcaagcaattctccctctcacctcagccttctgagtagctgggactagagacatccgccaccatgcccatgcctggcaaattttcacacctttagcagagacggggtttcaccatgttggccaggctggtctcaaactccaaactcaagtgatctgtc

SEQ ID NO: 155867 - DNA, 216 bp, Homo sapiens
ggctctgagcaatactaacaagaacctgcgtgcctgggcttggctgtcggggatggtgctgacatggggctggttcctggggttggggtgttccaggggttctctagaggctggttctggcttggctgccaggaagccgtgcaccagagcaaaccgtccacgggcctcctgcttgcttctggtgacactgagaccccacatgtctgtattcctcac

SEQ ID NO: 155868 - DNA, 289 bp, Homo sapiens
ccctcagatattggagcccctgattctgggacttaccccagtgccgcctgtcccccaaccctacaccattctcgagcctttaaagccctggactgggagttccaccacgggctctcctggctctcagcccttcagactcagactgaattacaccacaggctttctggttctccagcttgcagatggtgtgtctgggatttcctggcctccatcatcacgctattagagtaggtagacagacaggtgtgagtggggcaagacaggccccaaggaatgtccaggtggcctc

SEQ ID NO: 155869 - DNA, 547 bp, Homo sapiens
  misc_feature (505)..(505): n is a, c, g, or t
gctttcttcaacaagatgtgattgttgcatcccaactccctgccagggtctttcctgttcactcctcctttttggccaacacacaaagaggagaaagcaggccaaggtattgtacttgtttcaactgtgtccctggcttagggagctctcattcaaccaaggaagggctctgcatttccaacaacactcaccacccactcgcttgtttcttgtgacctcttagcaaggccttaatatcatacttttaaattgtttttattgaatcgggttgtcttagattctgtaccttttccttcccctacaagcttctgtcatcatcattaaactgggtccttttgaaaaaaaaatcatattttaaaataactgaacaaatttggataatgcaggagatatcatgatttaccttcttgagacagaaattgtaaaatatatttttgtaatcctgagtaatgctttttatgtttgactgacatgtagggcttatactctagaacatacgacgacnaagaagattttgatgaagttcacattagagtcagcgggctca

SEQ ID NO: 155870 - DNA, 365 bp, Homo sapiens
ttactgcctctctttctgtactcctactgcttgggatttctttcagattcataaaaataaaaagaaagtatagttataccacatattccacagacagttattacaagatcacagtgtgcaaacaagtctactgggtaatggggaaattatgaaatagcttaaatataactatatttgactttggaatcttgccaggatgagtaagaccaaatgacttacacattctatatttatcacacgaaaacaagcaccagtaaacacagtgtaaaattttgacccactgatggagattgtggattgatgaagtgactagagatggcacagttcataaaggaaaacatttctaaggcagtgaaatctgaaca

SEQ ID NO: 155871 - DNA, 293 bp, Homo sapiens
atggtggcatgtacttgtattccctgctacttgtgtgactgaggtgggaaaatcacttgagcttgggaggcagaggttgcagtgagctgagatcgtgccactgcactccagcctgggtgaaagagtgagaccctgcctcaaaaaaaaagaaaaagaagaaaagaaagaaagaaaatcattctctctctccctcttcctcttcaccctctcagttctgtctctctggagagctctgactaatacaagggttttaaagaggtataggctgtgtatccaaggagtagaggtggtgg

SEQ ID NO: 155872 - DNA, 394 bp, Homo sapiens
cttctgactgagtaaggtctcaggtgtcagataagcccatgctggtgttaaaatagactatttaaggtgattgccagctaatctacggacgaagttgggccagcctacgatgtggtttggaccctccagatttggaataaagaaggtgctgagcatatgtggcacatactgttccaacaacttgtaaacccttttttgtcttgaggttcagttttctgagtgggtagtacaataaagtggtttcattactggtgagcaattaatgggttgacatcaactaagagggagagtctagggacatatcacaagattttttttcttgtttataccctcagttttttttttttttttgagacggcgtctcactctgttgccaggctggagtgcagtggtg

SEQ ID NO: 155873 - DNA, 324 bp, Homo sapiens
  misc_feature (76)..(76): n is a, c, g, or t
  misc_feature (93)..(93): n is a, c, g, or t
  misc_feature (292)..(292): n is a, c, g, or t
  misc_feature (310)..(310): n is a, c, g, or t
  misc_feature (312)..(312): n is a, c, g, or t
attggctgagcggggctggaaacaggcgtcgaccaatcagcagccagccccccgcccgccccgccgcgagcagaangccggttccggccgganctcggagacaaacaagagagatgggggacgggaggggcctgggcgctgcgggccgggcctcggctttgcagccttcaacccgagtcacagcgcggccgggaatccccggcgaacatcgccccgcggcctctccagcggcctgaccctgcgaggctggggctccggctccgcgtcccggcccccagcggactccccccangaagccgccgggccaccnangcgcccccagcc

SEQ ID NO: 155874 - DNA, 283 bp, Homo sapiens
tgtctttttggtaatagccatttatttggtaatatgtgtcttctctcttgtttcttgatcagtttagcctataggcttaccagttttattggtcattttattgagtcagcttttattgatttctctattatttaagtatctgttccattggtttctgttctttattatttctttgcttctactttggggtttaatttcttaaaatggggacttaggtcactaattttagattttcccccctatataagcatttaaaactataaatttcctctaaaacactact

SEQ ID NO: 155875 - DNA, 408 bp, Homo sapiens
cactttctccctacactccggttcaggcttccgggatgatcacatttcactgaatgcaagggacctgaacagccagcaactgaacccccagcctcaataactttctcccctctgatttcaaaggagctagggatgtttcctggttaaagcaaaggggccttttgttggcagcttaggcttgggaaggatctggcaacagggtggcagttttgtccccctctatgccagagagggagttggtgtgggtttccctcgttttttgcctggagcgtgcatgcatcatttcccttctgtggtggcaaagaggacacctgggcttcatgatgtgaacagaaagatagcaccagacataaaattatgaagtctttaagatgtgcttacaataaaaagatgttaattttttccagg

SEQ ID NO: 155876 - DNA, 215 bp, Homo sapiens
gtacaaatatgctctatgatgttcacttgatgacgcatttcttagaatgaatccctgtcattaagtaacacatgcatatataattcctaggactgcattttccaaatttttgtttcaacagtctacaccactgctttcctattttgataccttaggtcctttttctaatgcctagaaaagaacagcagtaatattaataattttcatgatttgag

SEQ ID NO: 155877 - DNA, 128 bp, Homo sapiens
atagtaagagtttgcccttttctgacagttgacagtgtgggaaaaagaaaagcattataatttataatttttgtaggaattcctttgagaaaactatggtgaagttgttgaacaaatcaggtaatgat

SEQ ID NO: 155878 - DNA, 518 bp, Homo sapiens
cctgtttggggtatctgctggaggctatgtttctcagcctgtcaaaatggccaacttgcaggctataaccctttataagaaataaagtttcttttccaaatttatagatatcataatttttttcagttgacacatataacctatccacatcctcccatatattttaaatcatcattaggttatttataatacctaaaacaatgtgaatactatgtaaatagttgttatagtgtattgtttcttatttgtattattttttttgctgtactgttaccttaagctcctagccttaaaaagatccccctgcctcagcctcccaaataactaggattacaggcatgcactaccatacctgtcctgtatttttaattattgctgcctggggccaatttatatttctgctggtgaagaaatgctaatttgcaaaaatcaggatcacaattatattccaatacataaaactgggtttatggatacattcattatcttgattatggtaatggtttactgggcatata

SEQ ID NO: 155879 - DNA, 187 bp, Homo sapiens
cactaattgttctaaagaattgcatactccacactattggcactctgtagatgtcaaataataactccttggggagtaggagaggtcttttgttaaaatggagtgcaatgttcattgccatttgagatatatgttccttgataaatggcccagatatttgcagttgtcttttatcaagcattcatag

SEQ ID NO: 155880 - DNA, 249 bp, Homo sapiens
ccagggccaccagctagtaggcagcaagcgtccagtacacagacgtaggtcttttaatttccagaccagtgctgtttttcttcttgtgaaattgtcaattttagattggttttattttggagagtataagccttcttaagaaatgctttttagctgttgtgatcgataatagcataagtcctaaggtccatctgtgtaaacataaaaaccaaatagtctgttagtaaataaatcctacccccctttccc

SEQ ID NO: 155881 - DNA, 391 bp, Homo sapiens
gcctagcaggacctgccaagcactcttttcttcattccaatcagattataagcatcctgagggtaaaactcttgattatacttattcacattcttcacaatgcctagtactgcagtgaacatgcagcagacacctaacaaatacttgtttgttcttaaaagagataaaggagtatgacacaaggagcattttaaaaacaaacaaaaaagagataataaaggtgaaaataatgtttgccacattataggtaatcaatacatgcttattgtacctgaatggataatttctctactcaaaattaacaaatcataaaagaaataatcaaccactcactggcagagaaggtaagagcaacagaagaaaatgctaatttgaagaaaagagtgcttgg

SEQ ID NO: 155882 - DNA, 279 bp, Homo sapiens
  misc_feature (207)..(207): n is a, c, g, or t
gactgtatctcccattccagccccatcctataaacccccatgctgaagaggccctgccctaattcaaaatgagtatagttcttaaacactccctaaatgaaaagcacaggatgttagagcaaatacttgttaattcgtattggaaaacctaaagaataaaaagggcagccggatgcagtgggctcgcacctgtaattctaacacgtntgagagaggccgggacaggaggatcacttcaggccaggagtacaagaacaccctgagcaacataacagagcg

SEQ ID NO: 155883 - DNA, 295 bp, Homo sapiens
aaggtcactactgtcatggagtttagaactagtgggaaaacagaaacaaatgtaaaatgggattctgctgaaggttacaaagaagaggtacgaagagctgaatcaggaagatcagagaaggtgcccttaagaaatttaggagtttagaactagtgggaaaacagaaacaaatgtaaaatgggatcctgctgaaggttacaaagaagaagcatgaagagctgaatcgggaagataagagaaggtgctcctaaagaaattgacactgatatggactatgagaagtagaagatgacga

SEQ ID NO: 155884 - DNA, 687 bp, Homo sapiens
agatgatgcagagtatacccctcctaagatgcttcccgtggtccactacatatttaattgtagtattcccaaccccatcactctgtcattttaccccattttaattttactgatagcacataaaatgttacacaacatgttgatttttatttctttatccaattatttgttatctgttcctttcactagactgtaagttccatgagggcagaaacttggcctttgttgttcatgttacctttacattttctagtaaaataaatggagcatagtaggtgctcagtaaataaacaatgattaagtaaaaggtctcaacatttctgataagcataatagaaataactatcttccaacactgtcttcaaggggccagtactctaaactgccatgcaaatgtcaggtgtagtttattttgtccgtgttgagtcaaacgaactgagaccaaaaagtggtccttggagacaacaaatagacagagaagttctctttttttctgtgctggcaattttccactgagctaaaaagagataagttcatagtgactgccactaactttttagaatcctggggtgcaacacctctgcatttcttgccccattgcctctgcccttgtcctgccttgccctcacccccaagaaaagcatgcacccactcttccttgacagttagggttcattgttttcctca

SEQ ID NO: 155885 - DNA, 269 bp, Homo sapiens
catggaactttcgctcaatagcccccacccctaagctctatgcagaaggcgttcattagcaaatattaaatgcctgtttccatactgctggtggatgctgagggtgtgaggccctctgggggcatgctgaggctcacttaacagcctcacccaaattgtccaacactcattttctcctcaaatgatatcagggaaggtcatgaagaacagccatgctggataacttctgggaaattgggactggggagcctgggggagctgaccaccag

SEQ ID NO: 155886 - DNA, 381 bp, Homo sapiens
gtttgcaaaaggaagagcttgaattagatgttcttcacaatgctttccaggctccaattccttctactctaagattctaatattccttggtgaaggctcattccctcattggcacattacttgcctgtgctacttgacctgcagcttagaaattagagtaggttctaataaaggctagtgccaggtttatgcaagatgtggcctccagggagctggtttcataaacctgaggctgttgacctactccctttcctgaggttatgaagcttctttatgggcttacttgtagggcccgttcctctcttgtagctttcagagcaacattccctggtggcttccaggtgtagaactctacagtgtatgtcagtattgtccagaaat

SEQ ID NO: 155887 - DNA, 403 bp, Homo sapiens
gacccctctggggctatgtgggggacagactggagggagaaactagaagccagggagaagcctaaagtcagggtccaggtaggagagcaggagcccagagcctgcctgagccctcaggacagagaagaggggtggagtggagactcagcaggcaggagggatctggctaagagactgatgcgctgttggggaagaggggacaagatggagctttgacctcatgactagatagatggtggggctgcctcagatgaggaaaccaggtgagagaatttggggacatcagaggaaactgcagaggccactgggtgtgcacctgcaaccaggcactgcagacccagatctgactgtcaggatcccaggctcagtgcctcctcctctggggcctccgctcctcgggccc

SEQ ID NO: 155888 - DNA, 269 bp, Homo sapiens
tcctgctccatttactcttgtaaattagttcactggtttgcaggtgtgttttctcatcttcaatcagagtcaatgctgaccttcctcacaaggctgttgtgatgctccggtaaatgtgtacatatgaaaacaatttcaaaatcgtaagaagccatgcaaatgtcaggatgctgatgatgatggcggaagaagagcagcaaaaggaaaatggggaaaaagaagaggaggaagggaaagggtcaaatagcagaccactggtctgtgtgcaa

SEQ ID NO: 155889 - DNA, 604 bp, Homo sapiens
gggggagggtttgcgtgtgtgtctggaatggaagatgtgatggaatatttttgcatgtggatgggaagcgtccaacagagggagcaagaatgacaggagatggagggcgggactgaggaagccaggtcctcaagcggccatgagaagaaatggaggggctgggctttgaaacagaaagggatgattcctgctaaaagtgaaaaggagacaacggtgaaggagacacaggcgggtttaaagactgagaggcaggaaggttgagggagttcacgtcttagaacctactttttatggaggtgtcaggcaaggtcgatggctgagcaggagggagatgtggggtttgaggacagagattattcaacagaattctttctgaacgtgagaacatgggcttctaggggaagcaaagcaggaacatgcagccgtggtgtgtggttataaacttgtcaactcagtgatttttctcctgcaagctttttttttttttagacagagtctcactctgttatccaggctggggtgcagtggcgcaatctcggctcactgcaacctccaccgcctgggttcaagcgattctcctgccttggactcccaagtagctggg

SEQ ID NO: 155890 - DNA, 121 bp, Homo sapiens
caggctgtttgtgacctctaatctatgccagttattttatttatttgtttacttttattttctttcagctgacaaaatgatgtatattatgaataataaatttcagtctacattatttaca

SEQ ID NO: 155891 - DNA, 930 bp, Homo sapiens
gccaactggttagcatcttaaggactgaggcagtggtgcttgctattgaaacatattttctgtatgttttactatcaatcccataagggttattgcacgccatggcgcctgtcctttcctgaccctggacctcaaaggccgacccttacctgccacagcaaccagacgcacgaggagctccaggggccacgactccatggcacctccctaagtgggctcagtactgccgctgggctctaaaatgttggcccaggccttctcctctgggatttacttcctccctggctccacctccactcacactggtgcaaatttccagactgtggggcttggcttgctgattgacatctgcctgccctcctctgtgctgccctggagcctggcgcttccaggttcctagcagagcttcacctgccatatgaagggccccgatcagcccattccctggtgctagccttggctgaggccccacataaggagtcctagccacagctgtcatgccggcccctgcttcgtgacaatcctgctgagcactgcacatctctcatccaggtaattgccccgacgacaccatggaggggtaactggcgtgctcgcttcattcataaggaaaccgaggcacagagaggttgaatgatctcccaagggctaggggcgagccagggtccaagcccgggcacattggcagcagagccccagatacaaccttctttatgcctagccccttccactgcccactccagccccaaaccacctttcccatgaggactgtgacttggtttcccctcctctaggcctctcctcatttccaaactgccaagagcaaatcccatcctcatgggctcataggcaaggcataactgctattttaggtgaaatagctctctataaataaaaatcaagaagccgcaaagacgagctttacataaa

SEQ ID NO: 155892 - DNA, 390 bp, Homo sapiens
tgcccagctaattttttgttattttttttttagtagagacggggtttcaccgtgttagccaggatgatctcgatatcctgacctcgtgatccgcctgcctcagcctcccaaagtgctgggattacaggtgtgagccactgcgcctggcctgtaaaaatagttttaaaatgaaattatatacattaaatggttacattttatgatatgtaatttgtaccttatgttttcacatatcatagtgcaatgagggttgggggaatctctgctaaagtcaatcattcagagacccatgtttacagagtctgttgctttcagtatatgattctgatagatttcttatgttgaaatccagcttgcaaatggtggatgggagagacagtggaagttata

SEQ ID NO: 155893 - DNA, 135 bp, Homo sapiens
cacctacattgacaagaaatgccccttcactggtgatgtctccattcgagggcggatcctctctggcgtggtgaccaagatgaagacgcagaggaccactgtcatccgccgagactacctgcactacatccgcaa

SEQ ID NO: 155894 - DNA, 433 bp, Homo sapiens
caacatggtgaaaccctgtgtctaccaaaaatacaaaaattagccaggcgtggtgtcgcatgcttgtagtcctagctacttgggaggctgaggcacgagaatcacttgaacttaggaagcagaagttgcagagagccaacttctggagttccagtgcactccagactgggaaacagagcaagactctgtcaagaaagaaaaagaaagaaagaaaaagaaagaaaggaagaaaaagaaagaaaggaagaaaggaagaaaggaaggaaggaaggagagggagaagaagaagaagaaggagaaggagaagaagaagaagaagaagaaggagaaggagaagaaaaagaagaagaagaagaagaagagaaggaaggaaggaaggaaggaaggaaggaaggaaggaaggaaagtaggaaggaacttcccgagactgcag

SEQ ID NO: 155895 - DNA, 387 bp, Homo sapiens
cgaaggacaagcaagctatagaactttatgtctgcaaggaaaacatgaacatagacaacaattgctgtcagagctgcattctttcagaaacttggtattaacttctctcactggaggtcacatagcaagctggcgtctgagccaaacttccacgtgtttggagccattttgatattcaccttgccttcccccccaatccccatttgttcagtttggaaacacacttatgcacacaagccccatggatactaagtggtgagcagcactttgtctctcccgttggctggcctgcaatgcctattccagcccacgtggctttgtcattaggcccaaaggccctgcatgatgtgcctgtaggcggctgctcccttgcttctagctggctcc

SEQ ID NO: 155896 - DNA, 521 bp, Homo sapiens
tgtaatatgtatagcatcaagtgcgtgatgcacagatccacagcataggtaccaacagaaagcacctttcaaatacagactcccagcccctccccagacctactgggtcagaatctgcattttaacgagacctaggatttatttacaccttacagtttgaggaccccaagtgtatagaacccacaaattctcccattctgatagacagcatagtttactttcttactttaataagctgcatcacatacctgcacactagaggaaattatacagcaataaagcataattaggttttgctcctaaatgaattaaatattagcttttacaaattgcctatcaaatcacaggagaatcaaagtgcttttttgagtccctagaaagaacagatacacaaaagtgtactacaaaagtgggatgaaggccgggtgcagtggctcacgcctgtaatcccagcactttgggaggccacggtgggcggatcacctgaggtcgggagtttgagatcagtctgagcaacatgg

SEQ ID NO: 155897 - DNA, 227 bp, Homo sapiens
aagtggtcttgcaagactagcagtgatttaatgtgggaaaatgttggccttggactcctggagaaaatgcaatgactgttttcccctatgtttcatgtgcggcatggccacagagcagtgtatcactggaatctgattcattggtatttggagcacctacagcatggagcgattggcgtgaggccatgacagaattgatcaaaactgaatttgctctgagaaacgac

SEQ ID NO: 155898 - DNA, 298 bp, Homo sapiens
ataaatcagagatcaaggtagaataacaaattaagatgaagtggccaatccttcaaagttgaagcagggcgagaacacgggagtgagagcaggaatgtatgttttgtatttatatgggaagtggctcccaatcttgctgctgtagggtggattaatggtgaaagtcactcacggaagcctgaagctctgagaataactcggcaaattctctgacttggaaagaaaaaactaagtggggagtgagaaagcattttctcaaaaactaagtgggagtgagaaagcattcacttcgacacag

SEQ ID NO: 155899 - DNA, 448 bp, Homo sapiens
actctacaggaccttacgtaatatgtaacatgggagacctagtcattgtcatctctgtgttttcagcagcgtttaatacagggccttaccgctagtaagcatgtaagattatctaatgatggattgagggtagggcaggttccgatggtcagatgtcccatagaaggtggtccctaacaagaatatacattgtaatgttccaggtttgtctattctgatactgtgcaaaacgtagatcttatagccaagatcaaggcatcgaaagtctgtggacctaagcctgtgctttcactgagtgaagtttgtgtttcggagtacatctgaggtgtttctttccgtgtagtttcacttgtgttggagaagcaggtggctgtggtctttgcagggtgtgagaggggaggagattagtgttgagctccagctaatgttacataactctactgtagtc

SEQ ID NO: 155900 - DNA, 416 bp, Homo sapiens
ttcaaggagaaaaagcagctgtgcaaagctctggaacaagcgggcttggccagaggaaactacaacagccaaggccctggggcagaaggaactggacatgatggaagacagaaaagagaggagcctgcagccacagaaaagagtttggttttattctaagtgcccttgggcctgcctacttaacactcattctgtctttaaggcacagttccatgctgcctcccccatgaagccttccttgaatgcttgtctcgcccttccttgccaaccactagggccctctggcagtcaccccactctggccctctctcccctgctgtcctagagaatttgtcaggaagccaccctcctcaggaccccctctcatcttctcaaggggatccctgatttatagcaacagggtcagcagccccttg

SEQ ID NO: 155901 - DNA, 345 bp, Homo sapiens
tcggtacccttcaagttctcgtttgaatatttgtactaccaccaagatcctgatgggcagacgctctcagtcttcgtcccatcagtaagttatttatagagaaaggcgttccttatctggcagctcaggtggttgatctttactttcttgtgccccgtggaggctgggacatgatgtagtagatctgatgtcagcgccacagaaatctcttgcagccttctcttcagagtctcagtgggaagaggtctgctggctttcctctttatagtgaacacacatttgggaagcttgtgctcagttcttaacatctgatatagccaagtaacttttcagttgctccacaca

SEQ ID NO: 155902 - DNA, 466 bp, Homo sapiens
gcacaggaatcattgaagaagtcttctcaacagaaataatgtaaacctaactttgatctgaaggaagaaattttataaaagaaaggaaactttcagtcttcagggattcacaaagtctgataaaaattggtgtattagtctattctcgtgctgctatgaagaaacacccaagactgggtaatttataaagaaaagaggtttaattgactcacagttctgcatggccagggagacctcaggaaacttacaattatggcagaaagggaagcaaacatgtcctttctcacatgatggcaggagagagaagtgccccttataaaaccatcagatctcatgagaactcactcactatcatgagaacagcatgggagaaactgtcgctatgattcagttatctccacctggtcctgtccttcacatgggtattattacaactcaaggtgagatttgggtagggacacagagc

SEQ ID NO: 155903 - DNA, 268 bp, Homo sapiens
gtggaaagattttcaaggaggaggaagtggtcaataccaccaaaagttaggtaagagctgaaaaatggccactagatgaacaattctggtgttaatggtgaacaaatccacagtatactgatcttattctactgggggatcgggggggcagataaattggcaaatatgagaggattatagaaagaagtttgttgggggcacaaaagttggagtggccagtaatgttagggagagatatcagaaaacatttaattaatgaaatacttat

SEQ ID NO: 155904 - DNA, 561 bp, Homo sapiens
tagtgcagcttgccagccacgcttaaggtttgtgccgctcctttccaaaagcattcaaggtggatttcaatgtttaaaagttgcagtgtttgactcttaaggaataaaacctgagagattcatccagaaattcaaaatgagtaattacaatgacattgaatttggccacgaagttcctgagcagacaagacagcgatgggccacgcaggttttattttctgtcccagcagagcatgtggccacttgagccgttctctgtgtcatgctgtttagatagccctgaggacagcgctgttcactctccagtctcagggcccttctcaagggaggaggtgctgggtgtgggtatcacagtggcctgaggactgggggttgcttggcgtgattggtggcccgttagactaagttattgtgaacggcctgtcactgctcagctactgccaatctaattactttttctcttttcttcttgtattctcgtttttgtttgttctccacctggattctgtagtataagtctgtgtttaggtcctactcccaggattccgactccccaccacc

SEQ ID NO: 155905 - DNA, 574 bp, Homo sapiens
catggagccacctccaaactggcacctctcaggccgtgcgacgccctaccaggctggcggctgtggcaggtgctatatgtgacttagccacaggactctcgggtcctgtcccctgacatggtctttgctgtgaggctggtgttctggtcacaacgcaccaccctgaggcaccccatgctggtggactagaccttccatagccacagagagtgatgctgcctgaggatctgcaggtgggacaggcagactcagacccagaggatatgcccatgcctgttggagccgtcagcgtgctgcccagcgcccacaggcgggcctccctgggaatggtgtcttgtgggccgatcacattggcatctcctgctggcaggctggacactcagtagcaacagcgactgcatcagcctttggtaagtcagagactgtgctgttgaggcccctctggccagccctgggtggccagcgaccaccagccatctctcaaagctgttcagtgccccctccatggcggatgctctcaggtggacattaatgtgagacagcaacctgcacgcttcccattcctccacccacc

SEQ ID NO: 155906 - DNA, 513 bp, Homo sapiens
gaaaatagaaatgattgtcatcccccaactccacagataaatctcaatctgtgggctaagatacagaaaggaaatatgtgaagattaaagtggcgacctggaaatgcaagctgagtgatcctccaggatacagtgcaaaataagaagtaataaagtgatggggaaaaggttaagagacaaagaaaatagagaacacaagtccactgaaaccctagcagaagttgtgaggagaaactcatagcagatacatcttactgaaatttttgatgagaataaagaagttttcactacatgttctcacttataagtgggagctgaacaatgagagcacatggacacagggaggggaacaacacacaatggggcctgccggcggttgcagggccagagagagccccaggaaaaatagttaatgcatgctgggcttaatacctagatgaggggttgacaggtgcagcaaaccaccatagcacacatttacctattaacaaacttgcacgtcctgcacatgta

SEQ ID NO: 155907 - DNA, 570 bp, Homo sapiens
taagatggtctctctctcagtctctctctttctctcgtgtttctggtgctatgttcagtactcgctctctgttcccattgaggttgcagcttctctgctgaatcactgctttgtattcagccagggaccgtggagtattcccagtgtatttattttctgttcctgagctgaatgctgggtgcttctttgtcctgatgccttctgcaaaggagtttaggaggtgggggatggaggggaaaaagaggaggagggataggaaagccaataaagctttctctatcccccagaggaatgtgtgcaaacatctttaacattgctttcctcagtgttctcctctctgccacccttgctcttaattggatctagactctagagaaaacaactttgttaatgggatggttaaagaaaaagagaggtggatgttggctgtgctcagttctggcatcgtgtcctctttgggaataaaagtctcagatgcctgatctgaggaaggaatccactttcttgatcatgaggaaataccattttccttctgttgcaagtttttattcccctcttaaaatgaaagat

SEQ ID NO: 155908 - DNA, 170 bp, Homo sapiens
acattcctggctggtgacttcaggaagccctgccagaagtagaagaaagaagggcgtgcagacaggggaggttattccaggtccccctggaaattcctgttctacccttcgaaaacctgtgcggaagctcccctccttgaggaagccttcctcaatgaactctcgaatga

SEQ ID NO: 155909 - DNA, 266 bp, Homo sapiens
aaaaaaacaaaaaaaaaacttattattgaacactacatgttctcatttatactctgcatcacttaagaaaagattttagtttgattgacataaagtcaggtgatattttcccccatacattggtagctaagacctcaaaatgagatgaagtttctatgctttatgagatacctaagtggaaagaatatcagatttttgtgtcagttgtgtgactgcttcagctgggaaggacccagcataaaccttaatttttctgaatctctttg

SEQ ID NO: 155910 - DNA, 655 bp, Homo sapiens
ttcaggctgatcccagacatggtggggtctcccttgtagcacagacccaatgaactggtgcggctgagcctgctcagaccagggatggaacatggtttaggcaccacccccggttccttccagagaacgatatgcaagtgggaaaaataaagggggagggaaaagcggggaggagaaagagaaaagaaaagcctgaaaaaacagtgagtatggaatagccttccataggagtgcatgtctctattagcaaatttgtctgaaggtgaaagcctggaaaataatttcatgttttgtgtatgaagacactgggcgtgaaacggtactgaacaccaatcctgcaatgcaggggaattttcctccgtgggattcagaaatgagaggatcaccaccaggacaacacctgaagatggtgttagctgaaggcagacattggggacctgaagtctgtctgcatcaagaccttgagtaattggccacagctgtacccaaggagttcctgggctggggagacccttcatttctcttctccagcttcagctaaaggcctagagacatggagaaggaagcagaatacagtacttcaattgtcttcctactgaggagccattctcatttagacctggcggttctcaggtctggatagtgtcattgtgcg

SEQ ID NO: 155911 - DNA, 608 bp, Homo sapiens
ttcaggctgatcccagacatggtggggtctcccttgtagcacagacccaatgaactggtgcggctgagcctgctcagaccagggatggaacatggtttaggcaccacccccggttccttccagagaacgatatgcaagtgggaaaaataaagggggagggaaaagcggggaggagaaagagaaaagaaaagcctgaaaaaacagtgagtatggaatagccttccataggagtgcatgtctctattagcaaatttgtctgaaggtgaaagcctggaaaataatttcatgttttgtgtatgaagacactgggcgtgaaacggtactgaacaccaatcctgcaatgcaggggaattttcctccgtgggattcagaaatgagaggatcaccaccaggacaacacctgaagatggtgttagctgaaggcagacattggggacctgaagtctgtctgcatcaagaccttgagtaattggccacagctgtacccaaggagttccttcgcacaatgacactatccagacctgagaaccgccaggtctaaatgagaatggctcctcagtagaacaattgaagtactgtattctgcttcctctccatgtcttagctat

SEQ ID NO: 155912 - DNA, 442 bp, Homo sapiens
taagagctgtgtagtcaggcaggaggtgagacctagaaggaaatccatggcagaatgaactgatggagggtcagggaagaggtgagtgagggtgctccagggaaggggtacaagcactgccaggagctgtgggtggcagcaaatgggttgcaagggaagtgaggctggatgagcagggtcacactgtcagattctagaggtttaggaaccaggcaggagatcagccctgacaggacaggacaccaagaagagttctgtagcaggaaaagggtgatgagagccatcatgaaggaagattagcctggctgtggtgtgcaaaggactgaagtcagaggctagtgtgctgcagtctacaaataaatgatcacatcacacagtagggtggaggcaacaggaatggagaaagaggaaggaaagatccttttctcggagagaggctccg

SEQ ID NO: 155913 - DNA, 441 bp, Homo sapiens
cacacatacacatcactgtgcacacacgatgactccctgaagggcctggagccagcgggaggcagccatccccagctccacccactcaaggggaacgcagggctgaggctgcactgcgagctgtgctgaggcagaggccgacctgagcacagcccgttccagctgcagatgtcagaggccgacctgagcacagccctttccagctgcagatgtcagaggccgacctgagcacagcccgttccagctgcagatgtgaaacctgaacctggcagcacggaagtcacaagggccgacccaacgcccccaggtagctgcatctgtccccactgtgacaacagcaagggcttcaggggaatttggtgttcaaaggtatgaggttctgtcttgtccagagagtattttagatgtcctgagtagaactcagaacacagaaaacgctgt

SEQ ID NO: 155914 - DNA, 406 bp, Homo sapiens
ggtggtctgtgcgtggacactcgccaggggacgtggccagggcgtgtctgggatcttgcgccactgaagaggctcccagtcgtcaaatagagtgagggatgggatccaaaggacggcgagaaagcccgtggttgtctaaacgtccctggctccccgagaagcagtttcctcggggccttcctgccttttggatgaatggagatgctgtgtctgggtcactgccagagccggggcaggagaggacagaggcttcccggagcggcagggcccgtcgctagagggcggggcccgcagtcgggggcgggactttggcggcgctgtgcatggggattggcttttcgcaccgcccctccgctcgagtgggccaatcggagacggccccacctcctgccccgccgcgcgtatt

SEQ ID NO: 155915 - DNA, 561 bp, Homo sapiens
ggtgggtctactgttttgtcattgtattggcatggaattgtatgagaataatggcggagaaggcagtgacctctcctgctaggaggatatcaccaatatcgatttggttgccatggagactgtgaggagggaagcactctcttcccacaggccacaggcagtgaaactgaggcccaagggaggggggataagatacagtagtagcctaggcagaaaaaggccacttaaccccatcaggaccctctggggaggggacttactgcagctgcctttggggtcaagaaacccaagcttcttgggagaggaggggggactgtgctggctccgtatgtggctgggacctcatccgggagatgctaaagccctgcctgctccttaggaactgttattgagctgatggagaagcccagctgctgtaggagggaaatctgaaccttctaagggagccacccctcccagccagcatccccggagtccctccctcctcttccctgcttcttcttggtggggtgtttgtgtgtgtaaaggggtggggagaggcctacagagccaatgagccac

SEQ ID NO: 155916 - DNA, 668 bp, Homo sapiens
atcatgtgggaaattttttaagaagaagaatacaatataatgcatacaaaattaggtttagggtcttggaagaaacatttatagatcagtggtcataaagttgaagctttatcagcttcgtggtcaatccacctctggttaaaagttgaaggtctggatgtgtggatgtgaaaagctttgcttttggaaaagggagctaccagcgatttataatttccatttatcttagatctgttcagagaacatctttttaatgacctagcaggagagatgaattttcttgtctaccatggtccttcatttactcaacaaatatttgttgagtgactactttatggtgggcactgtggatatggtgatgaacaagatagacttgatacttgccctcatagaatttagatttagtgggaaagacagatgttaacacacaatttgtgtggctattggagtacataatgagtgaatgagggacggtttattcataattagcatatgagtaatcttgaggtctttcattcatctctatacgttgctactaaattctgtttacttatttttttgacgcagggtctcactgtgtcactaaggtgggatctcagctcactgtaacttctgcctccccagctcaggtgatcctcccatctcagcctcctgagtagttgggactg

SEQ ID NO: 155917 - DNA, 406 bp, Homo sapiens
attttattttaacatttacctattatcctggtgttgtttacaagcgtgccctcgctcaagaatgtaaactccaatgagagcaggaactataccataattatcatctctatatcctgagtacccagtacaatgtctgctacttttagggcacacactagaggttcattatgatgactaatggatataaatgtgttgtattagttaggaccctttgttcaagtgatagaaacccaactcaaactggcataaacaaaataattggttgcctcataatactggggtaagcttggatcgagtggctggatcgagtgtttcaaagaatatcatagggaattttgttttttatctcttgattttgcttttctttgagttcctttgacgctctgcccatgtagagtagcacctg

SEQ ID NO: 155918 - DNA, 416 bp, Homo sapiens
tctggcctgccatgcacacaagcataacaattgttttgtttaacgtgtggatggaatatttgatccattccaaccaggcatttgcatcttggtatcctgtcttaattgccaaagtttgttttaagtctttaacttctatgatcctctagtaaaatgaatgtatgattttaggaaattacaaaaaccggttggggcagtccatccttgctctttagtggtccgcagaacgttggaccaactatggcataaaagctctacatcggggggcaagactcctggttgacactggggtctgtattgaaatgctgaatttgatattatttacttaataaaatttaagttggatgtcttcatgttcagagaaagcagaatgcctccacctatgcagttcaaagtctgacttctttgaatctatc

SEQ ID NO: 155919 - DNA, 352 bp, Homo sapiens
aggatggatgtgaaggtaagaggggtgtgctctctgaggaataattggggtggcgtggggtacagtcctcatcccagagcagaggtgccctcagaaatgaaagcatacaagcccaacaggtttcagcaggcagggggctagtgggtgagtttgcctctccttccctgtcatttccttttctctctttcacaatctcttccttttctttctgtcctttccttaaatgtctcttctccaaatagctagtttttcttaaaatggtcattattagagataaggccattatttaaggtagaagtatctttaaaattaacctttgcattgatttattcaactactcccttatttttaa

SEQ ID NO: 155920 - DNA, 550 bp, Homo sapiens
caacttcctagcgatctcattctaccaataattccctctcacgtgggtctctcagtatttaaaatatccaaatctcttccatcctaaaataaataaaaataatcttcatgaactcaattccctctttacttaacaccatctctctcccattctcttcttaggaaagctacctaaaaaagtattctgtattttcttgtctctattatcttcacacctctacctgttttgatttggcctctttcttaccattccactaaaactaagtaaaggtgaccagacaaagtgagggaattcttgttcataactctatttttccaataaagaagaaaattagattgttaacataatagaagtgatgggtagggggatgctgatgagttgaaagatattgtgagagatcatctatcacctcttccttcacagtctcactcattcagcaaacactcataaatgtccacttgtaccattaacaggcattggttatacaaccatcctcatggagcttacagtctaatgacagaaacaccatggagaagagctcaagggttgt

SEQ ID NO: 155921 - DNA, 477 bp, Homo sapiens
aaattctagtgacaaaagtattcctggaagaatgagcagaacacaggcatagctgtatagaatgtcacttcctcttttatcatagagaaagaagcttggacttcaacaaaattaagtgcatggtgccactctgtttcaggcatctgtgggctaatttgtgtagtcccatagagtctctatgaaagataaattgtctacgagcagttatggctctcccacaaccatttaaaaacttgtctttactatattttatgccataaactaatttaattccacaaatacttaactttggcatcaccgtgaggtgttgaatttggacttctaagaacataggaactggactctccattcaacttattatgacttgagggaggatcagagaaaaatctacttccaaagaaagagttcctaagccagattcgcctgtgttgggcagtggagataattactaggacattttattccaggttctgacag

SEQ ID NO: 155922 - DNA, 215 bp, Homo sapiens
tccaggctcaatattctttattgataagcattagtgaaccccttgccctgggagctcagccagtcctgctctcagattcctggccttaggtgggagagcatcttttcctcatggatcaactgtccatgtctgactgtgcctaacttgccagatcatgggtcagggagacaggcagcaggagcaatgggctctcgcttctgtcctgaggttcttgg

SEQ ID NO: 155923 - DNA, 576 bp, Homo sapiens
gtgctagacatgagagatacaaaaatgaaaaggaacatggtctctgtcgtacaggaatttaccagctagacagaagagacagggaaagaaactggcgttgatcatactgaacgccatcatgaaggaggtttgagatactgctttttcctctctgtgaagtcctgagtccatggaaaggccgaggggagaaacatcggcagcaacatggcagctctattagtgatggaaactggattgggaaatgcgatatcacatctgtcacctagaggttttggcaacaatatttcggcctagaattcagcccagcacattcagtgtactgtgcttacccagcctctggcagagtgggacagctgaagcttcctggaaaggaagaagctcttgttacccggtggaaagcagatcgcaatggatacttcctgcagtcagtcaagcttctgaaagtagagaatcagggaggagctaagaaaagcagcggtcaagataaactaagccccttatccccagcccacaaataaaatgcttcagtctttcttccatgggaatgaagtcagggatacagaaagaaaccaaata

SEQ ID NO: 155924 - DNA, 248 bp, Homo sapiens
ggagaacgctatggtctgtaaggctaaaattggagcatgacgttgaaaataggattccagattacatgcatggggcttctggccacgcttgaatagtagacactggacttgaaaatcacttgtttgggtctgcaaagcatgcattttgcacccacaacactgcctggaatcagtgtcagttctgggccattttcccattttattcaatcaaccgttgagttcacacgccagccattccttaagtgtca

SEQ ID NO: 155925 - DNA, 312 bp, Homo sapiens
aggaggcggaggaggttgcagtgagctgagatcatgccactgcactccagcctggcgacagagcaagacaccatctaagaaaagagaccatgtctcccaagttccagaaccacgtgctatctggttatattagatcttctgattcattttgataaaacttaagatgctaatttcaagtatatcaagattaaaatctgactatactgaaacagagacccccccctttagcatctgctacatttccttagagaactctccagtgaacagatgaattatgatgcctccatacaattaaatgccatgctgtgaaat

SEQ ID NO: 155926 - DNA, 348 bp, Homo sapiens
gtacataacaaaatgaaggcagaaataaagacattctttgaaaccaatgagaacaaagacacaacataccagaatctctgggacacatttaaagcagtgtgtagagttctttcttttctttatacaacttcctatttatgttcctcggttataaatgaagttccagtccctgtgagatttcttgcattcgtggattattgacattaagagaaactgagaagagacaggcaacaagtcagcacaatacagtccacagtgtaggaaagccttccagaggttgtattctcctcatgatagtggaatcaactttataaaatcacagatactagtttcttgaaattccactta

SEQ ID NO: 155927 - DNA, 578 bp, Homo sapiens
aagatggggcagggaagatagagagaagagaaaggctgatagaaatggggttagagaaagagagcatgagagacagacacacagagagaaagacatacacaaacaggctcagagaaagtgaggccttctcataatcattaagcatcattcccccgcccccactttttttgtaaacttcccaacacctttcttttttaatttagatttttcaagtcctgggtatgtatatttgaaggcatattttaagtcagcagtgtgcacacaaaccaggccacaataactcctctacatgtagggaggacatttgggcatttaattgaaagataattacagattattaaagaaatcaaacacaaaaagccagtcaggaaatcttactttgttctaaacaaaactgttggtattttcaaagacagacatcagtcaaaggtcagacacttattagctggtgtttttctttgcatacttataaggagaaacagagttgaataaaatctttccctgaatggaatactgataacattactggaattttattctaggtatatccatccccacccccaccatgacccactatg

SEQ ID NO: 155928 - DNA, 522 bp, Homo sapiens
gagatcgcaccgctgcactccaccctgggcaacagagcgagactgtctcgaaagaaaaacaaaacaaaacagcttgaagcggcagggttacagctctgcgacggcccctgcaggcggggtgtgctgggcagagtgtgctgagagcagcagctcaggacagttctgcagccacatttacacccacttttaatttcatgtagattaaggggcagcccaggcaaaagtttctagggaaggggtagtaacttttgggtcgtggggtcattgccatggaaaggggtagtaactcccaccatgcctggcctgtttactttcacttccagcttgcccttgaattgtttcctgggcaaagccaggaaccctcgaggggctcagccccactgtgggtcttgcctgccctccatcaactagaaggcgacgtagcattgagttaatccaccattactttaaatggcatggataccactcatatagtattgagaaaaggaagtcagatacaaaagagaacatgcaatataattc

SEQ ID NO: 155929 - DNA, 267 bp, Homo sapiens
actctggcactcactctcggttatttttgttaaaatgaagttatatgttgttctggctatctttgtgaggggaacaattgctagagtcttctacttggctatcttgcagatgtcactttttctcttttaacctttgtagaagaggtaaaagtgatttatacaccaccattacagtgtcagaatattcttgactataaacttacttttatcaatgagttgatagtttcatgtttcaatattttaataagtagtatcactttgcttcag

SEQ ID NO: 155930 - DNA, 240 bp, Homo sapiens
ccatgccttctttcagatgtagtaatatgttatcattctcctctgtcccacagcctttggaagtttaataacttatgactgcaaggtctgttttcctcatctgaacgtcataatgtttcatcttccctgcctgagcatggaaagacccacctccccaaggcaagttgttgagggctcctgaatatactcaggtgtagaaagacaagtctgtcaaggacacaggctgtggcggtccccagg

SEQ ID NO: 155931 - DNA, 857 bp, Homo sapiens
ggtctcagtccccgcggcgggcgctggtctctccacgcggctgcggcccggtaccctccgcccgccgccgcctctggtgaccctggccctgaccttctccctcttcccttcctcctcctcctcctcatgtctgcctcgggctgtttggtgctgaagagcgtttcttctccgtctcgtgcaccgcatcctgacgaaattgtctggtcaccagaaccgagtagcccgtagcgtgtcccccctggccctgcacggttgcccctctctggggctcggagccggttcctcccggggtctcagaactgggagtgcagacgttggcgtttctcagactccggagctgcccgggacaggaatgcagccctaaccccggcgtcgcctcggctcgtgcagtttgagcggtgtttcagcgctcacgtccgaccccaggcagtctttgagcttcgcctcttgccccgagaatgtgtaatgatcggagaatgcaggtggaatgaggttctgcccctgcttgcaggagtttggtttctgggaaagcaggcgtgaaaacccaggcccgggttgatttgagaaacgcaagtggggtctggaaggacctctcttgagagaggaggtcatgcttatgttgagtcttgaaggtacgttgttagatgtgagaggtgggaaaaaggctgccggcggaggaagtaagtgcgaaagtagcagaagcgaagccccgtagtgcgttctggaagctgcaggttaggcagaaagaaaggtttgaggaggggctgctgtgtttccaggagtagtcaggtcagaacatggaggtttcttgagaagcagtaaagaagcgccattgagggtccttattttgctagagc

SEQ ID NO: 155932 - DNA, 621 bp, Homo sapiens
cttcagggattgccagccttttcatgattacgattatttttaaccaagtaatatgattagtgctggtcattgggagaaacaaaagaggttatctaccatcccagggttccagctgccttgagggctgagtggtacaatatccaggcatatctgtatatcatttgagacctacctgttgggacattctgatatgagtggaccttgacttcatctgccttttttcttgaagaattccataaaatgtcaaaaatatttgttttcagaaggaatactcacattcttgtgagcatacaccaactgtcaggattggggtagtggaagactgaccccaaagaaattttatgcctttgaagaaactaatgaattaaagtgtcagtgcttctcttgagtggagctttctggctctttgcagatttttatggtggcttagtttcttgttctgggttgttctattaagattcaacagctatgttctgtggctcaggaaggattttaaaaaatacatagtagcttatgcctgtataatcccagctactccagaggctgaggtggaaggattgcttgagtccaggagttcaagaccagcctgggcaacatagtgagagagagcccatttcttta

SEQ ID NO: 155933 - DNA, 350 bp, Homo sapiens
catttagccccggtggatgtgaggagctgcagaagaccatgagctcgcacgtgatgtgaactttaggaagggcagtctgccccagtgggtggtatgggtttgaatggcacttaggaagctttgaagagtacgaggaaagtggctctgatgtcggagtgacagcctgcaaaagtaacagggcctcctgagggaggcaagggggatttctgtgctgggcgttccctccccaccccctcacctttgcaaagagcaaatgtcttcttgcttggcaccagccggaaggcctcccccaccagagtcctactaggactcaattcagagcaccccaggccactacaaaaatgacagcc

SEQ ID NO: 155934 - DNA, 345 bp, Homo sapiens
gacactctcagaaccatgagtcacacataactaaagcgtggggagcaccagcactacggtgaccaactcatcttggtttgcctgggaatttcttggctttaacattgaaagtcctgttctaatatatccttcagtctggggcaagcctggacttttggtcacaccagtccacattaatattgtctggtccacgttaatgtggactggtgtgaccaaatgtccaggtttattatttatatgtattttcaaatacaaataaatcttaatttcctttttctttgcttattttttcttttacttctttttcttttttaaaataaattagaagtttcttttctcattcca

SEQ ID NO: 155935 - DNA, 352 bp, Homo sapiens
tctggctagaggtgaactctgcctacatagaactgatcatctagtttgaaaatatgagaaaggccaggcttggtggctcacatctgggtattcccagcattttgagaggccaaggtcggaggattgcttgagcccaggagtttgagaccagcctgagcaacacagcaagacctcatctctacaaaaaataaatataaaacaattaactgggtatagtggtttgcacctatggtcccagctactcagaaggctgaggtgggaagatagcttaagcccaggaggtcgaggttgcagtgagccatttatcataccactacactctagcctgggtgacagagcaagaccctgtctc

SEQ ID NO: 155936 - DNA, 726 bp, Homo sapiens
gtggattactatttaatgaatatttttggaaaaactctatttcagtttagaaaagaatgaactgagctcctatattttcattctacacattgcagtgaattccagatgggactcaaagacttagcaacaacaacagaacagaacagaataatttatattttctggctcttgctggggaaatacattctaaatattgaagaaaaaggaaatactttcagggaatgcatttctgaatatatatgtaaactttgcaaagctttttctgtaatgaaatcttttaatattttggtcaagcaacagaatggaggaaaaacaaataataagcaaatacttgcttattaatatgtttaggaaacacttggataacacacatacacatatgaatatatacacacacacatatatatatatgttctacatgatcatactaaaatttagatgacacttcgtccaggaagaaatattgaagaaaatgcaatcatacaaacacgacattgccacaggggaaaacataacatccatggtaaatataacgatacaaaaatctgttacatttagtaaaaagtgcagaaaaccggcaagaaaaatgcaggagcctgattttggtagaaagtggcaaaaaggctctaaatgcccagtgcaaatggcttgaaattccattcccaggcctggggctccacatttccaggggctctgctttccaaaagatatggttcaatgtcccct

SEQ ID NO: 155937 - DNA, 350 bp, Homo sapiens
attttttaatcataaatgaaatgggcacagaaattatttaaaatttaatcaaaatgtataatgtatgaaaaacaatagttgaaatttccagaggcaactactcagctttctgcttttattttagtgttttcaggtgattattaccatatctctaaataatattttcatattactatttttagaataaccaactttggactttatctcttgaatttttttctgtgccagatgaagatttaattcactcataacatgccttgatccttcttctcttttcagtttttgagatgttgactactaatttctgtgcccatttcaaatagcccaaataatttctgtgcccatttcaa

SEQ ID NO: 155938 - DNA, 318 bp, Homo sapiens
tatctatcaccatctgggccaggtggcaaaataaatctatgatctctatggaccatgatctcttacagattgaagtgcatgtaccgcatttcctaccaatggcccagccagcaaagtgctgggcatgcaggttactaggcatcaaaggacggagctatcctcttctcagtcagactcttcttgctgcaatgggacccccaaggccacagaattgtcctaacactctagtcatgaatctttaagtacaatggcttttaacatgatcaagttttacccaagtctgcaagggtacacattaacaagaagtcaaatgaatca

SEQ ID NO: 155939 - DNA, 159 bp, Homo sapiens
gcatggtcagccacgtttaaaaagaaggacatttccacagcttggttgaggatggcttgtatattccccatcactaattccagcattatttctccagtagtaataatgaatgtgccctcatatagccacatttccccaacccttattataacaagttaa

SEQ ID NO: 155940 - DNA, 119 bp, Homo sapiens
tcacttcctggttgacacccaaaacaacaacaaagattcacttcctctgaagcctgcactccctagttcattcttgacaccttgctggacacccacagcaggcaaggaaagttcaacag

SEQ ID NO: 155941 - DNA, 233 bp, Homo sapiens
tgatgttttcaagattttctctttgtctttggcctttagtagtttgtgatgtatctaggtgtggatctcttggtgtgcatcgtatttgggcttcagtaagcctcttagattcatagattaatgttttgttttgttttaccaaatttggagagtttttactcatcatttcaacaaatttttttccttgcctcagcctcctgagtagttgggactaccggagtgtgccaccacca

SEQ ID NO: 155942 - DNA, 455 bp, Homo sapiens
actgtgtgtgacttctcagttgacatgcttttaacagctcagcttgtttgtgtatgctagacattcttaaatttttcatatttttctatcaaaagagcctgataggagaaaagtgttaaagtagctggtacagaaaaagttggtgttaaaattatctatttgtctcaaaatttgtgattcaggaaagcactatcatgcattagtgcaactattgcaacataattgcaatatcaaaatcatatatttatgtatataactttagaaaggtctaagtagggttaatataatataaaacaaaacatcgatttacagctttaggtaggtctaaagaaggtgaatataaatcagaatattgacatctaaagcccatgctagggtgaaaagtatcaaggagtgcccatactcagtgattctgaagcaacattattagttaatagtttcctagaagttttgac

SEQ ID NO: 155943 - DNA, 487 bp, Homo sapiens
aattttactgctgcccattgcattggagacacagtttgttgaactaggtgaagttaacttcctactggaataaaaatagcactcttctgaggaacataaaagaatacagactgtctacaatgtattattatgaagtccagtctgcaataaaaaataagcagaatatgaagaaaatgtaattcatccataagataaaaagcactcaatagaaactgtctccaaaatgatccagatcttgcatttagcagacgagaactttaaagcagatattataaatttattataaacatgtttaagggcctaaaggaaaatttgaatgaacatatgggaaaacacagcagagaaatgaaaactcttgacttgaaaaacataattgctaaaatggaaacatcattaggtgggtctcaacaccagactgaataaatcagaccagtgaacttgaagaaaacacaaattactcagtcgaagaatggagaggaaaaaagat

SEQ ID NO: 155944 - DNA, 429 bp, Homo sapiens
ttttgggggggggggggggggggtgtgtggtgtgggttttttttttcccatctcttaccagcattatttttttttagttctgtctgcaataaaaaataagcagaatatgaagaaaatgtaattcatccataagataaaaagcactcaatagaaactgtctccaaaatgatccagatcttgcatttagcagacgagaactttaaagcagatattataaatttattataaacatgtttaagggcctaaaggaaaatttgaatgaacatatgggaaaacacagcagagaaatgaaaactcttgacttgaaaaacataattgctaaaatggaaacatcattaggtgggtctcaacaccagactgaataaatcagaccagtgaacttgaagaaaacacaaattactcagtcgaagaatggagaggaaaaaagat

SEQ ID NO: 155945 - DNA, 355 bp, Homo sapiens
ctctgctgaaccctgatggtgatcgcaggcagtgaaaggcataggatgcagagacacggggtcaaactagacccccagtcctggggcccaccttctactcaggttggctgactcctcagtctccttgttttcagagcaaaccacattgagggcgacctcagctgtgagtgggatcagagatccaactggacaccagctcacagcgtggagcagggaacattctccgacttccacacgggagaaaaggctctgaattactaaactcaaggctgttttacaaaattatctcaagatatcaataaacaaacatagatcttttaccttagtcttaaataaaatggtatcccaccgatct

SEQ ID NO: 155946 - DNA, 710 bp, Homo sapiens
tgctgacaccttagcagcaatcaaggcagtggcgccagtcttgtactggtagttgcattttgtattcttcacatcatacaacatttaaggttttaaagtatgctagtttcactttaaaaatgtccttcacaaataactaaaaattgtatttttttttcaaatccatccttgcttacacgtcttttaaagaatatgtgtgaaaaaatggaaactactgccgctacatgcccaagtgaaatggttgtctccggaaaaagcactagtgtaattctttgaattttcacctaaaaatacaaattttattacacttgtatccaccagcttgagcttgacagcttgccagtacttaaagacttttctagtaaaagaagcattatattaacaatttatttttgactatataatgaaatatgtcaacatttttgtgatctttacaacttagtggacacctatttttcaaatggccagtgggtgccattacaaaggcaaaaagcctctggtatgtgcaagatagattgatggatttcagtgcttaattgatgtggtttcagattcagtccacactgcaatgaaggctaagaaactaccacatgtaagtttggtaccgtatcaaagaataatatctagaactatctggaaaggctataaagtagttttcccttttccaacaccttatctttatgagatcagatttccctcatatatttcaa

SEQ ID NO: 155947 - DNA, 650 bp, Homo sapiens
gatccagagagaaaaatcaacaaagaaacatcagagttcaactgcactgtagataaaatgaacctaacagatatttacaaaacattctatccaacaactacaaaatacactttcttttcaagtgcacatggaacagtttttagaatagactatgctgagtcataacacaagtcttacaaaattttcaaaaataaaaatcacatcaagtactttttctaaacacaatgaaataataccagaaatcaataaaactagaaatcaataacagaaggaatggtggaagctttacaaatacatggaaattaaacagcacgctcttgtatccccattaagaaaagaaatttctgaaaatttctggagatagaaaatgaaagcctatgggatatagcagaagtatgtcaaagaggaaacactagagcaataaattcctacatcaaaaaagtaaaaagatatccaattaaaaaccatctggtgcacttcaaggaactagaaaatttctaaaaagccaaatgcaaaattagtagaagaaaagaaataacaaagatcacagcagaaacaaaaaaaaaacagagattttaaaacaatacaaaaaaatccatcaaagaaaaacaatttgtttgaaaatcaaaagaaattagctacactaagaa

SEQ ID NO: 155948 - DNA, 293 bp, Homo sapiens
acactaagctaacaggagttacaaacacttggaatgctagaactagaattcaaaatgatcttaataaattatataaatcacatttcaaaactgtggaacaaattcaaggttatatcctgagagagacagaaaaactatactgtcagcagagggaggaagattttctgagcgcaggtatgacagttagcagagtggtgcacactctaaaaatggggtgtccaatcttttggcttccccagaccacaatggaagaagaagaattgtcttgggccacacataaaatacactaaccc

SEQ ID NO: 155949 - DNA, 420 bp, Homo sapiens
accaccggggtggctggactacatctagatcctgctgccttgtgcccttcatcaccccctggctgccgtccttggcctggcccaagttcagcactcagttctcattagaaggaattcagcaccctggacagggcattgggcagccctgttctgggacgctctagagtccttttgagagccagcctaacagactgctcactgttccctttttattccagcctctaagcctttactccttctgtgcccaccacttgttttgcctagcaatggaatggtggatccattgtccttccagacgggttttgacgtggcttctgttcccatatcccctctacctctgggcctcgcagcctctgtacctcccatatgccctccgttattttgtcttatagcattgccccaaagtccttcccctcctgc

SEQ ID NO: 155950 - DNA, 187 bp, Homo sapiens
gtgggggcttgagccaggaccctgcctctcagtacttcccaggtctgtcctatctcccgaccttcacctcctcctctgggaggcccaggacccctcttcctgctcagccctcgcctgggcctaacaattatcaaaactctgggtagctaggccatgattctttttttttttttttttttttgagaca

SEQ ID NO: 155951 - DNA, 504 bp, Homo sapiens
caggagaatcaaaatatctaacacggaaccccacaggcagtgaattagacatggctgcagatggcatctaagcagagagagggtcaaatatagagccccaatatcacgaatcatcagataaatgcaagacaaaaccatggtgagatatcttctcacatgagtcagaatagctataacttgaaagtccaaaaattacagatgttggcaaggttgcagagaaaagggaacacttatacactgttggtggaagtataaattagttcagaccctatggaaagcagttgggagatttctcaaagaactgaaaacagaattgccatttgacccagctatgccattgctgggtatatatatacctaaagaaaaataaatggtcctaccaaaatgacacctgcattcatatgtttatcatagcactatttacaatagcaaagacatggaatcaatccatgtgctcatcaatggcggattaaattaaaaaatgggtgctgtgtgtccaggctg

SEQ ID NO: 155952 - DNA, 515 bp, Homo sapiens
aatttgttctttgagctaccttccctcctcaccacaactatctttagtcagtaaggatacttaatgagagacaccaggtgaagttttcatcatgtagacagtggcgactcagtattttaagtgagggaatgataatccaatttgtgtaaagcagggcttcttaggacagttgactggagggagaagaaaatgaacttcagttgatgaggaagaatgtagtaagacaacaaaacagagctgggaatagagcatttggaactattggggactcatatgagaagaaattcaaatgtccaacgattatttgactgaatgtgaaggaaggagtaggaaggttgtgggatgacttgaacattttaaatttaggccgctgtaatgcttttaaatgaaggtgggaatagagatgaacccggttttttaaatgggaaaataacccagttttgatcttttttagtctgggtgcttactggatgtcaaggtagaaagtgtccaacaaggtgctttaactataggtt

SEQ ID NO: 155953 - DNA, 634 bp, Homo sapiens
tctagaggatcccagatcatgcagagtaacccagatgatcagagcagactgggggtaggtggaaatctgggtagcagtgttggacatgttaacttcgagatgccgtcagacctttacgtggggattccggtctggggttccaggcaaaggaacgggctgaaggataaagagtcaccaacataggcacagtcattaaagccacgggcctggaggaaatctcttagggcctgagtgtagacagagaagagaatcaagccctggggcactccatctcttagcggccagggagaaaagaaaggattggcaatgtaggctgaggaccacactcccatgacaaacaaggtcaagttagatgaggactgagaagtggttactgggttagcaatgtgcagggtgctgggggccttgacaaagggcagtctccttggtgtaaagcagggaacagtctccttggtgtaaagcagctgagagtaaagagagaggcaaaggtgtgaaatcgtcctctggagaatggagacgactgggctagggacaaaagtttgtgtgcatgtggttacaaattgaaagatttttagtagagtcgagtttcactatcttggccagggtggtcttgaactcctgacctcgtgatcca

SEQ ID NO: 155954 - DNA, 232 bp, Homo sapiens
atattttaaagatggagttttactaatggactgaatgtgaagtatgagaggaaaatagaagttaaagatgactccaggatttatggctaaagcaactggaaaggatggtgcggtcatgagctgagatggagaagatgataagcagagcagactgggggtaggtggaaatctgggtagcagtgttggacatgttaacttcgagatgccgtcagacctttacgtggggattccg

SEQ ID NO: 155955 - DNA, 245 bp, Homo sapiens
atcgtgccattgcactccaacctaggcgacagagtgagactgcgtctcaaaaaaacaaaaacagaaaaggttaatgacttgcccgaagtcatctagcttgtaagtacacagccagaatttaagcctgggtggttaacttgaaaaccgttatggagcaacccagagatttagcatcagtggttcaaatctcagttctacaattacttgccatgtgacctcatacaagtcacttaccccttctgaga

SEQ ID NO: 155956 - DNA, 787 bp, Homo sapiens
tcattaattagtaacacttatccaggggggtttttaacctttcccccactcaaggattattctaatgtcagagtagaataaaaaataagtgcagcgatgctgactcttccaagcttaacatttctcacaagtcaattagctttgtactgggaggagggcgtgaagggctgcttgcggtagttgtgtagcagcagcacaatggccgcagacaaggaaaacagtttctaggaattcctcgtatataattttatatttttgacaagattaatgacccatgctcccttcctctccatttctttttttggaattctgttggtatgtagttactatattttattaaaggaaattagccttatctcttattatattttattaaagaaaattattatattattcctttatatttttattaaaggattttattattattaaaggaaattagccttatctcttattatattttttatgaccttcaaagtagtgtctctgcttaaaagtgtaccctggccgggcgtggtggctcacacctgtaattccagcactttgggaggccgaggcgggtggatcacgaggtcaggagatcgagaccatcctggctaacacggtgaaaccccgtctgtactaaaaatacaaaaaattagcagggcatagtggcgggcgcctgtagtcccagctactcaggaggctcaggcaggagaatggcatgaacccgggagacggagcttgcggtgagctgagatcgcaccgctgcactccagcctgggcgacagagcaagactccgtctca

SEQ ID NO: 155957 - DNA, 311 bp, Homo sapiens
ctaggatcctcccactgcactgtgctttcttcattccattcatcagacaacagctttggtgagcctttcaaagcataaaacaaattgtatcactcttctgttaaaaaaaaccctccaatggcttctcaacccacccagaaacaaattcaaggtccttaaatgtgaagtcccgggtggtctaacctcatccacatctcccagctcatttccctctgccctctctgttacagccatggggcttccttggtgatagtggtcacacacaccagggttatccctgcctcaaaactttagcacaacattcttctgcc

SEQ ID NO: 155958 - DNA, 971 bp, Homo sapiens
  misc_feature (255)..(255): n is a, c, g, or t
  misc_feature (276)..(276): n is a, c, g, or t
  misc_feature (294)..(294): n is a, c, g, or t
  misc_feature (308)..(308): n is a, c, g, or t
  misc_feature (316)..(316): n is a, c, g, or t
  misc_feature (494)..(494): n is a, c, g, or t
  misc_feature (630)..(630): n is a, c, g, or t
gatggcgccgagcgccgggtgagcagcgtctcggctgccgctagagttttcctgctccccgcgctcgggtggcgggggcgggtctgagtggtaccccggaggagaccctttgaaggtcccttgtggggactggaaagaggacgggtctccgtctctccaccgggggcttcatccttccagggaggagaagagggactccagaatggctgaggagaagaagctgaagcttagcaacacttgtgctgccctcggagntccatgaaggtggtggctgantccatgggcatcgccagnattcaggaggaganctgccagntgctaacggatgaggtcagctaccgcatcaaagagatcgcacaggatgccttgaagttcatgcacatggggaagcggcagaagctcaccaccagtgacattgactacgccttgaagctaaagaatgtcgagccactctatggcttccacgcccaggagttcattcctttccgcttcgnctctggtgggggccgggagctttacttctatgaggagaaggaggttgatctgagcgacatcatcaatagccctactgccccgggtgaccctggacgtctgcctcaaagctcattggctgagcatcgagggctgcanccagctatccccgagaacccgcccccagctcgcaaagagcaacagaaggctgcagccacagaagccctgaaagcaggcaaagcaggcaggaggaaacggaccctgaagggcaaggtcaggggcaacacagccgacgcacggacgagagacgggcgaccagcagaggggccctggacatgaccccgaggtcacaatcgctgcgaggcgagcgacagcaggaatgcgaggcgggggacaggagccgggggagcggcagagtcgagccaggaggacgaggggggagacagcgaaggcggacgaggcacaggcaaacggggaaacagaaccaagagacaagcggg

SEQ ID NO: 155959 - DNA, 1230 bp, Homo sapiens
  misc_feature (579)..(579): n is a, c, g, or t
  misc_feature (600)..(600): n is a, c, g, or t
  misc_feature (618)..(618): n is a, c, g, or t
  misc_feature (632)..(632): n is a, c, g, or t
  misc_feature (640)..(640): n is a, c, g, or t
  misc_feature (818)..(818): n is a, c, g, or t
  misc_feature (889)..(889): n is a, c, g, or t
gatggcgccgagcgccgggtgagcagcgtctcggctgccgctagagttttcctgctccccgcgctcgggtggcgggggcgggtctgagtggtaccccggaggagaccctttgaaggtcccttgtggggactggaaagaggacggttggttgtgtgtctgtgctcgtggggaccccgtgtgtgtgcctgcattggagagatgttgcaggagatggggtgggctctctgaacctcctttcgcgctgcccggggatcttcgacctgcttctctgctgggatctcgcttaagttaacccttccctgggacgccttcctgccgcctccactgatctgaggagatcctgtgactgtagcgtgttttatgagcctttactggcagagggtaccgccgggtattgaaggattcgtaggagttcgccagggaagtgggacacgaccccctcttgtaaacccggcgccaggcacagaggtctccgtctctccaccgggggcttcatccttccagggaggagaagagggactccagaatggctgaggagaagaagctgaagcttagcaacacttgtgctgccctcggagntccatgaaggtggtggctgantccatgggcatcgccagnattcaggaggaganctgccagntgctaacggatgaggtcagctaccgcatcaaagagatcgcacaggatgccttgaagttcatgcacatggggaagcggcagaagctcaccaccagtgacattgactacgccttgaagctaaagaatgtcgagccactctatggcttccacgcccaggagttcattcctttccgcttcgnctctggtgggggccgggagctttacttctatgaggagaaggagctcattggctgagcatcgagggctgcanccagctatccccgagaacccgcccccagctcgcaaagagcaacagaaggctgcagccacagaagccctgaaagcaggcaaagcaggcaggaggaaacggaccctgaagggcaaggtcaggggcaacacagccgacgcacggacgagagacgggcgaccagcagaggggccctggacatgaccccgaggtcacaatcgctgcgaggcgagcgacagcaggaatgcgaggcgggggacaggagccgggggagcggcagagtcgagccaggaggacgaggggggagacagcgaaggcggacgaggcacaggcaaacggggaaacagaaccaagagacaagcggg

SEQ ID NO: 155960 - DNA, 308 bp, Homo sapiens
atgtattatatgaacagagccgagtcacagcatcctcttctctcaagcatgtggaagtccttcctacagtttatgtttcagactctttctctcccgttgagtcctgccacaattcctgctgggcaacataccatcccatctctctaactactcccaagagctctgacaaacgctttcagaacttgcacttgaactttttctttccaacataaacatctggtaatctgtaactgactttatgtatcactcaagtcttgcctttactgagtgcctgatatatatcaaacctcgaggttacatattgactg

SEQ ID NO: 155961 - DNA, 229 bp, Homo sapiens
tgtgacaaagcaagtttagcaaaatgttaactgtggctctaggtaccaactatatgactgctcacagtagaattctttcgacttttctgtaggtttaagaatgttcatagtaaaatgctggggggaaaatattacatattatacagacaggactaaaaatacctcttactgcaaacgagctgagtagctttcactgaatgttccaaaccagtgatttgcaaccctgaac

SEQ ID NO: 155962 - DNA, 218 bp, Homo sapiens
gcatgtgacttaaaaaaaatcgcaaaaataaaatataccacttcatctcagtaataacaccatttctgaaattaatataatgatgcttaaaggtctaactgaagcgttctgcttccattcttgaaaaaaacagagaacacatgttctctaaaattttcatggtgctttaaaagttcctttactttgaaattccacttacttccaacattgcttcggtt

SEQ ID NO: 155963 - DNA, 1140 bp, Homo sapiens
tagtttttcttatagatatctttcatttacttgtgaaggtgtatttctaagtattttatttttgtaggtgtcataaacaagtttgaattttttatttgattctcagcttggtcactattggtgtatagcagtgttactgatttgtgtacattgattttgtatcctgaaactttactgaactcatttatcagatctaggagctttttggatgagtctttagggtttcctaggtatacaatcatgtcatcagtgaacagcaacaatttgacttcttcctctttaccaatttggatgtcctttatttctttctcttgtctgattgttctggctaggacaaagagctgtttctaattttaaaaatacatgtgtccctaactcattttctctctcagttccagtgtctcgccccatcctcaccctcagggttcccagggcccaggctgtggtgggggacctgctggagcttcactgtgaggccccgagaggctctcccccaatcctgtactggttttatcatgaggatgtcacccctgggtaagatctcagccccctctggaggaggggcctccttcaacctctctctgactacagaacattctggaatctactcctgtgaggcagacaatggtctggaggcccagcgcagtgagatggtgacactgaaagttgcaggtgagtgggccctgcccaccagcagcacatctgagaactgactgtgcctgttctccctgcagctgaaaatggagccacagagctcctcagggctgtttgcttgtgtggcatcccagcacacttcctgcctgcagaacctccctgtgaaagtctcggatcctttgtggtatggttccaggaatctgatgtttcccagcagtcttcttgaagatgatcaaagcacctcactaaaaatgcaaataagacttttttagaacataaactatattctgaactgaaattattacatgaaaatgaaaccaaagaattctgagcatatgtttctctgccgtagaaaggattaagctgtttcttgtccggattcttctctcattgacttctaagaagcctctactcttgagtctctttcattactggggatgtaaatgttccttacatttccacattaaaaatcctatgttaacataa

SEQ ID NO: 155964 - DNA, 4487 bp, Homo sapiens
  misc_feature (3126)..(3126): n is a, c, g, or t
  misc_feature (3413)..(3413): n is a, c, g, or t
  misc_feature (3644)..(3644): n is a, c, g, or t
  misc_feature (4311)..(4311): n is a, c, g, or t
aattcactaatgcattctgctctttttgagagcacagcttctcagatgtgctccttggagctggtgtgcagtgtcctgactgtaagatcaagtccaaacctgttttggaattgaggaaacttctcttttgatctcagcccttggtggtccaggtcttcatgctgctgtgggtgatattactggtcctggctcctgtcagtggacagtttgcaaggacacccaggcccattattttcctccagcctccatggaccacagtcttccaaggagagagagtgaccctcacttgcaagggatttcgcttctactcaccacagaaaacaaaatggtaccatcggtaccttgggaaagaaatactaagagaaaccccagacaatatccttgaggttcaggaatctggagagtacagatgccaggcccagggctcccctctcagtagccctgtgcacttggatttttcttcagcttcgctgatcctgcaagctccactttctgtgtttgaaggagactctgtggttctgaggtgccgggcaaaggcggaagtaacactgaataatactatttacaagaatgataatgtcctggcattccttaataaaagaactgacttccatattcctcatgcatgtctcaaggacaatggtgcatatcgctgtactggatataaggaaagttgttgccctgtttcttccaatacagtcaaaatccaagtccaagagccatttacacgtccagtgctgagagccagctccttccagcccatcagcgggaacccagtgaccctgacctgtgagacccagctctctctagagaggtcagatgtcccgctccggttccgcttcttcagagatgaccagaccctgggattaggctggagtctctccccgaatttccagattactgccatgtggagtaaagattcagggttctactggtgtaaggcagcaacaatgcctcacagcgtcatatctgacagcccgagatcctggatacaggtgcagatccctgcatctcatcctgtcctcactctcagccctgaaaaggctctgaattttgagggaaccaaggtgacacttcactgtgaaacccaggaagattctctgcgcactttgtacaggttttatcatgagggtgtccccctgaggcacaagtcagtccgctgtgaaaggggagcatccatcagcttctcactgactacagagaattcagggaactactactgcacagctgacaatggccttggcgccaagcccagtaaggctgtgagcctctcagtcactgttcccgtgtctcatcctgtcctcaacctcagctctcctgaggacctgatttttgagggagccaaggtgacacttcactgtgaagcccagagaggttcactccccatcctgtaccagtttcatcatgaggatgctgccctggagcgtaggtcggccaactctgcaggaggagtggccatcagcttctctctgactgcagagcattcagggaactactactgcacagctgacaatggctttggcccccagcgcagtaaggcggtgagcctctccatcactgtccctgtgtctcatcctgtcctcaccctcagctctgctgaggccctgacttttgaaggagccactgtgacacttcactgtgaagtccagagaggttccccacaaatcctataccagttttatcatgaggacatgcccctgtggagcagctcaacaccctctgtgggaagagtgtccttcagcttctctctgactgaaggacattcagggaattactactgcacagctgacaatggctttggtccccagcgcagtgaagtggtgagcctttttgtcactggtaagtgctgggttcttgccagtcacccacccctggctgagttctctctcacccattcctttaaaaatctgtttgcactgtccagtttcctcccctaatcaacttaatccccttcttggcttcctcctcaactaactagctggggttttccgtactcataagtcctggctcagccagacccctaaaacagctcagtagattccccagcttttaccaaatgaatttatttattgtattttctcctcattccttgtatgttccaacagtacgccaatttttcttgatgcacggagcgtgtcctacttctctactgacatttacatattaacttagctacaagcacagtcttatagataaatattggtcaagaccttaaattctccaaaggatttccaatcttatggtagatttggagaaagctgctggtgaacaaagggggaaatggctccctaggaaccaactcctcaaacttctggagtttttatgatcccttgttttctaacctgctaaaatcagtatcattttattgtattattttaaaaaaactattgttgaagtatgacatacattcaagaaacgtgtgcaaattgtatgtgtacgatttggtgtctttttaggagctaagttgcttctgtttttacttgaatctttgtttatagaaactgggggaaagtttactttcttttcagagaagccaaatggtatgatagaaaaatcttgagcctgatgtgtcagacatgcccctagcataacttgttgagtaaagaggttatttttaaaatgtgaatgttctgagactactccaaagtcagagccaaatctactaggaagcttctagacttcactcattctgcatcccattactatctttttatccatgttttactttcttctcatattcagcagcatcttaagcctctttattttctgtttcttgactgtcacccttaatgccagtagaatgtaagcttcatgagaacagaactgcatccatcttggtcttcacaacatccctgtgcctactcagtgtttggcacacagtaggtcctcagtcaacatttgtaatttagtggacagatgatatgacaagatgataagaggggatttaaaaaaatcatctagcaaagcccaagaggaaaaaaaacaaagctattttagaaatgaaataccaatttgaagcagtaagaatagattggatatctttgaaaaccattaattgaatgaagaaccaatttgagaaaacaatacagaatgcaaagtagaaagatacagaaataaaggcaaaanttataatatggaaatcagacaatggatttgtctgtatccagttatgtggataattaaaatggagaccctcagaaaattgaaccgaagagtaaaatgaaactcaaaaatgtagtagaaattgttgggaagtaaagaaaacttgaatatgtagatcagaacatatatgttgatgacgttattgactttgaggttaaaaatatatatatgtgcctatgattatggggaaaaaagcagtcgtctcagaaagaaaaacatcaagttagtcttagactttgcagtgcactcantaccaaagagagaggaggccagacttggacctgcgagggaagaataataaccgaaaattttatatcaattcaaaaagacattgtcaaaaatacagggattcaggaaactgagaatgcactaagccttctggaaaaaacacctaatgacaaaatctagcccaacaagatgtaaatgaatataaaggactcataatgaggaaaccgcattatgactggctctcaaccctggcngcatattagactcgtcaaagacctttgtaaaaggtcacacattgactcgtcaaagcccctctccagactaattcaattcagaatctcacagatggggccacagaatcagtattttttgacacaacctcaagtgagaatattgtgtagacaagattggaaaccactgatttagatatagaaacaaaggctaatcaactgtgagaattatggtcacagaatagaaagtaactattatgaacactgaaaatgtaaaaaaaatgtaacaaagaaaaatagttagaggaaggagaggaagtaaaggaacaatcattttctcatgattattattatttcagagtaaattgtgagttatttcacaattcaaaaagaatggactgttttaaaaaattagtaatagatttcaaaatgtccattttgtaaatcgtttctgaatactttgtcaacagttactcatcattaatggcttatacttcactaaaattccatggaaaaccaactagtagcctgtagagtcacataggagagaacaagtgaattctttgggtggcgcaagcatagatgttaggactgacaaaaaaaaataataaaaataaacctgtgcattgatatgatcacaaatgatcagggaaagaggaaacagaaactctcatacgccattattacaagngtaaattggttcaaccttttcgtcttaattgacacattgtaattgtatatatttatggaagcacagtttgatattttgatatacatacatggtatataacgatcaaattaggatatttaatgtacccatcatctcatgcatttatcatttctttggaataaaaacattcaaaagcc

SEQ ID NO: 155965 - DNA, 5491 bp, Homo sapiens
  misc_feature (3470)..(3470): n is a, c, g, or t
  misc_feature (4719)..(4719): n is a, c, g, or t
aattcactaatgcattctgctctttttgagagcacagcttctcagatgtgctccttggagctggtgtgcagtgtcctgactgtaagatcaagtccaaacctgttttggaattgaggaaacttctcttttgatctcagcccttggtggtccaggtcttcatgctgctgtgggtgatattactggtcctggctcctgtcagtggacagtttgcaaggacacccaggcccattattttcctccagcctccatggaccacagtcttccaaggagagagagtgaccctcacttgcaagggatttcgcttctactcaccacagaaaacaaaatggtaccatcggtaccttgggaaagaaatactaagagaaaccccagacaatatccttgaggttcaggaatctggagagtacagatgccaggcccagggctcccctctcagtagccctgtgcacttggatttttcttcagagatgggatttcctcatgctgcccaggctaatgttgaactcctgggctcaagtgatctgctcacctaggcctctcaaagcgctgggattacagcttcgctgatcctgcaagctccactttctgtgtttgaaggagactctgtggttctgaggtgccgggcaaaggcggaagtaacactgaataatactatttacaagaatgataatgtcctggcattccttaataaaagaactgacttccatattcctcatgcatgtctcaaggacaatggtgcatatcgctgtactggatataaggaaagttgttgccctgtttcttccaatacagtcaaaatccaagtccaagagccatttacacgtccagtgctgagagccagctccttccagcccatcagcgggaacccagtgaccctgacctgtgagacccagctctctctagagaggtcagatgtcccgctccggttccgcttcttcagagatgaccagaccctgggattaggctggagtctctccccgaatttccagattactgccatgtggagtaaagattcagggttctactggtgtaaggcagcaacaatgcctcacagcgtcatatctgacagcccgagatcctggatacaggtgcagatccctgcatctcatcctgtcctcactctcagccctgaaaaggctctgaattttgagggaaccaaggtgacacttcactgtgaaacccaggaagattctctgcgcactttgtacaggttttatcatgagggtgtccccctgaggcacaagtcagtccgctgtgaaaggggagcatccatcagcttctcactgactacagagaattcagggaactactactgcacagctgacaatggccttggcgccaagcccagtaaggctgtgagcctctcagtcactgttcccgtgtctcatcctgtcctcaacctcagctctcctgaggacctgatttttgagggagccaaggtgacacttcactgtgaagcccagagaggttcactccccatcctgtaccagtttcatcatgaggatgctgccctggagcgtaggtcggccaactctgcaggaggagtggccatcagcttctctctgactgcagagcattcagggaactactactgcacagctgacaatggctttggcccccagcgcagtaaggcggtgagcctctccatcactgtccctgtgtctcatcctgtcctcaccctcagctctgctgaggccctgacttttgaaggagccactgtgacacttcactgtgaagtccagagaggttccccacaaatcctataccagttttatcatgaggacatgcccctgtggagcagctcaacaccctctgtgggaagagtgtccttcagcttctctctgactgaaggacattcagggaattactactgcacagctgacaatggctttggtccccagcgcagtgaagtggtgagcctttttgtcactgttccagtgtctcgccccatcctcaccctcagggttcccagggcccaggctgtggtgggggacctgctggagcttcactgtgaggccccgagaggctctcccccaatcctgtactggttttatcatgaggatgtcaccctggggagcagctcagccccctctggaggagaagcttctttcaacctctctctgactgcagaacattctggaaactactcatgtgaggccaacaatggcctagtggcccagcacagtgacacaatatcactcagtgttatagttccagtatctcgtcccatcctcaccttcagggctcccagggcccaggctgtggtgggggacctgctggagcttcactgtgaggccctgagaggctcctccccaatcctgtactggttttatcatgaagatgtcaccctgggtaagatctcagccccctctggaggaggggcctccttcaacctctctctgactacagaacattctggaatctactcctgtgaggcagacaatggtctggaggcccagcgcagtgagatggtgacactgaaagttgcagttccggtgtctcgcccggtcctcaccctcagggctcccgggacccatgctgcggtgggggacctgctggagcttcactgtgaggccctgagaggctctcccctgatcctgtaccggttttttcatgaggatgtcaccctaggaaataggtcgtccccctctggaggagcgtccttaaacctctctctgactgcagagcactctggaaactactcctgtgaggccgacaatggcctcggggcccagcgcagtgagacagtgacactttatatcacagggctgaccgcgaacagaagtggcccttttgccacaggagtcgccgggggcctgctcagcatagcaggccttgctgcgggggcactgctgctctactgctggctctcgagaaaagcagggagaaagcctgcctctgaccccgccaggagcccttcagactcggactcccaagagcccacctatcacaatgtaccagcctgggaagagctgcaaccagtgtacactaatgcaaatcctagaggagaaaatgtggtttactcagaagtacggatcatccaagagaaaaagaaacatgcagtggcctctgaccccaggcatctcaggaacaagggttcccctatcatctactctgaagttaaggtggcgtcaaccccggtttccggatccctgttcttggcttcctcagctcctcacagatgagtccacacgtctctccaactgctgtttcagcctctgcaccccaaagttccccttgggggagaagcagcattgaagtgggaagatttaggctgccccagaccatatctactggcctttgtttcacatgtcctcattctcagtctgaccagaatgcagggccctgctggactgtcacctgtttcccagttaaagccctgactggcaggttttttaatccagtggcaaggtgctcccactccagggcccagcacatctcctggattccttagtgggcttcagctgtgnttgctgttctgagtactgctctcatcacacccccacagagggggtcttaccacacaaagggagagtgggccttcaggagatgccgggctggcctaacagctcaggtgctcctaaactccgacacagagttcctgctttgggtggatgcatttctcaattgtcatcagcctggtggggctactgcagtgtgctgccaaatgggacagcacacagcctgtgcacatgggacatgtgatgggtctccccacgggggctgcatttcacactcctccacctgtctcaaactctaaggtcggcacttgacaccaaggtaacttctctcctgctcatgtgtcagtgtctacctgcccaagtaagtggctttcatacaccaagtcccaagttcttcccatcctaacagaagtaacccagcaagtcaaggccaggaggaccaggggtgcagacagaacacatactggaacacaggaggtgctcaattactatttgactgactgactgaatgaatgaatgaatgaggaagaaaactgtgggtaatcaaactggcataaaatccagtgcactccctaggaaatccgggaggtattctggcttccctaagaaacaacggaagagaaggagcttggatgaggaaactgttcagcaagaggaagggcttctcacactttcatgtgcttgtggatcacctgaggatcctgtgaaaatacagatactgattcagtgggtctgtgtagagcctgagactgccattctaacatgttcccaggggatgctgatgctgctggccctgggactgcactgcatgcatgtgaagccctataggtctcagcagaggcccatggagagggaatgtgtggctctggctgcccagggcccaactcggttcacacggatcgtgctgctccctggccagcctttggccacagcaccaccagctgctgttgctgagagagcttcttctctgtgacatgttggctttcatcagccaccctgggaagcggaaagtagctgccactatctttgtttccccacctcaggcctcacactttcccatgaaaagggtgaatgtatataacctgagccctctccattcagagttgttctcccatctctgagcaatgggatgttctgttccgcttttatgatatccatcacatcttatcttgatctttgctcccagtggattgtacagtgatgacttttaagccccacggccctgaaataaaatccttccaagggcattggaagctcnctccacctgaaccatggcttttcatgcttccaagtgtcagggccttgcccagatagacagggctgactctgctgccccaacctttcaaggaggaaaccagacacctgagacaggagcctgtatgcagcccagtgcagccttgcagaggacaaggctggaggcatttgtcatcactacagatatgcaactaaaatagacgtggagcaagagaaatgcattcccaccgaggccgcttttttaggcctagttgaaagtcaagaaggacagcagcaagcataggctcaggattaaagaaaaaaatctgctcacagtctgttctggaggtcacatcaccaacaaagctcacgccctatgcagttctgagaaggtggaggcaccaggctcaaaagaggaaatttagaatttctcattgggagagtaaggtacccccatcccagaatgataactgcacagtggcagaacaaactccaccctaatgtgggtggaccccatccagtctgttgaaggcctgaatgtaacaaaagggcttattcttcctcaagtaagggggaactcctgctttgggctgggacataagtttttctgctttcagacgcaaactgaaaaatggctcttcttgggtcttgagcttgctggcatatggactgaaagaaactatgctattggatctcctggatctccagcttgctgactgcagatcttgagatatgtcagcctctacagtcacaagagctaattcattctaataaaccaatctttctgtaaaaaagca

SEQ ID NO: 155966 - DNA, 3673 bp, Homo sapiens
  misc_feature (1652)..(1652): n is a, c, g, or t
  misc_feature (2901)..(2901): n is a, c, g, or t
tagtttttcttatagatatctttcatttacttgtgaaggtgtatttctaagtattttatttttgtaggtgtcataaacaagtttgaattttttatttgattctcagcttggtcactattggtgtatagcagtgttactgatttgtgtacattgattttgtatcctgaaactttactgaactcatttatcagatctaggagctttttggatgagtctttagggtttcctaggtatacaatcatgtcatcagtgaacagcaacaatttgacttcttcctctttaccaatttggatgtcctttatttctttctcttgtctgattgttctggctaggacaaagagctgtttctaattttaaaaatacatgtgtccctaactcattttctctctcagttccagtgtctcgccccatcctcaccctcagggttcccagggcccaggctgtggtgggggacctgctggagcttcactgtgaggccccgagaggctctcccccaatcctgtactggttttatcatgaggatgtcacccctgggtaagatctcagccccctctggaggaggggcctccttcaacctctctctgactacagaacattctggaatctactcctgtgaggcagacaatggtctggaggcccagcgcagtgagatggtgacactgaaagttgcagttccggtgtctcgcccggtcctcaccctcagggctcccgggacccatgctgcggtgggggacctgctggagcttcactgtgaggccctgagaggctctcccctgatcctgtaccggttttttcatgaggatgtcaccctaggaaataggtcgtccccctctggaggagcgtccttaaacctctctctgactgcagagcactctggaaactactcctgtgaggccgacaatggcctcggggcccagcgcagtgagacagtgacactttatatcacagggctgaccgcgaacagaagtggcccttttgccacaggagtcgccgggggcctgctcagcatagcaggccttgctgcgggggcactgctgctctactgctggctctcgagaaaagcagggagaaagcctgcctctgaccccgccaggagcccttcagactcggactcccaagagcccacctatcacaatgtaccagcctgggaagagctgcaaccagtgtacactaatgcaaatcctagaggagaaaatgtggtttactcagaagtacggatcatccaagagaaaaagaaacatgcagtggcctctgaccccaggcatctcaggaacaagggttcccctatcatctactctgaagttaaggtggcgtcaaccccggtttccggatccctgttcttggcttcctcagctcctcacagatgagtccacacgtctctccaactgctgtttcagcctctgcaccccaaagttccccttgggggagaagcagcattgaagtgggaagatttaggctgccccagaccatatctactggcctttgtttcacatgtcctcattctcagtctgaccagaatgcagggccctgctggactgtcacctgtttcccagttaaagccctgactggcaggttttttaatccagtggcaaggtgctcccactccagggcccagcacatctcctggattccttagtgggcttcagctgtgnttgctgttctgagtactgctctcatcacacccccacagagggggtcttaccacacaaagggagagtgggccttcaggagatgccgggctggcctaacagctcaggtgctcctaaactccgacacagagttcctgctttgggtggatgcatttctcaattgtcatcagcctggtggggctactgcagtgtgctgccaaatgggacagcacacagcctgtgcacatgggacatgtgatgggtctccccacgggggctgcatttcacactcctccacctgtctcaaactctaaggtcggcacttgacaccaaggtaacttctctcctgctcatgtgtcagtgtctacctgcccaagtaagtggctttcatacaccaagtcccaagttcttcccatcctaacagaagtaacccagcaagtcaaggccaggaggaccaggggtgcagacagaacacatactggaacacaggaggtgctcaattactatttgactgactgactgaatgaatgaatgaatgaggaagaaaactgtgggtaatcaaactggcataaaatccagtgcactccctaggaaatccgggaggtattctggcttccctaagaaacaacggaagagaaggagcttggatgaggaaactgttcagcaagaggaagggcttctcacactttcatgtgcttgtggatcacctgaggatcctgtgaaaatacagatactgattcagtgggtctgtgtagagcctgagactgccattctaacatgttcccaggggatgctgatgctgctggccctgggactgcactgcatgcatgtgaagccctataggtctcagcagaggcccatggagagggaatgtgtggctctggctgcccagggcccaactcggttcacacggatcgtgctgctccctggccagcctttggccacagcaccaccagctgctgttgctgagagagcttcttctctgtgacatgttggctttcatcagccaccctgggaagcggaaagtagctgccactatctttgtttccccacctcaggcctcacactttcccatgaaaagggtgaatgtatataacctgagccctctccattcagagttgttctcccatctctgagcaatgggatgttctgttccgcttttatgatatccatcacatcttatcttgatctttgctcccagtggattgtacagtgatgacttttaagccccacggccctgaaataaaatccttccaagggcattggaagctcnctccacctgaaccatggcttttcatgcttccaagtgtcagggccttgcccagatagacagggctgactctgctgccccaacctttcaaggaggaaaccagacacctgagacaggagcctgtatgcagcccagtgcagccttgcagaggacaaggctggaggcatttgtcatcactacagatatgcaactaaaatagacgtggagcaagagaaatgcattcccaccgaggccgcttttttaggcctagttgaaagtcaagaaggacagcagcaagcataggctcaggattaaagaaaaaaatctgctcacagtctgttctggaggtcacatcaccaacaaagctcacgccctatgcagttctgagaaggtggaggcaccaggctcaaaagaggaaatttagaatttctcattgggagagtaaggtacccccatcccagaatgataactgcacagtggcagaacaaactccaccctaatgtgggtggaccccatccagtctgttgaaggcctgaatgtaacaaaagggcttattcttcctcaagtaagggggaactcctgctttgggctgggacataagtttttctgctttcagacgcaaactgaaaaatggctcttcttgggtcttgagcttgctggcatatggactgaaagaaactatgctattggatctcctggatctccagcttgctgactgcagatcttgagatatgtcagcctctacagtcacaagagctaattcattctaataaaccaatctttctgtaaaaaagca

SEQ ID NO: 155967 - DNA, 2360 bp, Homo sapiens
aattcactaatgcattctgctctttttgagagcacagcttctcagatgtgctccttggagctggtgtgcagtgtcctgactgtaagatcaagtccaaacctgttttggaattgaggaaacttctcttttgatctcagcccttggtggtccaggtcttcatgctgctgtgggtgatattactggtcctggctcctgtcagtggacagtttgcaaggacacccaggcccattattttcctccagcctccatggaccacagtcttccaaggagagagagtgaccctcacttgcaagggatttcgcttctactcaccacagaaaacaaaatggtaccatcggtaccttgggaaagaaatactaagagaaaccccagacaatatccttgaggttcaggaatctggagagtacagatgccaggcccagggctcccctctcagtagccctgtgcacttggatttttcttcagcttcgctgatcctgcaagctccactttctgtgtttgaaggagactctgtggttctgaggtgccgggcaaaggcggaagtaacactgaataatactatttacaagaatgataatgtcctggcattccttaataaaagaactgacttccatattcctcatgcatgtctcaaggacaatggtgcatatcgctgtactggatataaggaaagttgttgccctgtttcttccaatacagtcaaaatccaagtccaagagccatttacacgtccagtgctgagagccagctccttccagcccatcagcgggaacccagtgaccctgacctgtgagacccagctctctctagagaggtcagatgtcccgctccggttccgcttcttcagagatgaccagaccctgggattaggctggagtctctccccgaatttccagattactgccatgtggagtaaagattcagggttctactggtgtaaggcagcaacaatgcctcacagcgtcatatctgacagcccgagatcctggatacaggtgcagatccctgcatctcatcctgtcctcactctcagccctgaaaaggctctgaattttgagggaaccaaggtgacacttcactgtgaaacccaggaagattctctgcgcactttgtacaggttttatcatgagggtgtccccctgaggcacaagtcagtccgctgtgaaaggggagcatccatcagcttctcactgactacagagaattcagggaactactactgcacagctgacaatggccttggcgccaagcccagtaaggctgtgagcctctcagtcactgttcccgtgtctcatcctgtcctcaacctcagctctcctgaggacctgatttttgagggagccaaggtgacacttcactgtgaagcccagagaggttcactccccatcctgtaccagtttcatcatgaggatgctgccctggagcgtaggtcggccaactctgcaggaggagtggccatcagcttctctctgactgcagagcattcagggaactactactgcacagctgacaatggctttggcccccagcgcagtaaggcggtgagcctctccatcactgtccctgtgtctcatcctgtcctcaccctcagctctgctgaggccctgacttttgaaggagccactgtgacacttcactgtgaagtccagagaggttccccacaaatcctataccagttttatcatgaggacatgcccctgtggagcagctcaacaccctctgtgggaagagtgtccttcagcttctctctgactgaaggacattcagggaattactactgcacagctgacaatggctttggtccccagcgcagtgaagtggtgagcctttttgtcactgttccagtgtctcgccccatcctcaccctcagggttcccagggcccaggctgtggtgggggacctgctggagcttcactgtgaggccccgagaggctctcccccaatcctgtactggttttatcatgaggatgtcacccctgggtaagatctcagccccctctggaggaggggcctccttcaacctctctctgactacagaacattctggaatctactcctgtgaggcagacaatggtctggaggcccagcgcagtgagatggtgacactgaaagttgcaggtgagtgggccctgcccaccagcagcacatctgagaactgactgtgcctgttctccctgcagctgaaaatggagccacagagctcctcagggctgtttgcttgtgtggcatcccagcacacttcctgcctgcagaacctccctgtgaaagtctcggatcctttgtggtatggttccaggaatctgatgtttcccagcagaaattggtaggatgatcatgtagcgtactcggggatcgtcta

SEQ ID NO: 155968 - DNA, 442 bp, Homo sapiens
aacaatggcctagtggcccagcacagtgacacaatatcactcagtgttataggtaagttgacctaaccagcagcacaaaaataaaaagaccatctcccctaactttaccagtagccaagatcagaggtacagtttctagagtcatttgctgtgtgacatcctgtcaggcttggtgcctacacagcctccatctctaagttttgtatcctacacgttcaggaacttgcaccttcccttcccttgctgtacttttcctgctagcagcagtccagccatcacgaccaaaattcccctaacataggagtaaaggctttcaaaatacaaactatattctggccaacagtgatagtaagaaagaaagttataaagttctgtgtgcttcaccttggaagagatttagttgtggttttctctgtctgccaatcaataaaaaggccaacac

SEQ ID NO: 155969 - DNA, 5398 bp, Homo sapiens
  misc_feature (3377)..(3377): n is a, c, g, or t
  misc_feature (4626)..(4626): n is a, c, g, or t
aattcactaatgcattctgctctttttgagagcacagcttctcagatgtgctccttggagctggtgtgcagtgtcctgactgtaagatcaagtccaaacctgttttggaattgaggaaacttctcttttgatctcagcccttggtggtccaggtcttcatgctgctgtgggtgatattactggtcctggctcctgtcagtggacagtttgcaaggacacccaggcccattattttcctccagcctccatggaccacagtcttccaaggagagagagtgaccctcacttgcaagggatttcgcttctactcaccacagaaaacaaaatggtaccatcggtaccttgggaaagaaatactaagagaaaccccagacaatatccttgaggttcaggaatctggagagtacagatgccaggcccagggctcccctctcagtagccctgtgcacttggatttttcttcagcttcgctgatcctgcaagctccactttctgtgtttgaaggagactctgtggttctgaggtgccgggcaaaggcggaagtaacactgaataatactatttacaagaatgataatgtcctggcattccttaataaaagaactgacttccatattcctcatgcatgtctcaaggacaatggtgcatatcgctgtactggatataaggaaagttgttgccctgtttcttccaatacagtcaaaatccaagtccaagagccatttacacgtccagtgctgagagccagctccttccagcccatcagcgggaacccagtgaccctgacctgtgagacccagctctctctagagaggtcagatgtcccgctccggttccgcttcttcagagatgaccagaccctgggattaggctggagtctctccccgaatttccagattactgccatgtggagtaaagattcagggttctactggtgtaaggcagcaacaatgcctcacagcgtcatatctgacagcccgagatcctggatacaggtgcagatccctgcatctcatcctgtcctcactctcagccctgaaaaggctctgaattttgagggaaccaaggtgacacttcactgtgaaacccaggaagattctctgcgcactttgtacaggttttatcatgagggtgtccccctgaggcacaagtcagtccgctgtgaaaggggagcatccatcagcttctcactgactacagagaattcagggaactactactgcacagctgacaatggccttggcgccaagcccagtaaggctgtgagcctctcagtcactgttcccgtgtctcatcctgtcctcaacctcagctctcctgaggacctgatttttgagggagccaaggtgacacttcactgtgaagcccagagaggttcactccccatcctgtaccagtttcatcatgaggatgctgccctggagcgtaggtcggccaactctgcaggaggagtggccatcagcttctctctgactgcagagcattcagggaactactactgcacagctgacaatggctttggcccccagcgcagtaaggcggtgagcctctccatcactgtccctgtgtctcatcctgtcctcaccctcagctctgctgaggccctgacttttgaaggagccactgtgacacttcactgtgaagtccagagaggttccccacaaatcctataccagttttatcatgaggacatgcccctgtggagcagctcaacaccctctgtgggaagagtgtccttcagcttctctctgactgaaggacattcagggaattactactgcacagctgacaatggctttggtccccagcgcagtgaagtggtgagcctttttgtcactgttccagtgtctcgccccatcctcaccctcagggttcccagggcccaggctgtggtgggggacctgctggagcttcactgtgaggccccgagaggctctcccccaatcctgtactggttttatcatgaggatgtcaccctggggagcagctcagccccctctggaggagaagcttctttcaacctctctctgactgcagaacattctggaaactactcatgtgaggccaacaatggcctagtggcccagcacagtgacacaatatcactcagtgttatagttccagtatctcgtcccatcctcaccttcagggctcccagggcccaggctgtggtgggggacctgctggagcttcactgtgaggccctgagaggctcctccccaatcctgtactggttttatcatgaagatgtcaccctgggtaagatctcagccccctctggaggaggggcctccttcaacctctctctgactacagaacattctggaatctactcctgtgaggcagacaatggtctggaggcccagcgcagtgagatggtgacactgaaagttgcagttccggtgtctcgcccggtcctcaccctcagggctcccgggacccatgctgcggtgggggacctgctggagcttcactgtgaggccctgagaggctctcccctgatcctgtaccggttttttcatgaggatgtcaccctaggaaataggtcgtccccctctggaggagcgtccttaaacctctctctgactgcagagcactctggaaactactcctgtgaggccgacaatggcctcggggcccagcgcagtgagacagtgacactttatatcacagggctgaccgcgaacagaagtggcccttttgccacaggagtcgccgggggcctgctcagcatagcaggccttgctgcgggggcactgctgctctactgctggctctcgagaaaagcagggagaaagcctgcctctgaccccgccaggagcccttcagactcggactcccaagagcccacctatcacaatgtaccagcctgggaagagctgcaaccagtgtacactaatgcaaatcctagaggagaaaatgtggtttactcagaagtacggatcatccaagagaaaaagaaacatgcagtggcctctgaccccaggcatctcaggaacaagggttcccctatcatctactctgaagttaaggtggcgtcaaccccggtttccggatccctgttcttggcttcctcagctcctcacagatgagtccacacgtctctccaactgctgtttcagcctctgcaccccaaagttccccttgggggagaagcagcattgaagtgggaagatttaggctgccccagaccatatctactggcctttgtttcacatgtcctcattctcagtctgaccagaatgcagggccctgctggactgtcacctgtttcccagttaaagccctgactggcaggttttttaatccagtggcaaggtgctcccactccagggcccagcacatctcctggattccttagtgggcttcagctgtgnttgctgttctgagtactgctctcatcacacccccacagagggggtcttaccacacaaagggagagtgggccttcaggagatgccgggctggcctaacagctcaggtgctcctaaactccgacacagagttcctgctttgggtggatgcatttctcaattgtcatcagcctggtggggctactgcagtgtgctgccaaatgggacagcacacagcctgtgcacatgggacatgtgatgggtctccccacgggggctgcatttcacactcctccacctgtctcaaactctaaggtcggcacttgacaccaaggtaacttctctcctgctcatgtgtcagtgtctacctgcccaagtaagtggctttcatacaccaagtcccaagttcttcccatcctaacagaagtaacccagcaagtcaaggccaggaggaccaggggtgcagacagaacacatactggaacacaggaggtgctcaattactatttgactgactgactgaatgaatgaatgaatgaggaagaaaactgtgggtaatcaaactggcataaaatccagtgcactccctaggaaatccgggaggtattctggcttccctaagaaacaacggaagagaaggagcttggatgaggaaactgttcagcaagaggaagggcttctcacactttcatgtgcttgtggatcacctgaggatcctgtgaaaatacagatactgattcagtgggtctgtgtagagcctgagactgccattctaacatgttcccaggggatgctgatgctgctggccctgggactgcactgcatgcatgtgaagccctataggtctcagcagaggcccatggagagggaatgtgtggctctggctgcccagggcccaactcggttcacacggatcgtgctgctccctggccagcctttggccacagcaccaccagctgctgttgctgagagagcttcttctctgtgacatgttggctttcatcagccaccctgggaagcggaaagtagctgccactatctttgtttccccacctcaggcctcacactttcccatgaaaagggtgaatgtatataacctgagccctctccattcagagttgttctcccatctctgagcaatgggatgttctgttccgcttttatgatatccatcacatcttatcttgatctttgctcccagtggattgtacagtgatgacttttaagccccacggccctgaaataaaatccttccaagggcattggaagctcnctccacctgaaccatggcttttcatgcttccaagtgtcagggccttgcccagatagacagggctgactctgctgccccaacctttcaaggaggaaaccagacacctgagacaggagcctgtatgcagcccagtgcagccttgcagaggacaaggctggaggcatttgtcatcactacagatatgcaactaaaatagacgtggagcaagagaaatgcattcccaccgaggccgcttttttaggcctagttgaaagtcaagaaggacagcagcaagcataggctcaggattaaagaaaaaaatctgctcacagtctgttctggaggtcacatcaccaacaaagctcacgccctatgcagttctgagaaggtggaggcaccaggctcaaaagaggaaatttagaatttctcattgggagagtaaggtacccccatcccagaatgataactgcacagtggcagaacaaactccaccctaatgtgggtggaccccatccagtctgttgaaggcctgaatgtaacaaaagggcttattcttcctcaagtaagggggaactcctgctttgggctgggacataagtttttctgctttcagacgcaaactgaaaaatggctcttcttgggtcttgagcttgctggcatatggactgaaagaaactatgctattggatctcctggatctccagcttgctgactgcagatcttgagatatgtcagcctctacagtcacaagagctaattcattctaataaaccaatctttctgtaaaaaagca

SEQ ID NO: 155970 - DNA, 2865 bp, Homo sapiens
aattcactaatgcattctgctctttttgagagcacagcttctcagatgtgctccttggagctggtgtgcagtgtcctgactgtaagatcaagtccaaacctgttttggaattgaggaaacttctcttttgatctcagcccttggtggtccaggtcttcatgctgctgtgggtgatattactggtcctggctcctgtcagtggacagtttgcaaggacacccaggcccattattttcctccagcctccatggaccacagtcttccaaggagagagagtgaccctcacttgcaagggatttcgcttctactcaccacagaaaacaaaatggtaccatcggtaccttgggaaagaaatactaagagaaaccccagacaatatccttgaggttcaggaatctggagagtacagatgccaggcccagggctcccctctcagtagccctgtgcacttggatttttcttcagcttcgctgatcctgcaagctccactttctgtgtttgaaggagactctgtggttctgaggtgccgggcaaaggcggaagtaacactgaataatactatttacaagaatgataatgtcctggcattccttaataaaagaactgacttccatattcctcatgcatgtctcaaggacaatggtgcatatcgctgtactggatataaggaaagttgttgccctgtttcttccaatacagtcaaaatccaagtccaagagccatttacacgtccagtgctgagagccagctccttccagcccatcagcgggaacccagtgaccctgacctgtgagacccagctctctctagagaggtcagatgtcccgctccggttccgcttcttcagagatgaccagaccctgggattaggctggagtctctccccgaatttccagattactgccatgtggagtaaagattcagggttctactggtgtaaggcagcaacaatgcctcacagcgtcatatctgacagcccgagatcctggatacaggtgcagatccctgcatctcatcctgtcctcactctcagccctgaaaaggctctgaattttgagggaaccaaggtgacacttcactgtgaaacccaggaagattctctgcgcactttgtacaggttttatcatgagggtgtccccctgaggcacaagtcagtccgctgtgaaaggggagcatccatcagcttctcactgactacagagaattcagggaactactactgcacagctgacaatggccttggcgccaagcccagtaaggctgtgagcctctcagtcactgttcccgtgtctcatcctgtcctcaacctcagctctcctgaggacctgatttttgagggagccaaggtgacacttcactgtgaagcccagagaggttcactccccatcctgtaccagtttcatcatgaggatgctgccctggagcgtaggtcggccaactctgcaggaggagtggccatcagcttctctctgactgcagagcattcagggaactactactgcacagctgacaatggctttggcccccagcgcagtaaggcggtgagcctctccatcactgtccctgtgtctcatcctgtcctcaccctcagctctgctgaggccctgacttttgaaggagccactgtgacacttcactgtgaagtccagagaggttccccacaaatcctataccagttttatcatgaggacatgcccctgtggagcagctcaacaccctctgtgggaagagtgtccttcagcttctctctgactgaaggacattcagggaattactactgcacagctgacaatggctttggtccccagcgcagtgaagtggtgagcctttttgtcactgttccagtgtctcgccccatcctcaccctcagggttcccagggcccaggctgtggtgggggacctgctggagcttcactgtgaggccccgagaggctctcccccaatcctgtactggttttatcatgaggatgtcaccctggggagcagctcagccccctctggaggagaagcttctttcaacctctctctgactgcagaacattctggaaactactcatgtgaggccaacaatggcctagtggcccagcacagtgacacaatatcactcagtgttatagttccagtatctcgtcccatcctcaccttcagggctcccagggcccaggctgtggtgggggacctgctggagcttcactgtgaggccctgagaggctcctccccaatcctgtactggttttatcatgaagatgtcaccctgggtaagatctcagccccctctggaggaggggcctccttcaacctctctctgactacagaacattctggaatctactcctgtgaggcagacaatggtctggaggcccagcgcagtgagatggtgacactgaaagttgcaggtgagtgggccctgcccaccagcagcacatctgagaactgactgtgcctgttctccctgcagctgaaaatggagccacagagctcctcagggctgtttgcttgtgtggcatcccagcacacttcctgcctgcagaacctccctgtgaaagtctcggatcctttgtggtatggttccaggaatctgatgtttcccagcagtcttcttgaagatgatcaaagcacctcactaaaaatgcaaataagacttttttagaacataaactatattctgaactgaaattattacatgaaaatgaaaccaaagaattctgagcatatgtttctctgccgtagaaaggattaagctgtttcttgtccggattcttctctcattgacttctaagaagcctctactcttgagtctctttcattactggggatgtaaatgttccttacatttccacattaaaaatcctatgttaacataa

SEQ ID NO: 155971 - DNA, 3951 bp, Homo sapiens
  misc_feature (1930)..(1930): n is a, c, g, or t
  misc_feature (3179)..(3179): n is a, c, g, or t
tagtttttcttatagatatctttcatttacttgtgaaggtgtatttctaagtattttatttttgtaggtgtcataaacaagtttgaattttttatttgattctcagcttggtcactattggtgtatagcagtgttactgatttgtgtacattgattttgtatcctgaaactttactgaactcatttatcagatctaggagctttttggatgagtctttagggtttcctaggtatacaatcatgtcatcagtgaacagcaacaatttgacttcttcctctttaccaatttggatgtcctttatttctttctcttgtctgattgttctggctaggacaaagagctgtttctaattttaaaaatacatgtgtccctaactcattttctctctcagttccagtgtctcgccccatcctcaccctcagggttcccagggcccaggctgtggtgggggacctgctggagcttcactgtgaggccccgagaggctctcccccaatcctgtactggttttatcatgaggatgtcaccctggggagcagctcagccccctctggaggagaagcttctttcaacctctctctgactgcagaacattctggaaactactcatgtgaggccaacaatggcctagtggcccagcacagtgacacaatatcactcagtgttatagttccagtatctcgtcccatcctcaccttcagggctcccagggcccaggctgtggtgggggacctgctggagcttcactgtgaggccctgagaggctcctccccaatcctgtactggttttatcatgaagatgtcaccctgggtaagatctcagccccctctggaggaggggcctccttcaacctctctctgactacagaacattctggaatctactcctgtgaggcagacaatggtctggaggcccagcgcagtgagatggtgacactgaaagttgcagttccggtgtctcgcccggtcctcaccctcagggctcccgggacccatgctgcggtgggggacctgctggagcttcactgtgaggccctgagaggctctcccctgatcctgtaccggttttttcatgaggatgtcaccctaggaaataggtcgtccccctctggaggagcgtccttaaacctctctctgactgcagagcactctggaaactactcctgtgaggccgacaatggcctcggggcccagcgcagtgagacagtgacactttatatcacagggctgaccgcgaacagaagtggcccttttgccacaggagtcgccgggggcctgctcagcatagcaggccttgctgcgggggcactgctgctctactgctggctctcgagaaaagcagggagaaagcctgcctctgaccccgccaggagcccttcagactcggactcccaagagcccacctatcacaatgtaccagcctgggaagagctgcaaccagtgtacactaatgcaaatcctagaggagaaaatgtggtttactcagaagtacggatcatccaagagaaaaagaaacatgcagtggcctctgaccccaggcatctcaggaacaagggttcccctatcatctactctgaagttaaggtggcgtcaaccccggtttccggatccctgttcttggcttcctcagctcctcacagatgagtccacacgtctctccaactgctgtttcagcctctgcaccccaaagttccccttgggggagaagcagcattgaagtgggaagatttaggctgccccagaccatatctactggcctttgtttcacatgtcctcattctcagtctgaccagaatgcagggccctgctggactgtcacctgtttcccagttaaagccctgactggcaggttttttaatccagtggcaaggtgctcccactccagggcccagcacatctcctggattccttagtgggcttcagctgtgnttgctgttctgagtactgctctcatcacacccccacagagggggtcttaccacacaaagggagagtgggccttcaggagatgccgggctggcctaacagctcaggtgctcctaaactccgacacagagttcctgctttgggtggatgcatttctcaattgtcatcagcctggtggggctactgcagtgtgctgccaaatgggacagcacacagcctgtgcacatgggacatgtgatgggtctccccacgggggctgcatttcacactcctccacctgtctcaaactctaaggtcggcacttgacaccaaggtaacttctctcctgctcatgtgtcagtgtctacctgcccaagtaagtggctttcatacaccaagtcccaagttcttcccatcctaacagaagtaacccagcaagtcaaggccaggaggaccaggggtgcagacagaacacatactggaacacaggaggtgctcaattactatttgactgactgactgaatgaatgaatgaatgaggaagaaaactgtgggtaatcaaactggcataaaatccagtgcactccctaggaaatccgggaggtattctggcttccctaagaaacaacggaagagaaggagcttggatgaggaaactgttcagcaagaggaagggcttctcacactttcatgtgcttgtggatcacctgaggatcctgtgaaaatacagatactgattcagtgggtctgtgtagagcctgagactgccattctaacatgttcccaggggatgctgatgctgctggccctgggactgcactgcatgcatgtgaagccctataggtctcagcagaggcccatggagagggaatgtgtggctctggctgcccagggcccaactcggttcacacggatcgtgctgctccctggccagcctttggccacagcaccaccagctgctgttgctgagagagcttcttctctgtgacatgttggctttcatcagccaccctgggaagcggaaagtagctgccactatctttgtttccccacctcaggcctcacactttcccatgaaaagggtgaatgtatataacctgagccctctccattcagagttgttctcccatctctgagcaatgggatgttctgttccgcttttatgatatccatcacatcttatcttgatctttgctcccagtggattgtacagtgatgacttttaagccccacggccctgaaataaaatccttccaagggcattggaagctcnctccacctgaaccatggcttttcatgcttccaagtgtcagggccttgcccagatagacagggctgactctgctgccccaacctttcaaggaggaaaccagacacctgagacaggagcctgtatgcagcccagtgcagccttgcagaggacaaggctggaggcatttgtcatcactacagatatgcaactaaaatagacgtggagcaagagaaatgcattcccaccgaggccgcttttttaggcctagttgaaagtcaagaaggacagcagcaagcataggctcaggattaaagaaaaaaatctgctcacagtctgttctggaggtcacatcaccaacaaagctcacgccctatgcagttctgagaaggtggaggcaccaggctcaaaagaggaaatttagaatttctcattgggagagtaaggtacccccatcccagaatgataactgcacagtggcagaacaaactccaccctaatgtgggtggaccccatccagtctgttgaaggcctgaatgtaacaaaagggcttattcttcctcaagtaagggggaactcctgctttgggctgggacataagtttttctgctttcagacgcaaactgaaaaatggctcttcttgggtcttgagcttgctggcatatggactgaaagaaactatgctattggatctcctggatctccagcttgctgactgcagatcttgagatatgtcagcctctacagtcacaagagctaattcattctaataaaccaatctttctgtaaaaaagca

SEQ ID NO: 155972 - DNA, 2883 bp, Homo sapiens
  misc_feature (862)..(862): n is a, c, g, or t
  misc_feature (2111)..(2111): n is a, c, g, or t
ttcataagtcacttattggagcctccgtttgtttcagctaaaacgaggatgaaatagaactaacaacgtattgctgtaagcatcagcaccatgcctgttacacactagatgaccagaaagcctggaaacatatataatatgattatgattcataatagaatgcccatggtcagtttgttatgtacttgttcatgtttccaggcctggcagccaccctgcagtaagaagtcactcactaggagtgatcattatagctactttgtctggattcctaagaaacattcacatttctctgtctcacaggagcccttcagactcggactcccaagagcccacctatcacaatgtaccagcctgggaagagctgcaaccagtgtacactaatgcaaatcctagaggagaaaatgtggtttactcagaagtacggatcatccaagagaaaaagaaacatgcagtggcctctgaccccaggcatctcaggaacaagggttcccctatcatctactctgaagttaaggtggcgtcaaccccggtttccggatccctgttcttggcttcctcagctcctcacagatgagtccacacgtctctccaactgctgtttcagcctctgcaccccaaagttccccttgggggagaagcagcattgaagtgggaagatttaggctgccccagaccatatctactggcctttgtttcacatgtcctcattctcagtctgaccagaatgcagggccctgctggactgtcacctgtttcccagttaaagccctgactggcaggttttttaatccagtggcaaggtgctcccactccagggcccagcacatctcctggattccttagtgggcttcagctgtgnttgctgttctgagtactgctctcatcacacccccacagagggggtcttaccacacaaagggagagtgggccttcaggagatgccgggctggcctaacagctcaggtgctcctaaactccgacacagagttcctgctttgggtggatgcatttctcaattgtcatcagcctggtggggctactgcagtgtgctgccaaatgggacagcacacagcctgtgcacatgggacatgtgatgggtctccccacgggggctgcatttcacactcctccacctgtctcaaactctaaggtcggcacttgacaccaaggtaacttctctcctgctcatgtgtcagtgtctacctgcccaagtaagtggctttcatacaccaagtcccaagttcttcccatcctaacagaagtaacccagcaagtcaaggccaggaggaccaggggtgcagacagaacacatactggaacacaggaggtgctcaattactatttgactgactgactgaatgaatgaatgaatgaggaagaaaactgtgggtaatcaaactggcataaaatccagtgcactccctaggaaatccgggaggtattctggcttccctaagaaacaacggaagagaaggagcttggatgaggaaactgttcagcaagaggaagggcttctcacactttcatgtgcttgtggatcacctgaggatcctgtgaaaatacagatactgattcagtgggtctgtgtagagcctgagactgccattctaacatgttcccaggggatgctgatgctgctggccctgggactgcactgcatgcatgtgaagccctataggtctcagcagaggcccatggagagggaatgtgtggctctggctgcccagggcccaactcggttcacacggatcgtgctgctccctggccagcctttggccacagcaccaccagctgctgttgctgagagagcttcttctctgtgacatgttggctttcatcagccaccctgggaagcggaaagtagctgccactatctttgtttccccacctcaggcctcacactttcccatgaaaagggtgaatgtatataacctgagccctctccattcagagttgttctcccatctctgagcaatgggatgttctgttccgcttttatgatatccatcacatcttatcttgatctttgctcccagtggattgtacagtgatgacttttaagccccacggccctgaaataaaatccttccaagggcattggaagctcnctccacctgaaccatggcttttcatgcttccaagtgtcagggccttgcccagatagacagggctgactctgctgccccaacctttcaaggaggaaaccagacacctgagacaggagcctgtatgcagcccagtgcagccttgcagaggacaaggctggaggcatttgtcatcactacagatatgcaactaaaatagacgtggagcaagagaaatgcattcccaccgaggccgcttttttaggcctagttgaaagtcaagaaggacagcagcaagcataggctcaggattaaagaaaaaaatctgctcacagtctgttctggaggtcacatcaccaacaaagctcacgccctatgcagttctgagaaggtggaggcaccaggctcaaaagaggaaatttagaatttctcattgggagagtaaggtacccccatcccagaatgataactgcacagtggcagaacaaactccaccctaatgtgggtggaccccatccagtctgttgaaggcctgaatgtaacaaaagggcttattcttcctcaagtaagggggaactcctgctttgggctgggacataagtttttctgctttcagacgcaaactgaaaaatggctcttcttgggtcttgagcttgctggcatatggactgaaagaaactatgctattggatctcctggatctccagcttgctgactgcagatcttgagatatgtcagcctctacagtcacaagagctaattcattctaataaaccaatctttctgtaaaaaagca

SEQ ID NO: 155973 - DNA, 1580 bp, Homo sapiens
ctgtagtcactgtgagtattttagtattattgtaggactcaagagggaattaaaactacaaaaatgactcctcttgtatgacacagaaagaaatgtttcttcacagagggaggagaaaaatatcttcaagagagaactaatagaatcaaatcaatgaaccatgtctcatctttttggataagtaactgttagtaatccagacacttcatgagctttcattatgtaaagtctttagcagaagctaaaggaggggcaccaaccacagtaattttaacttaagaacaaaatggagcatgaaaataaattattaaatcatttactcccactatttttgggttagggccaataatggggagagaaagaggtagactagttttgtgtttgtggctattttaatagagtagcacaagtaatcaaaaaacagtaggctgttttgaatttactggctgtcccttatgagttcacagttagattggactgtcctcaatgtactttcttttttttctttctttcccacatctctttatttctctgattttgtttaaacttcataaagagctctctgatctttcctttccaaacaatgaaggtttatcctttgtaaactacctctgtactccacaggctgatgatatgtgatatccctatatcattaaagtaaagcctaagcacattctatggcttttgtgtctactctgttgttgctgagcttatgaactattagaaataactccctcttgcattttcacacatggggaatgtgatgttctcttgggtattatgctaatcatattttggcaggtttctctggagcagatgcagaaatgatcataccactttccagggtgtattattttagctcctttgacttgggccctaagtctgttttacctgatgttcctgaaagatgttcctgatgtccttcactgttctttcatgctggatgttcttgcctatgctgcctcctcagctatcaccctctcttcccctttttaatgtagaactcattcttaatgatttgtcaaaggcaccctatttcactgaaatgccttctatattccctaccctccaagtggattgtagaccttctaaggtcttttgacatctgcatatctctagcacagcacttatcacggtgattatttatctgttcatctttccaagtagacactctcattttaactccctaccctagtcgccagcatccccagcatagtgcctgtcataaaatggtgccacaatgaaaatttgaaaaatgaatgaacgtgataaacatagatgagaatcctatattctacaattttttaaatgtactgaaattattctttttgaatcctcctatttatttctgtgacttctttggtgacaaagttagaaaaaagtggaggtcagtagggagatatgaagggacgcaggtggaagcagtgagcctgggcgggtgatggagtgggagatacgtggcacaggggtcagtgagttaatctgggctcattcagagaatggaaggtgtgtgccaagaaaactggttggatagggataggtcagggattccctcttgcattctcacacttgggggcatg

SEQ ID NO: 155974 - DNA, 219 bp, Homo sapiens
ggtaattgtgaataacccatgaaataccagatgtgaaggtgcttcatcatccaaaggggaccgggagaaggagcccaactagttaccttcctactggaaggcatggtcccactgacacagtttctgctcacgaacacatggtagttgctgaagaaatgtcctttgaagagtgttttgtggcctgaatgtgttctctgcaccctgctttctctcattctt

SEQ ID NO: 155975 - DNA, 270 bp, Homo sapiens
ctcagaggatcccggtgttcctttgtctctataaaaatacaaaattagcctggtgtggtggcacacacctgtagtcccagctactctggaggctgaaacaggagaattgcctgaacctgggaggtggaggctgcagtgagccaagatcacagcattacactccagcctgggcaagacagagtgagactttgtctcaaataaatagacaaataataaatacacaaaaattagccagatatgctcgcttgaactcaggaggcggaggttgca

SEQ ID NO: 155976 - DNA, 1227 bp, Homo sapiens
atagaattaacctagaattaatgagttttgtattgctctcatctatttgaagcatcagctgtgcctttcatgttgccttgtgcagccctgtgtaacctcctctgtgcctttcccatggagcactgtgtcatatcacaagtagaactacaagaagatatttctcctcagggcagaggctgggtcttccgattgaatctcccttctttcttcattgagatcctcttcttctggaagctggtttcacatggtggcttagatttttccatctttgtatctagcaccatttgaaatcagtgttttaggagtaagaattgcagcacagccaagggtggactgcagaggaactgctgctcatggaactggctcctctcctcttgccacttgagtctgttcgagaagtccagggaagaacttgaagagcaaaatacactcttgagtttgttgggttttgggagaggtgacagtagagaagggggttgtgtttaaaataaacacagtggcttgagcaggggcagaggttgtgatgctatttctgttgactcctagcagccatcaccagcatgaatgtgttcgtagggcctttgagtgtggcgattgtcatattctgttggataacaatgtattgggtgtcgattgtcatggggcaggggagagggcagtacacctggaggaccattttgtccacatcgacaccatcagtctgctcttagaggatgccctggagtattcggcgttgattgcggggcacccgaaatcagacttgccacctggactgtcgaggtgcagaccctgggagcaccactggcccatctcttacacaggctgaccgatttctcctggtgttcagagtctgtttttgtctagcaccatttgaaatcggttatgatgtagggggaaaagcagcagcctcgaagcctcatgccaactctgggcagcagcagcctgtggtttcctggaagatggatgggcagagaatagggaaggaagatcatgcttttccctactaacttctgtaactgcatgtatgatacattattgcagaggtaagagatagtttaatggatttttaaaaacaaattactataatttatctgatgttctctagttgcattttgctgaaatgtagtgctgttctaaattctgtaaattgattgctgttgaattatctttctgttgagaagagtctattcatgcatcctgaccttaataaatactatgttcagttta

SEQ ID NO: 155977 - DNA, 849 bp, Homo sapiens
caggctgctgcctagaatgacaggaagctggactgccctttcagtttatacatgcaatggcctgggactgtctcttgagggcaagacattccccttttacaaaagagccttccccaggcccctctctcaccaagatgagctcttccttgctgccaggagccctgaaatcagcattcccagaggaaagaagatggccatctgggcttggcttccggctccccccatctggctggaacacacatcagtcacgtaagtagctgtgactcagcacccagcactgccttggcagaaccttcccacgttctggatttgcacacactgtggtagcgcagcacaagcaagcagggttaggtaactggggaccagtgtctgtttgttcagtgggtttgcctatggatttcagaaagaaggattccctcaccttcccattttcctcccatgttattttttaggtaccatgctaggctttaaagacaaagcatcatttatagaatgaagtagaagctgtctttgcagtctccaaactatttttaaccaacagcctatagatggtatttaaccctcaggtgtgtttggcctgcacgggtttttgtttttgtttgagacagggtttcactctgtagcccaggctggagtgcagtggcacgatatcagcttgctgcaacctctgcctcccgggctcgagcagttctcatgcctcagcctcctgagtagctgggactacaggtgccaccacacctggctagggttattttaatgtatctgattttgcatgcatttagacaaaatatggcctctccagttcactgtatttctgctgcatgctgttgctgcttctctgtctcaggt

SEQ ID NO: 155978 - DNA, 1124 bp, Homo sapiens
atagaattaacctagaattaatgagttttgtattgctctcatctatttgaagcatcagctgtgcctttcatgttgccttgtgcagccctgtgtaacctcctctgtgcctttcccatggagcactgtgtcatatcacaagtagaactacaagaagatatttctcctcagggcagaggctgggtcttccgattgaatctcccttctttcttcattgagatcctcttcttctggaagctggtttcacatggtggcttagatttttccatctttgtatctagcaccatttgaaatcagtgttttaggagtaagaattgcagcacagccaagggtggactgcagaggaactgctgctcatggaactggctcctctcctcttgccacttgagtctgttcgagaagtccagggaagaacttgaagagcaaaatacactcttgagtttgttgggttttgggagaggtgacagtagagaagggggttgtgtttaaaataaacacagtggcttgagcaggggcagaggttgtgatgctatttctgttgactcctagcagccatcaccagcatgaatgtgttcgtagggcctttgagtgtggcgattgtcatattctgttggataacaatgtattgggtgtcgattgtcatggggcaggggagagggcagtacacctggactgtcgaggtgcagaccctgggagcaccactggcccatctcttacacaggctgaccgatttctcctggtgttcagagtctgtttttgtctagcaccatttgaaatcggttatgatgtagggggaaaagcagcagcctcgaagcctcatgccaactctgggcagcagcagcctgtggtttcctggaagatggatgggcagagaatagggaaggaagatcatgcttttccctactaacttctgtaactgcatgtatgatacattattgcagaggtaagagatagtttaatggatttttaaaaacaaattactataatttatctgatgttctctagttgcattttgctgaaatgtagtgctgttctaaattctgtaaattgattgctgttgaattatctttctgttgagaagagtctattcatgcatcctgaccttaataaatactatgttcagttta

SEQ ID NO: 155979 - DNA, 708 bp, Homo sapiens
caggctgctgcctagaatgacaggaagctggactgccctttcagtttatacatgcaatggcctgggactgtctcttgagggcaagacattccccttttacaaaagagccttccccaggcccctctctcaccaagatgagctcttccttgctgccaggagccctgaaatcagcattcccagaggaaagaagatggccatctgggcttggcttccggctccccccatctggctggaacacacatcagtcacgtaagtagctgtgactcagcacccagcactgccttggcagaaccttcccacgttctggatttgcacacactgtggtagcgcagcacaagcaagcagggttaggtaactggggaccagtgtctgtttgttcagtgggtttgcctatggatttcagaaagaaggattccctcaccttcccattttcctggaagatggatgggcagagaatagggaaggaagatcatgcttttccctactaacttctgtaactgcatgtatgatacattattgcagaggtaagagatagtttaatggatttttaaaaacaaattactataatttatctgatgttctctagttgcattttgctgaaatgtagtgctgttctaaattctgtaaattgattgctgttgaattatctttctgttgagaagagtctattcatgcatcctgaccttaataaatactatgttcagttta

SEQ ID NO: 155980 - DNA, 366 bp, Homo sapiens
aggggtggactgagtgaatggtgcaccattccctgtgggtcattcgaaacaagctgcctgtctttcaagaatctgaaagatgctgcctgacaaagcaggaccgtggcactggatgtccgtgagggtgcctgaagaaaagtggaaataagctggtttcacttaggcaaagggcaagcccactgagctttcttacagcaaattagaagcttaagcccaggaaccagaatgaacatcactgtgatcatgactggcagcacatgattctgccatcatacccttttcgttcccaaactcaaagagatgcatctggccaggtgcggtggcttatgcctataatcccagcactttgggaggccgaggcgggtg

SEQ ID NO: 155981 - DNA, 214 bp, Homo sapiens
tggcccagggttccttttgagagggaactgaggccctgtccgattcctgagccatgggcccctggagcccaccaggcctcagttcttcgtcattgaacactcagccagcttagggctgggaaagcagtttcgacaacgacttgctccctggtcagattgacacagctgagaggggagaatcggggctctcgacataggtgagcctggcttggaa

SEQ ID NO: 155982 - DNA, 529 bp, Homo sapiens
ctgtgtctgtgtgtgtggtatgtgtgagtgtgtgctttgtatgtatgtatggtgtagtgtctgtagatgtgtgtagcgtgatgtgtatgtaagtgcatgggtatgtgtatgacatctgtggggtgtgtgtgcgtatgtgcatgtgagtgtgcgtttatgggcatttggcatgtgtggctggaaaaggagacagtgagaagccgcaggagtgagcaggatctccaccgcactcccggggctccgggtgctggttaaagggtagtagagaggtgccttcctcttgccctcacaactgcctcaccatcctcactctgtagggaggatacagagcacaatgaggtctgccatacgcccaggtaagcatgcatacctgggcgtatgcccttttcctaacactcacaacaaaactaactaatactaacatctcagacgctcaggaaatagaaaccgtctgaactatcctgcccgccatcatcctagtcctcatcgcccttccatccctacgcatcctttacataacagacgaggt

SEQ ID NO: 155983 - DNA, 267 bp, Homo sapiens
gaggcagttttaagttgaaaattatgaagaactcccaaaaatcagttgccccgtgatgccttaagccagatgtgcctatcgttggaaactttcaaacgtacatcagataaaatattctctcatattaagtggaaaactggaaaagaaaatcccttaggtactttccagtactaaatgttctattaagttattgaattttgagatagaatcaaagtaaaattaaacagcttgccttgccctattactatccatcctcatcctagcaat

SEQ ID NO: 155984 - DNA, 138 bp, Homo sapiens
aggcatctgcagctacctgtcccaggcaccccagagtctctcggggtatgctgatgatggtgacaggctcaagttgaagctgcaggaggaactttttgctgcttttaagcagcccaggcctgggacaggttcagacag

SEQ ID NO: 155985 - DNA, 204 bp, Homo sapiens
agaatcgcttgaacccaggacgcggaggctacagcgagccgtgattgtgccactgcataccagcctgggcaatagagcaagactctgtctcaaaataaaaaaaaaaaaaaaagaccatatatccaagggcccactcagcagagacatcaggtatatcacaaagtaggaaaataaagtgttagtaggaaaagaagttgtcagatg

SEQ ID NO: 155986 - DNA, 516 bp, Homo sapiens
attattcattgggccccctcaaatgccacaaggacccagctgagaactgggaaacacagcagggcctgcatgagcacagaccaccctctccgagcctgtttcctctaaagtaatcctgccctggctgactatgcccagggttgttgtagaattaaatgagaagacagatgtaaaagacctacgaaaactggaaagaactcaaatctacaacaatgtcagtactgctaatatcaatattgttactaaaattaaccacaatgaccagcaccccgtttacatgaaccagctccacagacacaggaaaaatataaaattgaactcttcgcacaattcctgggtttcctgcattggcaatagtgtggagacttcacggcagccagttgctcaagtgtaattttatttcctagccttggacaagcacggctacaaaacaccacccagacaaagcccttgaccacaatccccgaagggttgactaacagacttgttcttttcggcttaaaggacctctttatt

SEQ ID NO: 155987 - DNA, 422 bp, Homo sapiens
ctgttaggggtaggatcgggggagggaaagcatcaggaagaatagctaatggatgctgggtttaatacctaggtgatggaatgatcagtgcagcaaatcatcatggcacacgtttacctatgtaacaaacctgcacatcctgcacatgtaaccctgaagttaaaataaaagttgaaggaaaaatgtaaagatttatgagtcccacttgagacctactgacttagaatactgttgggcaggaccataaaacagtatttatttttagtgccctgggtgattctgccatttagacgggtaagaactcctcaccaaagccgggcacggtggctcacgcctgtaatcccagcactttgggaggccgaggcgggcagatcacgaggtcaggagatcaagaccagcctgaccaacgtggtgaaaccctg

SEQ ID NO: 155988 - DNA, 406 bp, Homo sapiens
aatttatacctcaggaccctcaaaaatctcaagagtggctgacccaagtgtcttcagaaagggatgcaaagatggggataaaaacagatagattcgttgcaaatgaaataagcagttaggtccccagatctcttccctgactcagtgcagcaaatgactccctctccaactgcggagtaagaatgaggttttcccctctggggaagataaaacaatctttggacggtaggcagagttgaggattagaggagcatcatactgataacagggagactgcataaaaatacatatagcggaagttgagacctctccagcctttttacagttggatttcaggaatactattattacaagatataaagactcaaacagttctctctaggcatcagcccaggaagaaatatct

SEQ ID NO: 155989 - DNA, 368 bp, Homo sapiens
ttaataccagagatatgaggggaaatttctagtagcttgaattactaaaatgatcctctgaaagattaataaattgtattttggtgtactttgtgtagaaggctatttgttaaataccagttcaaggtaaaaggatgtttaattaaagcttcatattcatgagaatttaacaaaacaatcagccaaattgttttactgtagttgtgcagcagttaactgaaacttacataacgtttaaggctttttaccccaacttcagaccctctgaaacaaactccacttggtttaacctcaaaaatactgctttagacaatttttttaacttctgaagagcaagaagcaaattttatgatatcggttttgcaaat

SEQ ID NO: 155990 - DNA, 300 bp, Homo sapiens
atctatgacatatagaactggggtctgtcaaccacttattttgcttgatgatgaaaggttaacaggggcaaagggaagcaggaaccaagagaagtgggtgttcacggaccatcccccatgaatggcgccaggtggaacacaagttcattctaccccgtagatcttgtccttgccttgcctgcattctttctagtgtctcatgggccagagcccttgagcatcttgccttcttaatcttcctttctaaacattcttgaatcagtcttctcgcccgccccaacacttcccacagtccagact

SEQ ID NO: 155991 - DNA, 571 bp, Homo sapiens
tgttccctcgccgcaccgccggttcaaagaggaggagcaccccaatgagaacttcatggcatctgtgaattctttgtgcagtatcttccattgattaatcagacttcctagtgtatttcagactgattctcttctaaattcacaataaattgatgacttaactaattatatttgcaaagactctatttccaaagaaagacacattctgaggttccatgctgacatgaattttgggggtgatgctattcaacttactacactctgtaaccagtgatgtacatcacttacatatttgatctcaacctaggagtctattgtcccttacatattttatgtagacgaatgactgacataaatatttttggaaaactaaacatcaaggttgatagattttatcagattttatctgtggttaaaattcatgagccatgaatctggtcaaatgtctatgagtttgattgaatactcctgaaaggcaaaccacggtataaatccaggaaatacatagtataaatccaggataggcttcatccgtgttttgaaccgcgtgcgcgtggggatcctctaggct

SEQ ID NO: 155992 - DNA, 461 bp, Homo sapiens
catgatgacaatatcaaattgtaaattttgtgcaacactgttttgctgatcattgttttatctgtcaattaatgagaagtttatttatttattttccttacagataagagtctcacctattgcccagactggagtgtagtgttgcaatcatagctcactgttatcttgaactcctaggatcaagccatcttcttgcctcagtctcccaagcagctaggactacaggtatgcaccactatgcctggctattttttgtttgtttgtttgtttgttttgtagaaatggtttcaccttgtgcccaggctagccttgaacttctggcttcaaacaatactcctggctcagctgcccaaagtgctgggaatactggcatgagccaccacgccctgcctagaaatatttttaaatctcccactatagtgatagatttctccaattacctctgcggttctaatgagtaa

SEQ ID NO: 155993 - DNA, 322 bp, Homo sapiens
aacattttttgagtgcctactgtttttttgagacactgtgctgagtatcgtttcaagacagaggtgaagccacacttggctcagctgcttttgccctcagagagcttatttcttgtctcttagtgactctcgcatgactcagaactgaggcgatgggatactggggtatgacagaggtatgggactggaagtagtacgtagtgctgcagcctgtgccttaatattttctgtgcttccataagttctttctgttaatgggaaaaatcagctgacttcattcagaatttgcagagtatttgctgtatcactagagcaaccatag

SEQ ID NO: 155994 - DNA, 372 bp, Homo sapiens
agtctcacttagttgcccaggctggagtgcagtggtgcgatctcggctcactgaaacctctgcctcccaagttcagatattactcctgcctcagtctccctagtagctgagactacaggcatatgccagtatgcctggctaatttttgtattgaaatgggatttagccttgttggccaggctagttttgaactcctgacctcaagtgatctgcctgcctcagcctccaaaagtgctgggattacaggcatgtgctgccatgcccggcctcttttctataggaatcttgtgagtcctgagttgtgaaatcgtttctacatagtggacatatgtttgtcttttctggagatctaaggactttcaatgatcctag

SEQ ID NO: 155995 - DNA, 324 bp, Homo sapiens
gtggccttttggatgccaagcactgtgctagaggctgccgaaagaaacagacacagcctttgcctacatgagtctactgccaggtgcactggctgtcccagaggaggtgaggggcactcaggaagaggagggggagcttacttggttcgggagatcagggaaggcctccctgaagaagagactggaagaatgataggaattcgccaaataattggaagtggaggggcaatgagaatgttcccagcaaagggacagcatgggctatgaggcaggaagagctgggtgattcgagtgaagggaagggagtgttggaaggaatgagag

SEQ ID NO: 155996 - DNA, 322 bp, Homo sapiens
catcagcttcctagagggaacaccagaatttgggttttcccaaatgtgtttggcatggactaaatgactcaacaacaccacactctacacctctctgttgttccttgcctttaaacatacgagatgccaggtgtggtggctcatgtctgtaatcccagcactttgggaagctgaggcaggtggatcacttgaggtcaggagtttgagaccagcctggccaagatggcaaaatcctatctctactaaaaatacaaaaattagctgagcatggtggtgaatgcctgtaatcccagctactccagaggctgagccaggagaatca

SEQ ID NO: 155997 - DNA, 659 bp, Homo sapiens
cagtccagattgcaggtaataataaaatctcaaaatcaaacaagaaaaatttcagtgagctggaaactagtaacgggtatgctatagtaagaccaatttatttataaaatacgttttagtcttattaaccttggcctgattatttgtttaaagtgcaacaaggataatgattagtcatataggccataagttgactttgctgtaactttttcatatgaaatttcatattagacttttgaaaatcacttaaggtttagagccaagccaaagactgtgtctataataccagtctgaattgagtaaatttctttcttctcaaggtccttaaaatatgttgaggttcttgggggcctgtcagaaagtgacataatttacttatcacaacaaggtcgggaattttttaagggaactgtgtaggcaaggtacctgggccagtctttttccaagtctgttggtgttataaagtcagtcccagtgcttcaaagcagactggtcacattttaaaatatgtctttctagtcaaagcctgggtaaaataaccagtgtcttcaattgtgtcctgttacaaaataaaacagattgttattgaacttacacaaataactatattgctataaaataagaatatttataaataacttccaaattctggagagagc

SEQ ID NO: 155998 - DNA, 380 bp, Homo sapiens
tatttaaagacaggttttcactccattacccaggccggagtgcagtggtgcagtcattgcccactgcatccttgaactcctgggccccagtgatccctacctctggcctcccagagtgttggggttacaggcatgagccactgcacctagcctacttgttatatttaaatatttgtttcgtctacaatttattttggtatttggtttccaactttactaagtttttaaccattgtcaatatcacgtagttgaataaatcatcttttccctgatgatttgaaatgacttgtttattacgtatcagtagcttcccaaaacttaggcagtggatcttaaccaggaatgtgcatcagaatcatatacgggggaaaaaatcatat

SEQ ID NO: 155999 - DNA, 680 bp, Homo sapiens
gagaccactcaagaatttttgacagaggaatggcatgatgattttagaccaatcttccaggaagctttcaggacagtgaaccatacggcaaagttgcactgcttttggctacagcctcctagtgtcaaccaagacaaacttttatcaatagcatatgaatatttagtcacttgttcctaacttgaagaagggaaaagaactattgctcagtatcatgaggggaactgggagagtggccttgctgagtccagaagaaaagcctcccttcatttcaatcccaggctctcaacagcagaatcaaaagataagcaaggggagaccatcttctcactcaatactagagcatacttctctcccctcaattcaggctctcctccccgggagggtcaggctttgttctaagcaaacaatctgtctctgagccaggctggtgtaatggttaagaacataggatttggaccaggccaggactatgtgaccttgggcatgttattcaacttctctgtgcttcaggatcctcccctatacaattcagcagagtaggtgatagaaataaaatgcttaactacagtggctattacaaggcctatgacatagtatgagtgcaatatatgacagttattatttttaaactaccaattactgtatattctagttttattccttgaatcctgtggata

SEQ ID NO: 156000 - DNA, 790 bp, Homo sapiens
agtgcttttaacaagcaaatgcttacttcatttatatttgtccttatcagtatcagttttgctagcttacctttttgcatgttagattttcttaaagggagaattacagctgtgacacgagagtggttagcattgaatggacagtctaagaattttgttcagaaggtttggattctggtcagagagcctggagatataatttctattcttatgtatgataagggaggtagtcctatctgttcgtttgccatttccaagttcttcatctagttaatatgaacagctttaaaaattagggctttaaagtaaaacagccttatataattattggcctctctctctcttcctttgtctctccctctcttccttttttacctccctccctccctctcgcttccctatccccaaaccctgtgtcccctccccagtctcctgacactgtctctttctttctctcatcagtatagatggtggtaggaaaaatgtttatatctaaattgatcagtaattgtaaatatgcagtatactgcataagttaaccctgagatgtgtttaactgagttttatctcagtttctccctggcaggtggtgctcatttaatagagaactcaaaaaagtagcctgtgttcagtccctaatagaccattgttgatgtcatagaataatttttttttctatatactatcatatggtcaggtaagcatttttagagaatgagttagaatttcatgaagactgggtttaggttaaaatacattcatctgggccaggtgcagtggctctcgcctg

SEQ ID NO: 156001 - DNA, 232 bp, Homo sapiens
gacgtgagccaccacgcccggcctctgccaatttttatatgtgatttgatcatctcagaggggccaaacacagctgcagattagctgtttgcagccactttattgtaagtcttaacatggtgtccttctgtgaaccacagtgattcttctcattcactcaccaggaagaatgtctaaacgttcactgcatacccagtagtggcattcagtatttatccatacatccacacct

SEQ ID NO: 156002 - DNA, 346 bp, Homo sapiens
gggccaggagatgtaagccattgggaggggtaggataatggcgaaggtaagactggaggggaaacggagactcttattagctttccacagcttgattctcagaccaatcggaatccatgcaagagcttaaacaggggagacagcagaaaggtgtactgtcagatctgcaaattagaaagatcgctctggacgctggtggagtgaattggagagggagaagatggaggcatggaagttattgaagagcctgccaaagtagtccagatgagaaatactgtatcttgggttaccagaggtaggagagatgaaaagaagcagaaacatttattgaatacaatcaagaaga

SEQ ID NO: 156003 - DNA, 251 bp, Homo sapiens
agatcctcagcaagaacccaacgtcttggtcacttttatttctcctagaacaattcccaacacatagacggtgtcaataaacagttcttcatttaaaaaaaacacaaaactggctggcatggtgtctcacgcctgtaatcccagcactttgggaggccaaggcaggcagatcacgaggtcaggcgttcgagaccagcctggccaatgttggtgaaactccatctctactaaagatacaaaaaattagctgg

SEQ ID NO: 156004 - DNA, 354 bp, Homo sapiens
tgtgtgagcagattgtaccttgaaggaatttagaatcttcatgcagaagataagcaatatgcatatcaaaagaatggggcaggaggacaaagattactaaggcctaaaatggtttaggaaggctttgaaaagggaaatggaagtgttatggagtcttcctgggcaacagcaatcaaaggggaagcttgggtaagagaaaaaacagaaagccctgtacataagagcacaagtgaatagtgaacagtgagctctgctcagggagagatgagtagttaatctggtgaggtagctggttcaagtatggactggaaggtagtaaattttaaaaactgaacagaaatataaagaatctta

SEQ ID NO: 156005 - DNA, 457 bp, Homo sapiens
ccaccaactggtcctgtggccccatatagaagcagactccctggctcaacaaactatcctgaaaaaaaccctagcctccaaattttcagagagattgatgtgagtgtttgatttgagggactgattaaactctttattgcaatgctatggtctcagtgaattgattttgtctgtgcagtgggcaggaagaacccattaggcagttacactactaactagctacaggattgttaaaaatattaagatttgtaaatgtatctaacccatagaaaaccataatatttattttgccatttctcctaaaagtgaagctattgcttaaatctaaccgaaagaattatccttgggtagttgtgaggagctaagttttccctaggggcaattgctaactcaggaagaggtagctaaaagtataagaagctgatcagaacttccaacaggccaaagggacaaaact

SEQ ID NO: 156006 - DNA, 375 bp, Homo sapiens
cgtctctactaaaaatacaaaaattagccaggtgtggtggcgggcgcctgtaatcccagctactcggaggctgaggcagagaattgcttgaacctaggagatggaggttgcggtgagccgagatcacaccactccagcctggccaacagagcaaaactctgtctcaaaacaaacaaacaaacaaacaattaagcaaaataaaatactactgaagcccaaataatagcaaatgtttactgaagttccattccctaaacaagtctagatgtaaataggatttcttcctatttttatgagtgtgtcccattattaccttctctgaaactttctgcagtcaggctcttatcttatttagaaatttgttttttaggaggg

SEQ ID NO: 156007 - DNA, 441 bp, Homo sapiens
gcaagattttcctcattgtctatattagactcgcactcaaaaagctggtaaatatgtcagccctatagaaagaccattgcagagtgttaattggacttcttagaccaaacagtgtcccttcagattgatatttagacttgaaatttttgagaaaaacttggatttcccaaagcaatataacatatcctagcagatagggatggaaattaggaagtagtacagttataaaatgcaggctttattattatttgtttctttgagacagtctcgctctgtcgcgcccaggctggagtgcagtggcatgatctcggctcactgcaacctccgcttcccaggttcaggcaattctcccgcctcggtctcccaagtagctgggattacagttgcccaccaccacgcccagttaattttttgtatttttagtggagacaaagggaaaca

SEQ ID NO: 156008 - DNA, 351 bp, Homo sapiens
ttctcaagtctgttacaaagagaactttggtttctcaaggtttaagaattaatgtcaaagagcaatttagtgttcgagtcaccagccttgctgtggatgattgctgagtcctcggaggttagggccacagcacaattggtgggccgtctgttccccaccctggtggagactttctcacccaaagaaatgtattctgttagtatgtctcaattagaatattttagtaggagacagttatggctcttgttttaatttgtagtggatgattactgtagcaggatcaaggttgagacttgcagcgtagctcatgtaaagcattgattttaaacacccaaaatatattgccagctt

SEQ ID NO: 156009 - DNA, 229 bp, Homo sapiens
agtgactataaataatgaggcttgtgctcagtaagagcagatgcaggagagaggtgctctgggaaatgcgtcccgcaggaccacaagagctgggttattcgtggggtctaattgcctcaaaaaggagacagcaatttgcagggcctggctgatttcatttaatttgctttaagcaaattctgctgtcatgtcaaactacccaggattccaccacaaacatttccccacc

SEQ ID NO: 156010 - DNA, 474 bp, Homo sapiens
cagtggaatgaagcccgggaggagaggaaggggatagatccagagtatgaggggaggaagacagaagacaggatatcttttccgtggaaagggaggaggatgtgaagatggctactctgacaggtgagcttagaggtatggagaacctgagaaaatgctcaccacatcgactcttttccttgggaagatttggggttgtagtgtgagggtgtagactgtagggacttatgaataggaaagatttgggacagtcaccatggtaagtcacactgaccttttagcacttaacacatgctaatgttattgcccagttccccagcagactttgtggcaccgctagctctcagccaagtacacagcaggtgctccgtaaatgcctgtgggctgcaagagacaggagcagcttggggtgacagcctccaccatgtggattttccagggccaaccagaccaattcatgctcccctgggacag

SEQ ID NO: 156011 - DNA, 149 bp, Homo sapiens
tttgcaatcgtggtctattgtgatcaggaagatggcagctctctgtattcataatccacacagcgatgtcacttccaaatgcacaaagacttcatactcactatctttccacagccggggctaaaaagttggaagatcctatctcagag

SEQ ID NO: 156012 - DNA, 622 bp, Homo sapiens
cggttattggatatgtgaaatatcatactatagcagatatggaggtttgccactcagatcacttcaagaaaggacttcccgcccagcagtggggagtgcagtcaccaggcagcctcctactctcagcttcttcatagtcttagctgcagaaagccacctcactcaagttcacattcttcccagagcagcctgcatcagatgactaagcagagtgtcaggggataggagatagtagggatatggaaactcggtcatttcaacccaatgtaagaccagtctaacaggcaatgcttattctaaagctacctacagaggcttcattgggcttgcactgcatgttagctttttcctctagttgatactgcttctaactcttttccttttacagatactgatctttaacaaacatcttgaacaccagactacatctgagggtctactgtctacttctggagaacacagcctgtaacaatgcaaaaataaattgctcggatcatctgataatgacaggctattaaataatttggaacactgagcttccacttttgtacaacttcagattttttttcactgactcaccatttattcatgtattaaataaatatttgagtacctcttatga

SEQ ID NO: 156013 - DNA, 297 bp, Homo sapiens
gtgatgtgtgtgtgtgtgtgtgtgtgtatgtaggggtgaaagactacatcacagtcaggagctctggaagtaatggaatgtctgatgatggccatgagatggggcagatttacctctgtttatcctgccttcctctagaccaccatcgtgaatgtggaagagacattcacataccctcagggggctccttgctgtggtgggatgcagccaatgctctcagtacctctttctactttttattagagagaaataagaagttaggtcattgaaggcggggcacagtggctcaagcctgta

SEQ ID NO: 156014 - DNA, 246 bp, Homo sapiens
aggtccagtttgggagggagcgatgaaactgagcatgatgaactgagggagacagtgaagagggagaaggtagtgaacaagtgaggcacgggttgctcttatggtgctcttgttacttcactctctacatggtgtcttttatgtttctttctctctctttttttttttttttttgagatggagtctcattctgtcgcccaggctggagttcagtggcgcaatctcagctcaccacaacctccacct

SEQ ID NO: 156015 - DNA, 907 bp, Homo sapiens
gaatgtggcaaaagttttaatcacaaatcaagccttgcatatcatcatagacttcatactggagagaaaccttacaagtgtaatgaatgtggcaaggtttttaggacacagtcacaacttgcatgtcatcatagacttcatactggagagaaaccttacaaatgtgaagaatgtgacaaagttttcaatatcaaatcacaccttgaaatacataggagagttcatactggagagaaaccatacaaatgtagggtttgcgacaaggcttttgggcgtgattcataccttgcacaacatcagagagttcacactggagagaaaccatacaaatgtaaggtttgtgacaaggctttcaagtgttactcacacctggcacaacatactagaattcatactggagagaaacctttcaagtgtagtgagtgtggcaaagcctttcgtgcacagtcaacacttattcaccatcaggcaatccatggtgtagggaaacttgactaatgtaatgattgtcaccaagtcttcagtaacgctacaaccattgcaaatcattgaagaatccataatgaatagagatcttacaagtgtagtaaatgtggcaaatttttcagacatcgttcatacgctgtagttcatgggtgaactcatactggagagaaaccttacaaatgtcatgattgaggcaaggtcttcagtcaagcttcatcctatgcaaaacaggagaattcatacaggagagaaacctcacaagtgtgatgattgtgagcaaagcctttacttcacgttcacacctcattagacatcaaagaatccatactggacagaaatcttacaaatgtcatcagtgtggcaaggtcttcagtctgagatcactccttgcagaatatcagaaaatttatttttgagataa

SEQ ID NO: 156016 - DNA, 356 bp, Homo sapiens
ggttgaaccctaggtctcccacttactgtggaatttacagacaagtttgttagctatgccaagcctctgtttcctcattaaaatggggacaataatctctacttcacagctgctgaggacctgggacctgatgcagagacatccactgcatagggtacatctcagttgtgtcaggcccctccccctggccactcccctgccttcgggctggtccacggtgtttctgcgagagtgggcccagcacacctggttcaggtgccttgcctccaacaaggaccacacctggaggcatcattgcgccttccttccctctaacctgggctttctcagcggagtcccatcagccttgtgagtgg

SEQ ID NO: 156017 - DNA, 712 bp, Homo sapiens
cacatgtatgaataatatgtatcttgtggttactgttttgcttcaggagatttgagttttatttttgaaacttctcattattggcctttcatctgtgattcttatatgctttacctgaagcataaatgattgtctaagatatagctcagaagaccttggtgtaaacagttgaattgtccctgtccaagaccaactgacactcatacttagctcactctagtataaattatatttcactgatgaaaagtaaataaatacatcagtatacaagtcaagttgatctctttcctgccaaaaaagcccatgtctagttttttaatttctttcttttgtagatgaaaataccaaaataagtttttgtgaaaaagctttatatttcaaactatcacttcttcatagaaatgctagattatttttatgtgcatcccaaattcgttttgatctcatgggagaagaaggaggttaaaaaataataccctttaaatttttaagagtaattggtattaatttcagttgagaacaaatttgattttaccaaggtagaacttttatcaaagtgtgaccgttcctgccaatcttcagtgatattcttcaactttgatgttttggtaatattttcactactaaccaggaaattgctaggttttctgtaaggttacttttggtcctagaaagctatttccacctactagagaggcatatgggttttctt

SEQ ID NO: 156018 - DNA, 264 bp, Homo sapiens
ttctctactggcttcttcctctcagcctaggaatttactcaagtatcttctgccctcagtacagcctctctctcatacttaattgcccaaatatctctctttccctttaccccaaaacttctctaagaatagtataaataactgtctctgcactcttcactcttccataatctggatttcaccccctactgctctggcaaaggtgaccagtaatcttattatcaaatccaatggtcaaacctcagtccccattctatctgactt

SEQ ID NO: 156019 - DNA, 606 bp, Homo sapiens
taaagtaggggtaatcacattgacctacttacagtgggttgcaaggaaggttctgttctgttgtgtttttctgtcttctttaaaggtattgtgttggtatcatataaattagacttaaaaaaaattagtcgttggtgtgtacagcacctgtcatttagagatgcaagaatctgtaagcaataccatctaatccagtaaatgttgtcctctctgttatgctttcatgaagatccacccatcttctcgaacaacctacagggtggaacagcaggacattcaggcctagttaaaaagatcttctggctacctgtccttgggttgctgattgcatctgaatgtgatggtggagctaaggaagtatatctgggcaataacttgcccttggtggtcacactgtgtcagttcatcactataagagaaaggcagaaaagctaagccgaaaagctccatccccacgagaagctggtttgcatggctggaccagtgaggatgtcaagacagctctattgtgggttggctgctggatccaactccaccacttctgagcctttgagttataacatcaagcacaaacaaccaggcttattttcccagccaaagtcacat

SEQ ID NO: 156020 - DNA, 513 bp, Homo sapiens
tggatggcttagcagactgctgtgtttgttatggctggctagtgtgtatgccaatattcatgcatgctcaggcactgcgtggaaaaaaagtctgttgtgtattctcagcgagggcagcccactaaaacacagcaccttgggagtgctggggaggcccagagagtggagctcagcagctcccattcaggctctcaacaaagcagctctactttcaaacagctgataaaacttaaagttcttagtaaatctttatttttaagagtgtctgctatttaaacacacacacacacacacacacacacatatacgcacgcacacaccacacaaaatcaactaaatgagctctaggaaaatcctaatttatatggtccttatttccctaagttcactgtagaaaaaacaagccctgtgttcaagaaatggccaatagtagcatgcctctgagcagaacctggaggcagaggtctctcactttgagataaaccagatgatacacacaggtttagctttctt

SEQ ID NO: 156021 - DNA, 444 bp, Homo sapiens
cccggggcagtagctgcctgccccaccacctacagctgtcctgcaccccaacttcccacggtcagtggcctctccaatactgtggccctcagttcccaattccttctccagagtggccattagcgacatcatcatacaccctaacccaggccagctagccaggactcaccagcagacaagaagatgttccccacgctgctctggcggaaacgcagctgctcaataatatggtgaaaatgggctgggaaaaaggtgacaatcacatcacagtcattcctcccagcctcccttctaggactgcccctcacctcaagcccccttctgagctctcatgctgaaaacacaccaggactaatctggccagactcaccaactccaaaaaagagcgggcaggtgaacacagcagggcccaggcccatgcacggtgctaacatgggcagcata

SEQ ID NO: 156022 - DNA, 3490 bp, Homo sapiens
  misc_feature (2109)..(2109): n is a, c, g, or t
  misc_feature (2115)..(2115): n is a, c, g, or t
  misc_feature (2122)..(2122): n is a, c, g, or t
  misc_feature (2124)..(2124): n is a, c, g, or t
  misc_feature (2131)..(2131): n is a, c, g, or t
  misc_feature (2134)..(2134): n is a, c, g, or t
  misc_feature (2167)..(2167): n is a, c, g, or t
  misc_feature (2190)..(2190): n is a, c, g, or t
gaattataagcaggattaacgtagattaaagttgacagaatctggttcttgctctgtccctttcccatggtggccagccccagctgcccagctgctgttgtctgtaagccaaagctcctgcgtgttctccttccaatagaaaacgactgtgcggaacctcatcctccccgggcccagggtgttggtgcagctgctgagggatctggtgaggtagcctatgctcatgtgccactggagatgcccggagagttccaatgcccaggccataccagcagctccctgggtgatgtccccttggacttagtttcactctgaagctgggaagcaatagcctacattttcagttaaataaaagctggaaatgatgatctcgttaggcctgcctcctgtacttcatgctttggtgctctccttcattttcctgccaggaagactttcccagtgcctctttctatatgcttgcatcccgttctcaagtctctgaccagcggttccactttgaagtccatcccacagaagtattagctcaaggctgcaaagatacaggaatgagaacgcttgctgcaacgctgctcataacagggagaccaggaaaataacccaaagggccattcacacaccaggtttttgagatgaatgacatcatgagcaactcatgagcatgagcaccaggcgtgcctcaccatcttggctccttgttgataacgtgtcagtccctaatatccagcctgactccaaggactgagatgatgagtgtgaaagtactttgtaaattgcaaatggttttgcaaacctaagggatatgatgaatcaacaatgagcaaagtcctttgagacctttcacaaataaaggcattttatatatttaaatccttggcactcacaaatttagcatttgaggttttgccaacctgtggagcaaccccatggcaatttgccatttagctgaggcatatattttcctccatccacaacctgagtatctcagacgaggatgaggagtgagtgaatgaaggagaaatgttaaaatatgattacattatagagtctttaaatgctcattaaaacatatattcgttcagtatcttttatgctttcattaatgtgccctaggctattgagaaagaaagagtaagacaaaaaggtgaaaactagaaatattctatgtaatggaaaagaccataaatatactcataaaacaattagtgagcacagaaatatacaatcaggtaatctataataatgtacatgtaataatctacaacagattttttcccttattttggattctgagaagtgagcactaacatattgcaaagggatttaattgcaaatgatttgtgtaaacctggtgccatagaaaaacttctggggttgaatttaattttatcgcatttaaatagaaaaatgcccacctgagaatatgcagctgtaattacgagggagttttattggttgttactgtggcatgtgtttatttctctcccacttaacattctggatggagggagttcaaggctgctgtgtagctctgcagttgtctggttttcctgctctgccatccttagggtatggccttggtctgtcctcatccttatgggcccccagtgaagctctgatcaagacctcctaattttgaatgtcctagaacttgaatacaccccttccacttatgtcacacggccacatctaaactacatggtaggctgggaatgaattttttattctgggtaactgtgtgtccaataaaaagcccgagattttataactcaaggaaaggaagcacagctcacaattgctgccacaggtcagcctctgtctgtccatgagccagttgttcagatgggaggaaatctgaatagaggaagagacaagtcaggcaagaaagttgtgactcagggtttatctcatctgctggggagttcaaggggcagtttaatactggctgtatttttcgtttctctaagtagaagtttcatttaagttactgtggaataggctgggcgtggtggctcatggctgtaatcctagcactttgggaggctgaggtgggcggatcacttgagctcaggagttcgagaccagcctgggcaacatggcaaaactccntctctnctaaaantncaaaaanttngccgggcatggtggtgtgtgcttgtagtcccanctactcagaaggccgaggtgggnggattgcttgatcccgggaggcagaggttgcagtgagctgagatcatgccactgccctccaacctgggcgacagagtgaaaccccatctcgatagataaataaataataaataaattgtggaatgatcttctttgacattctgctagatatgaaggctgcttagaggcagttgtttgagaaagaaaaaagcaagccctgacctccaggaactggtgacagtggacgctatacaccactcgttcacagtgttgctcgacgctggtcaggtgctcacagctcggccatgttgtcttcctgttggccataagccgactcacagagcactgaccttggacaaggtcatggtgaaaccatggtaaatagagacaaagcaaagccacttcatatttttttctgagcacagacacaaaaaagtttcctgtaggacccataattttgattatgacagggtaaagacaagttccattttctaggatttgatttgagccaaggtcaatgaatagcttattttgtagcttaattgacaacagtaaatacttttgcagtcttaggtcccgcttgatctgtactagggagggtaatttgaaccaagagcctgattcccgggcatttctgccctaaccagatcacgggctaaggatgcaacagagcatagtttcagcagagcccccttgaaaaaaaagttatgctgaatccatgatgcaacatccatttgaaatgaggaaaaagaaggcaaagatgacatgatttattttgtgtcatacctaaataattagaagaaagcccctttttctagtagcacctataaaaatttcactgggctttggaggtctaaagggaaattctagcacatatttcagctccagttaatccaaggttaccatcatctcagttttgtgaagagatggaagaagccaactgaaacagtagcgtaggaacccagccctgccttttgctttatatgtgaccttggccacgtacctgaccttcacctttctcatatagaaaaagaaaataggcgggccgcagtggctcacgcctgtaatcgcagcactgtgggaggccaaggcagatgactcacctgaggtcaggagtttgagaccagcttgaccaacatggtgaaacctcatctctactaaaaatacaaaaattggctaggcgtggcggtgtgtgcctgtaatcccagctactagagagactaacgcaggagaatcgcttgggcccgggaggcagaggttgcagtgagccaagattgcgccgttgcactccagcctgggtgacaagagcgaaactccctct

SEQ ID NO: 156023 - DNA, 976 bp, Homo sapiens
ttgacattgagtgtgtctgcattgttgaagtcactcagcatgttgccatgcgtttatccacttaggtcaacgttaagggaagttcatcgcctctgcttcttcagtaactgatgtctggtgcatcaactgaatgcatttcaggcttttcagcagttcccccagatctatgggtaaaaaaaggttttcaccatgcccacctccccagtgagtgaccaatgtctcattgttaatgcatctgatgcacagagtttagtggtctgagggaggtcagtcgccaagcggagattgaaatcacatttgtatttacattattacttttctacagtttggtttgttgcaggctttcacactactaatctgggctgaatccttgaattactttgtctaccaagggtttcaaagaacttgataaacttgttctaattagccaacatattcatccatgttgtccgtataccaggtgtaaaaataaaacgtttcttaatgcacacaggacatggaaggcaatctacacattttcaggtgtagactttgcttgtgactcttttgtgaggaatagtcattgttattttaggaaaaccctgagtttatccaactcttgttagaattggataagtgtaaaaacctacaatagaatgcaagtgtgagagccaattcctctggtaaaataaactcatattattatttatatatgtctggtcattgtattaataaaatcagtttgttttggctgaaacacatggttggcctttacaatagatgtgaaaatgggcttatagatcattgctctttattgtgaatattaggttgtatttattgccaaactctttcaacagcttctaagcagtgaattttcagtgcattgttgttgttctccaagtacaagcagccacttcagttttaccacattcatcttccacacactgatgaaccatatggaggcagcaggaattgaagtagaaccagagggagtagt

SEQ ID NO: 156024 - DNA, 277 bp, Homo sapiens
ttctcttgcagactgctctcgtctctgtgacctgcgttggcaacggttcgttgcttggagaccccttggcgtcccaggctcaagtgatcctcccgcctctgcttcccaaagttttggggttataggcatgagccaccggagccatcaaatccctgtgcttcttacagacaccagaaaaagtttcagccttgttttcaacattgttctgctgtgctttgtccaaatgaacctttatgagctgcctgccatccagtttctcttgcccacaatttcactt

SEQ ID NO: 156025 - DNA, 524 bp, Homo sapiens
ataaactctggacactatataaattatacaaatatgttaaaaattattgaaagtaaataaaagacacttgccaatttagaagctaaaaatggcattggaagttaaggactggtaaagctgtctccagtcctgcccaggggagaaggacattttgaccagggcacctatgaatacaatctcttaggccaaggcatctctagagtggagaaaggaaactttcagttgttgtctggtgagaatacccctcagaatcactccaagccacctacatattaactggttcccacacagaagaaaatgtaatgcctggctggtattttgagaagccagcttggcaggtgagttccatgctgcaaataaagtcttcagcttcagaccctcatcaagtctaaatttgattgttagaattagatgtcagcttgataaaatccatcatctaaaatgcaaaagccagcctgagcaacgtggcgaaaccctgtctctaccaaaaatacaaaaattggccgggtgtggtggtggcatgt

SEQ ID NO: 156026 - DNA, 410 bp, Homo sapiens
tggaaaaatattgaagttattaataactttgacttcaccaagtagattccaccttataaagatgttagccactctgcttcataaaatcaccatttgttataggagtctcctctgtgactctactgataaaactaggcctctctgttatatacaacatttcagtctcattttctgaatgaattttctaagtatggaaatcgtaccagtatttctaataaaaggatcactaactcttttctcagaaccagaaatgctgcatctgatataactagttattagctgccaagtgaaatatagaactaatattttagataggctcaggaggcactctatctcactggtaaacaaaataagccatcactataatgactcaaggaaacactattgttttttatgttaaggcaagcagg

SEQ ID NO: 156027 - DNA, 175 bp, Homo sapiens
ccgccaaccccctctcacccacaaaccccctctcacccacaaacccctctcacccacaaacctgccaaagtcgctcccttctcagggcctttgcacagctgtgccctctgcctggaatgcccttctcctgggtaccaccttagggagcccctcagcccctccctgagcctggccc

SEQ ID NO: 156028 - DNA, 455 bp, Homo sapiens
ggccccaggatcctctattaaatgtgtggtccatgaaccagcagcttcagcatgacctgagagctcataacctcgtctctacaaaaaatacaaaaaaagttagccaggcatggtggtacacgcctatggtctcagcaacttgggaggctgaggccaagtctcgccacatggcatcatttcctcctcacctgcagaatcgctgtgacttatggctcctctgattgcacctgctttcaccagcagccctggaagagagctcttctgtgtggataagagttgagagatcttggtttcattacttgtttaaattggaccctctcaaatgaatgtaagcacataatggggggactacactatgagattaaaaggaatccagctgttaccagaaatgggtgcctgccaggtttatccaccaaattctttccacttcatgtcattaaaataaaatttgagtt

SEQ ID NO: 156029 - DNA, 879 bp, Homo sapiens
gccactcgaccggatatgatcaggatcttgtcagcagcccttcatgtagtgctaaggagggatatgtctctgaatcgaagactttatgcatggcttcttggacccagaagcacaagacacagtaatcctgaagaacatgccacttactatttcactaccttttcaaaagaattattagtccaggcaatggtgggaatcttacaagtgaatggatttggagaagagaacactctaatgcaggatctaaagccttttcgcattttaatcagtttactggacaaacctgagctaggacctgtaattctagaagatgtcctgctgcaagtgtctagccccattatcattctcaatgcacaagcagcagcttggatctctcacaactgcaaccacccttcagcacggatcctgctccgttcagccggtggattcctcccaaacaattccactgttgacatgaagaccaatcactatcgtctcacttcaatataaactgtgacgtgtaatcaccttgggcatcctactccctatgcagtccggtccttaataaggtacacgctgattactactagtcacacgctgatttaatcctgaaatactagtagtgcttgacaggggctccctatattcaggacactgtgctcaatggtgccaaacgacaggaggaggacctacgcactacgcctaaagcgttgcccttgacaccaccaccgtctcctccctgcgccactcacgcactagggcctcaccgcaccatgggttcgggcgcggcataacaccacgcatacactgacgaccgccagcaccctcttccaaccggcagcccggcaccaacacactccaaagggacaacatcacacactgcccggacaaacccactcc

SEQ ID NO: 156030 - DNA, 672 bp, Homo sapiens
tcaattggaacttgtattgttcaaggatcaaatgtatatggttatgtccctatttctcttctcccataattttaaataccctctcaagaagatctcatagctttcaattaccatttatattccctcattctaaaaattatgtctttagctcaatattctggacctatatacctcactcactatgagataacttctctgtgatatctcattggtacatcaaactcaaccttttccaaatggaattgatggttttactctcttccttattcctcaaactatttcttattatctgttagtccttttcagtaatttgcctaagccagaaacttgggagtatattatcttagctcttggttgatctttctgctttcactcttctggcttccagttgttttctccatcagattacactgtacagcattgggggaaaactgagggtatttgggagcatctctgtgggccttgatagaaaattatattatattttgttaatgttgcataattataatgaaatacatcgtttgagagaagattaaatactgatttgcataaaattgccaaataaaatctttacaaatttagaataagtttaagctgatatctggatatattttagatatgttatacttgacgtggctatatttatttgttggttgacatttaaaatttttt

SEQ ID NO: 156031 - DNA, 379 bp, Homo sapiens
tcagagcacttatttgcatttttttaacatcttgtctatgtatacctgacagcttactgtgtcactgaattgacaaaataaatgtaataattattttatcagttgttactatgttttaaggtgacgtggaaattagaatttagaactgaagagaattttataactcaccagtgagctaaactatgaaaagaattaggcagtgtgagaaaaatgattctctcccccagggaaatggaaattatagggcatttttatcattttcaagggcttgaagggtatctatcttgcaaagcagaaatagcaatcgggtgttccaagccacctgggggattaggttggttgaagcatgatttcctgaggagtgagtatgtaaatgtaa

SEQ ID NO: 156032 - DNA, 594 bp, Homo sapiens
gtggcacaatctcagctcgctgcaacctccacctcctggttcaagcgactctcctgcctcagcctcccaagtagctgggactataggtgtgcgccaccatgcccagctaatttttgtatttttggtagagatggggttttgccatgttggccaggctggtctcaaagtcctggcctcaagtgatccgcctgccctggccttctgaagtgatgagattacaggcatgagccactgcacccggccaaaaccttgtttatttttatgaataatatgccattgtatgggcatactaatttttgtttattcatcagcggaagggcatttgaattgtttctgtttttcagctataatgaataatgatcaatcctgtgaacatttgtatacagcttctgtgtagacttacgttttcaattacgttgggtatctaggagtggaactgctgggtcacacagtaattctatattaaactttttgaggaacggccaaactgttttctaaagtggctgcaccattttacattcccaccaccagtctgaatgttccaatttctccacatccttgacaacgtgttgttgtctgtcttctattattata

SEQ ID NO: 156033 - DNA, 288 bp, Homo sapiens
gacaagtgaccacgtttcatccagaccaatcccagtcaggagttccgggagcgcagctgtgggaaacagcctacagacgcattggtgctgctccaagggcgggagcagggagcaggggaatggctgtgtgttctgggcctcctggcctcacagcctcctcaccagcagggatcatggatcaagcatgtgtgtgtcagagacgagcagcacagatggaaatgttccctgcccagtccagcagccacagggcacacagggcagcagagcacttgaaaaacggatggtgca

SEQ ID NO: 156034 - DNA, 92 bp, Homo sapiens
caggctgagcagaaggggtatctgaatactgctagacgagaagccagcctggcattcaaagtgacagagaccacccataacaagagtgggtt

SEQ ID NO: 156035 - DNA, 419 bp, Homo sapiens
caaggtaattaaaccacgatttgacagggacatttggcaatgtgatatttcagcattagaactctctttgcaacgcacttcctccacttggcttggtgaatataattcatttttattcttcagagtgtgttgctttgagatctgaaactgtcctctctgaatttcttcatggttcattgtagaacgctagaaaatgattaccattggacgttgtgggaatctagtcagtatctaagaccctatccaaggttcgtccagtagtagtggaatagggtctgtgaccctactgctggcattgtatttgaatattattatgccctatgtgatagtgatagtgcctttggagagaaacatgagttattttcataccactctaatttcagtttctctgttacctggatttacttgacgttgttctc

SEQ ID NO: 156036 - DNA, 262 bp, Homo sapiens
actctcttctctctcctgtacccacttctgattctgtctagtgaatccttcaagttcaagcttttgtaatagcatttccttaaagtcttccaagatgagcaggcctactcatttactccatcacactcctgaagaacccggtgatgccctgagcacatgacactgtactatagttactggtttagttgtatgcccttctggtagttaaggaaccacatggcaggaaccttgccttcaatcttgtatttccatcttctgccag

SEQ ID NO: 156037 - DNA, 473 bp, Homo sapiens
ggtttttgttgtcagctggttagacatgtctggtcgcggcaaaggcggtaaaggtttgggtaagggaggtgccaagcgtcaccgaaaagtgctgcgggataacatccaaggcatcaccaaaccggccattcggcgccttgctaggcgtggtggggttaagcgaatttccggtttgatttatgaggagactcgtggcgttctcaaggtgtttctggagaacgtgatccgggacgccgtgacctacacggagcacgccaagcgcaagactgtcactgccatggatgtggtttacgcgctcaagcgtcaaggacgcactctgtacggcttcggcggttaatcttttcgtcagttttcttccaatggcccttttcagggccgcccactccctctcagaaagagctgtgattgtattctttcggatggtaacatctcaatggctttactcggctattctgcctagtatgtagaactaa

SEQ ID NO: 156038 - DNA, 370 bp, Homo sapiens
caatgagaaacagcagtaagaaaatggtaggaaggatggaaaacataaaaatttaattgacaggatgattggatgtacaggtgagggagagggaggatccagggatggtacccaagtctgtcacctcagctgaggttgatggtattgtcaagtaaggttaagtttgagttgggagcctaagggacatcaagcagagatatccaggagcagatggaatctgtacacataggtattagtgggtgagtaagaagagaagtggaccaagacttgaccatagggagcaacaaatgtaaagccttaaaagaaaaagagagtatcagacaggtccagggtcgacgcggccgcgaatttagtagtagtaggcggccgc

SEQ ID NO: 156039 - DNA, 709 bp, Homo sapiens
ctgggtgacagagtgagaccctgtctcaaaataaatacataaaaatttaaaaagcagaaaaaatttcagagaaaaatcaagacagccctgtgcaacaacatcatgtgttccaacataattttaacacatgtgtaaagggaatctcaaatggagaggagcaaaagggacaaaaatttgaaagaaaaatctgaaaatttcccaaatttgatgaagattatctataaatccaagaagctcagtgaacctcaattaggataaactgcaaaaacaaaaacaaaaacaaaaacaaaaaaccacacctggacaaatcatattgacactgttgaaagacaaaatcttgaaaataacaagaggaaaacagttcatcacatacagggcaacaataatgtgattaatagctgatttctgatcagaaacagtggagaccagaggatgatggtgtgacataatcaaagagtagaaaggaaaacaaacaaacctgtcaactaagaattctatatccaggagaacaatccttcaaaaatgaaggtgaaggaggtttgactcctggttctagaaagatggagagatggagtagatgtacatttttctattcctcttactaaatacaactaaaactctggacactgcacataaaagaattataagcagaccatggaaagttaaagcagagtggctgaagacctcagagtcctagaaatgacattat

SEQ ID NO: 156040 - DNA, 178 bp, Homo sapiens
ttgtgtcccaggaacacgtactctctcccttgcctcatgttaaaaggccacagagctgttcaatcccaggagatccacttagaaaagccttagaactaatcctatgtctcgcctataaccaaattcatatttgtaaccagcccagcccaccaccagttgcattgatcctgcaaataac

SEQ ID NO: 156041 - DNA, 332 bp, Homo sapiens
tcatgagaacacgtatgaatgaccaccaccatggtgctgggatacatcattttccaagaccattcatggacctgttcactccataggcaaacactgattaagtatttgccacatccctggggcagtgaaggacaggaaactccctgagcatggtcctgccttcatggagcttaccaccacaaagagcaagtcagaccagcactgaaataagcacactgcacaggggagcgggggcccaggtagcgaggcagggggagccgccttcacagcagagggccctgggatgcttggggagggcctgtgaaccacggggagaagtggtggtgccgtga

SEQ ID NO: 156042 - DNA, 642 bp, Homo sapiens
gaggagagaaggggccaggaaccgctgctttcattagcagctcctctgtactttaactttgtacgatgtgctcatattactatgattttttttttaaattcaaaagggaaaaaaataagaacaaaatgatgatggttatttttaaaactatgtaattaaacctggaaaaatctcattttgctaaacagaaaaaaagtagcaggatactaaactatattaatagtatggtcataagtatgtttaataaagaaagagaaaaacatatatgggaggagaaaaatctgaagaaatttactaccaaatgatagtgggtgggtttctctacttttctaggtttcccacattttcagcaacgtgattctcatactttcctaatgaaaagaaatacattcattacataaaataaattaactgggccgggcgtggtggctcatgcctgtaatcccagcacttcgagaggccaaggtgggcagatcacctgaggtcaggagttcaaaactagcctgggcaacatggtgaaaccccgtctctaccaaaaatacaaaaattagccaggtgtggtggtgtgtgggtgtgtgcctgtagttccagctatttgggaggctgaggcaggagaatcgtttgaaccggcggtgcgggctg

SEQ ID NO: 156043 - DNA, 442 bp, Homo sapiens
ggaaatagttgtgagtcaggcagtatgcttttgttgcttctcacccttactatctctttgatgccttcttatctgccactgcagtggtcagttctttcctattccgtttgcccgctcaaagcaaaaggaagaagtattattgatgtttgctatgggtcaggctttttattgggtgtttgacatatactgtcatttagatgactgttaaatttgtggcaccagctctccttccccagctgcaaactttgtctattcaaattgcctagttaagatgttgtagaatttgtttatatcacatgatgttatacacaaatacctgcttaccaacctaccttcgtacatacatattgataatcctgttttatatagataagcaatatactcatgtaatgtcagtgaaaagtgtggctttttatgccagactgcttgaagaaactaaggc

SEQ ID NO: 156044 - DNA, 175 bp, Homo sapiens
caatggtgagcaggaaggcgaagtagatatggaaacagaaatgatactaatatcggtgattccttccttttttcctgtaataagtgctgtgcagacaacatatgagcagtgctgataaatgtaaatgtatttttcatagctcattaagaatcagtttcagaaagagatgtctgct

SEQ ID NO: 156045 - DNA, 272 bp, Homo sapiens
caatgggtgctcccagttgggccctcaaagccatgggaaaagtctctgttactatgtggacagcacagtgcatggtttaagagcactgactgtggagttattcagaccaggttttaataatacacactttgtgaacttaggtaagttcttaacctctctgagccttatttcaactataaaatgggataaagatatagcagctgcattagagaatggtttgaagactagaggaaacctgtacctggtacactgtaagccttagctcaagagat

SEQ ID NO: 156046 - DNA, 154 bp, Homo sapiens
agggccactcacctttggactcacccctggcaggtcctgtaagaggtgctacttgcttccactttgccagctgttcgttggccctgttttgtcttctgctgtttgccttatttatgaaacagaatggaaacaggcgagtttgatttcttataat

SEQ ID NO: 156047 - DNA, 481 bp, Homo sapiens
cttaggcacacaggcataaaaggaaggctggtttctcaggtcaagaggccatcgccaccattcacctggtgaaaggaagctgagccagggaggagggccacagtgtgggtgatgaggggcacctcactttcaaggggccccatgacactcccggctgctgtagtgttcattctggtgtgcacgtgctcaggaagtcaaagaaataaaatcagtaattttttttcatgcttcatctcgtatgtgttcaactctaccccttaaattttgagttgttcgaaataaagagccttccctcatgtatgcatgggaagaaaatatcctctcccagtccccatgcacagtcccgctcactcttctgcgagcagtgagagctgcgggcaatataacactgaaaattgtccttagtctctatgtatttgtttctctgatccgaataagcaagcaaaagcccacaggccatgcgaaaatccctcccagggaa

SEQ ID NO: 156048 - DNA, 421 bp, Homo sapiens
gttcagcagttctcaaatattgagtgcaatggctaagcccatttgaataatttaaaacacattttacactgatggcatattgatttatccttgatatacaaacttctcatggtgtttattaaaccatctaaaaatatcctaacaaatggaatctccattacgatctgttaccagtgaaaagcatgtcttatttccttggaagttttcagttgatttcctcccatatcataaaaatgatatcatggaaggctaagcgaataaataaatggttgtgaaatagccatatttgccgaagcatttcattaatggacatctttctttaagtaagtgatgcatttaagtacgtgacgctcctgtgttgataacctgtaagccatgcagacttgtctccagcctgtgtgttgtcttgtttctacagagt

SEQ ID NO: 156049 - DNA, 680 bp, Homo sapiens
ctaggctactctcttaggcctctgtgaacatctgtgccatgtgtacaggccacttcctaacaggcccaaagaggatgtgttttcataaaagttgtaaacacatttaagaaattatctgaagctcataagccacctgatttcctaggcaaggcctctcatcacattaaccatattttacgtaatgagcagatgggcagaataaaaccagagggaggagaagtggaggaaaaggacagtaatgagtgatgaaatggaaatcacgtgattaatggaacatagattttaaaaagtaatgaagagtttatccctagggtagaaaacagggaacaacaaaaataagtaccacgttgtcaaaacagtaaaataagagagtagaacaaagaaacagagcaagacaaagaaatgctggttttaggataggccttattttaaagacacaggggattttggaacttaccattttgcagctatttgtttaaacaaaaataaatttatgttgcctggtgtcctaaaagttacttatgacaacggtcattaatagataagagcctgcagctatccgggtacaccaacaccagcctttgtgtttgttcaacatttctttctgtgggaaatgtaatttgtagcataagagttcacaagaaccctcagctccatggctccatcactaatgaaacaag

SEQ ID NO: 156050 - DNA, 720 bp, Homo sapiens
tgggattacaggctcacaccaccacacctagctaatttttgtattgttagtagagacggggtttcatcatgttggccaggctggtctcaaactcctgacctcaggtgatccacccacctcggcctcccaaagtgctgggattacaggcatgagccaccacgcccagcctaacataaaattttaaagtgaacaattcagtgacacttagtacatttacatcgttgtgcaattgccacctttagttctaatgcattttgatactggaagtttttattttttctgtttttcttgatcagtcttgctaggggtttatgaattttaatcatttcaaaacactgaattttggctttgttatctttttcctattgcacctttactttcctatttcattgatttctgctctttataattttcacactgacttcagttttaatttgctgttcttgctaatagatggcttttttagggtagaaaattaggtgacctgttttagatcttctttctaatgtaaacatttaaagctataaacttatttgttttttattttttgagatagggtctcactctgtcactcagtttgtagtgcagtggcgtgatctcggctcactgcaacctctggcatgagccattgcgcccagccttaaagctctaaatttactgtaagcattgctttaattttctcccacaaattatgttgatatattgtttctttgttatcca

SEQ ID NO: 156051 - DNA, 387 bp, Homo sapiens
ttcctctcggcacacactctaaatatggtacaggttgagtattccttatccaaaatacttgagaccagaagtttttcagatttggaatatttaattatacttacaatcaacatccctaatctgaaaatccgaaatccaaaatgctgcagtgagcatttcctttgagcatcacaacggtgctcaaaaagttttggatttccaggcctaccattttgagaggctgaggttcaaggagcgcttgaggccaggagtttgagactggcctgggcaacagagcaagaccctgtgtctctacaaaaaagaaaaaaaattagctaggagtggtgccacacacctatagtcctagctactcaggaggctgaggcgggagaatcactttagctcagg

SEQ ID NO: 156052 - DNA, 220 bp, Homo sapiens
ctgatgaggagttatttctgggaaatggcaaatgcccacgggtgaccctgatgccagcagcttctctcccaccagacctgtgcttcccacacagccccacctgctcttgtctttagactaagagcctgtcaccgggcgttgatctagccggctttttcctttgtgttatgggcctgttccttcacctcagtgtattctctgcgtgtgctcccttctggga

SEQ ID NO: 156053 - DNA, 562 bp, Homo sapiens
tgtcctatgtaaacagcagttaaaaaattcaattcaaaagcagatgacagcatactgggtactagagattcaaagataactataagatgttttccttcctccttgagccttaaacccaattaccaaaactgaaataagcctgcatactctttagaagagtcacatgttaaatttggaaagattaacaaaaatacaatcctagtaccttcacattaatttttacataaaaattttaatacagattatatcacctcaaaatttgaacattataaaaggcagatgacgctgtttttcgtcttggggcaagattggcaagagggtaatcatgtgggaagagaagatcctgggcagataagcagaacctcagaaaggtatgtccttgttcatataggctgccgaaatatgtaagacatgatgcacaagttgaaaagtaaaatgaatagacaatccataattaagaaatcctaaagctttccaatttgaaaatatggctgatgctaaaacaaagaaaccaaaaaaaaaagacttaattattcatttacacttgccaatgtcctctctg

SEQ ID NO: 156054 - DNA, 578 bp, Homo sapiens
ctcgggatgacgtggcctatgtacgtacgtggattggagaaatacctgtcacgaagcagatgacagcatactgggtactagagattcaaagataactataagatgttttccttcctccttgagccttaaacccaattaccaaaactgaaataagcctgcatactctttagaagagtcacatgttaaatttggaaagattaacaaaaatacaatcctagtaccttcacattaatttttacataaaaattttaatacagattatatcacctcaaaatttgaacattataaaaggcagatgacgctgtttttcgtcttggggcaagattggcaagagggtaatcatgtgggaagagaagatcctgggcagataagcagaacctcagaaaggtatgtccttgttcatataggctgccgaaatatgtaagacatgatgcacaagttgaaaagtaaaatgaatagacaatccataattaagaaatcctaaagctttccaatttgaaaatatggctgatgctaaaacaaagaaaccaaaaaaaaaagacttaattattcatttacacttgccaatgtcctctctg

SEQ ID NO: 156055 - DNA, 196 bp, Homo sapiens
cctgattactgctgcctctgtcttcagagttcctactactctccttaaaactggagctgaaggatagacaaaaattcctttccctaaggtaagagaaatgtcttagaattataaaagtacttaagttgatttttagatcttatgttagaatctttgagttctttcccattcagtatcctatccgaggttgccccca

SEQ ID NO: 156056 - DNA, 290 bp, Homo sapiens
ggggggtggctttgaaaggggcattcttaaggggaatcactggaggacctgcagaagggaaaaaggcattcttggtgctgaccagaatagaaagtattttcacacccacgaaggggcgttctgctggggagggaggtggtcagggccattgggggctgttgctgtatggacagagataacgggggacagttctgctgcaaggcactaaggaaacactctggggagaattatatagaggatactaataagagggttcacgagcagctgccctacatggggaggggcaatgc

SEQ ID NO: 156057 - DNA, 680 bp, Homo sapiens
ggaattgtataaggagcataaggagtaagattaacttttgtcagaggagtcaggaaaagcttcagagggaaagaggcatttaaggttaaccaggaaggaagagaagaggagggttcatcagaaagagaaggccattggtaaaggacattttgggcagagggaacagaatgtgcaaaagcactgggcttataaaagggatcagaatgacaggaatgttgagagtatatgggcctggtggcagcagataaatctgaagtggtaagctgcccctgattgtgaagggtcttatgtgctcagctaggaacttcgaacgttatgttcatttagtaagaaatgggcagataactggatttcttaaataacggggagtgatgtgagcaggatagctatctttcttcctattttattattatacaataacaaaatgccttctagaagcaggatctgctcttttacactcagctatggaaacctggaggctgcttttaaaacatttgacacagttaaatccttctctgacatcatgaggcagtttaggccatggcatgatttgcaaggttgtaaagtgatattgtgatgaagtactattttcacagtactatttaaatataaacactatacttatcaaattaaatggcagaatactgagttgtgatacatataaaccttctatattaaaa

SEQ ID NO: 156058 - DNA, 384 bp, Homo sapiens
tgaaaaccacagggaaatgggtactgtgtgttagaacctgggatatcattttttaacatctttgtgaaatatggagagaaatccactgcctaattttattgcattttctgcaagtcagtttactcttctgctttcaatatatttatttccatttactcttaaattctttcttagttcctcagtctcaaattacatcccatgcttgttcacttttaatttcagtcttttattttctacagctatttcctcccatatcacatcttcgcatcttcctatactcttgactgtgccaagcttcctgaaattttttatttttatgcagcagtagaaatggtagacaggcaggttgcagatataagcttgccctctagcttcagatcttag

SEQ ID NO: 156059 - DNA, 460 bp, Homo sapiens
gtgcttacttcaaatgcagcataggatgggttgaatggaaagaagtgaatggaaagaagctctcctcctgggagggttaatattctcctattttgctccccaagaatatggttagttgtacacagacacaagattctatggaaaacctgagactgactaaaagtcatgattgactcaagaagtgcttgcattcatataccacccattggaaattcaacaatgaataaaacatgcaggctgtatctctgagattcccacagccaagtggcatgtattacataaaaactaaatatttgtagtgtgacatgacatcctgtaatagagatgagtacctgtgttatgggagctaaaagcagcaacaactaacttcagcttgggaattatgaaagtttgaaccgaatcacaaaagaacaaggaggatatatgtacctggtagacaggaagtcatataaagagaggt

SEQ ID NO: 156060 - DNA, 331 bp, Homo sapiens
gaaatagggtgtccctttgtcgctaaggctggagcgcagtggtgcaatcacagctcactgcagcctcgaccttctgggctcaagggatcctcccacctcagcctcccaagtagctgggaccacaggtgcgttccaccacagctggctaatttttttggtagatggggtctccctgtgttgcccaggctggtctcaaactcctgggctcaagcaattctgccttggcctcccgaagtgatgggattacagaggcgtgagcccctgcacccagcttaacatgacttcctaaaatcagattctgaactcaaggtttgtttactttcgcagttta

SEQ ID NO: 156061 - DNA, 366 bp, Homo sapiens
gagttacataacttgctgaaggtcaaacaaccagtaagtggcagaacgagagactcaaagccaatctgattttgaagttcgttcttactatgctacactgctttctgcaatctttaataattgctaaagcagccagatcatatttatctacttcaatcctccattcaacatggttttgccaatgtcagtcctctctttccactcttcctttgataaatgattttaacctctctagaattgagcaagttttcaaataataacacatccagtacaatatcgaattctagatgccatctcaccaatcctttacattttccttcttcactttatttccttacttgctgtgcaaaatagcattgatcattg

SEQ ID NO: 156062 - DNA, 378 bp, Homo sapiens
atcatctcacctgaactacttcaattacctcctaattgattttctcttttactcttacactttattatctacactgtagctaaataattaattaaaaagagtatgttaggtgctctgaaagggaaagtatagtttgatgaggtgggaaacaaagaggagtccctgtgtgccaggggatcaggaagggcttttgatgggaggtgaacttgctatcaaaatcagtcctgaagtcataaaaattagtcatgtaaagattaaagggctatgttggaggaagaatgttccaggcagaggggagaataccatgttagaagttttggaggtaaatgagagcttggtgtattgaagaattgaaagaaattcagtatggctggatta

SEQ ID NO: 156063 - DNA, 447 bp, Homo sapiens
tggagcgggaaaacagtcactgatggggccggccttagggcgggctacccgtggggcccgatgacccacacttagctggaaggaagaggcagccaacaacacttccttgagtcacacagctggagcccaaatccacccattagtccaggaccaaagccaatgtcatccgcggcctctcccactcctgcatccagtccctccccaagcctgtcagctctacctgggagatgcagtcatgacaaggacctctcaccaccacacctgtctcctgggcaaagggctgggtaacttctttaagcagcagagagtcaggcttttagggccatatggtctctgtcgcaacaagcctctcccattgcagccaaagcagctgtagagcatacgttaccaagtgggtggggctgtgcccccatcagtcttccctggcaggacagcaggtggctggat

SEQ ID NO: 156064 - DNA, 663 bp, Homo sapiens
tgtctcccaagtgtctttccctggtagctgcagaggtcaaaggtcccaaacacagtgaagagctggactttctaaaatccagttgctgtcaaaacctctcagaaaagccaaccagcaaggcactcatctttgctgccccaagggaccaggttcagggagctgagtcacagaggagcatgcttggaagctggccagctccacagcagagcagtttgccaggccacgtgccacctgcttcctgtggctcacggccttctggctggcaagcccctgtgggccaggaagctcagacctaacctgctgtggcaggaggtagctctgaagtgatttgtcaggaactgtcctcaggtgaagggagaaatgagacaaggcacttttgctcccagaacctggcccttaggggactgtgaattgtgatcagaaaatgggagagaggacatttctttaaccttgagatctcccatctgagtttcaggagcagaacctgaatcaaccaagaagggttagcagaattgggaaactgaatgatagacatagtcaaagagtctggctgttgggaaatctggttttctgtaaggcagtggggcactgttctacatgggcaaggatctgcctgcctcacattatcccccagggctgtcaaccagaccccaggcatcctct

SEQ ID NO: 156065 - DNA, 426 bp, Homo sapiens
gttattctcgggtcttggttttggttattaagtcaaggaattgatacattatgtatatcatgtagatagacatacattctttgtatctttctattttgggggggtaacggacactcttaattaggtttcattaattttctctgtttatctcacttttggaataatactttatttttgcattgcactttcacatcaaaaagggttaaaattcagtaaacatttattatatgccagatagtaggctaggttctttcatatatattaccttatttaattctcaaaacaaccctggaaggtagatggtatcgttttaaaccttgattttttttttttttttaattatggagagagaggcccagggaggggccatgacttgcccaagatcacagagtcggtaagaggtgaaaccagaccttgaactcaggt

SEQ ID NO: 156066 - DNA, 279 bp, Homo sapiens
tcccccgcaaaaaagagaaatgtttgcctattccaagtgcaacatattggaaggaagatattcttctgtattttgatcttgaaactatattattttaccattcacacttgggtctgtggttcattttattgaaagatcagttttccccactgaactgcaatgatgccatgtcataagtcagatgattatatatgtttgggtctatttctatactgtatcttcttccccaaaggtctatttatctctgcttgtgccattactattaaatttttaaatatt

SEQ ID NO: 156067 - DNA, 348 bp, Homo sapiens
atttcttggtatcaagcctggtccatattcacatttcaccagttacctaaaaattatatttcttttcttttttctcatttctttgttccaatcaggatacaaacaaaggacatgcactaacaacattttgtctcttctagattttaatacagaacagctcctcctcaacttccccttttatcatgccattagctcaatgaaggcactagctcaattttacaaaccattttcattcatttcatgaccctaattatttactatgcacttcagaacatagtggatctggctgacaccttctagcttcaaatacttatttctgttccttcactatttgtcataaaagaggaa

SEQ ID NO: 156068 - DNA, 316 bp, Homo sapiens
tagttgactttagctctaggggaactgtgggacctgaactctgcagggcagtgttgcccatcagatggggctgctccgacctgagcaacccttggtctgctggcttctcccgggggccccagcctggctgcgtctgcttgcagtgcagcctcaggtgccctgggggtctgaatctcagcacctgcactggcagacagcgcctgacgagacctccagcagggcggcccctgggaccagcatcagcccgcctgctccttcctccactgcagctcacccagcccaggaccacccgccacacctctttgctggcgctcgt

SEQ ID NO: 156069 - DNA, 451 bp, Homo sapiens
gatacagataccattatctctgcatcacagatgaggaaactgaggcacagagaagttaagattgccaggctggtgagtgacggaggacttggaatgatcctctaagatttcatccaggtcttaaaaaaagtcgtggcatattctccatgaaaaaacatggtgaagaaaatctcagctgtataatcctaccttactacaaagtttatatttatgaatgagactaggaataccagccagccaagtttgtggctgttgtgtgtttccagtctgtagaggtttcctgctagacatgcaagaggtgggagttcccaattcccaaggtatcccgattaaggacatgaagggtgaaccacaaaataggaatgcagtagacatcaggggcaaggttatggtgccagggagacatattgctcgcctggaaggattttactaccaagtagagatgctcctt

SEQ ID NO: 156070 - DNA, 309 bp, Homo sapiens
ccccccaccccacaacagtccccggtgtgtgatgttccccttcctgtgtccatgtgttctcattgttcaattcccacctatgagtgagaacatgcggtgtatggttttttgtccatgcgatagtttgctgagaatgatggtttctagcttcatccatgtccctacaaaggacatgaactcatcattttttatggctgcacagtatcccatggtgtatataataacttccaattttccttaaattccaagaggtttaaaggccctatgctagtcgacgcggccgcgaatttagtagtagtaggcggccgc

SEQ ID NO: 156071 - DNA, 371 bp, Homo sapiens
cccctgggattacaggctagcaccgcctccggccttggcccatgctcatatcttgtcacttcacctggtagaccttgcctctgaggctgagcaagggatccacgtcaaccctttccaagtccgactgaactagagggcaccttggttgcgtatggagccctgaaacagaaggcaggtgcattctgggcacccccctgcccaaggcttcaattcctgtggtctctctatgctcagcctggaaagcttgggccacctctctcctcacccctggacagaccaagtcctgctgactccgctgtctacaccacctcatcctccttccctcccctgctgtctgcagggcctccatctcctctggtcttttgtcctcc

SEQ ID NO: 156072 - DNA, 315 bp, Homo sapiens
cagtcagaacagaatggctctcaaatgggaatgtaaggtggggactcttaacaagggtgtaggcagggtttggggggactaactggggcctgtgacttcggggttccccgcgatcccaggtgtgaaggaatggggagcagtcatgagaaacggagaggacgactatgtgctagggccactggacagagccctgggtagagacccactagaggggggttgaggataaataccaggatccccttcctcctgcctttccctctgctgctggtgcctcccatcagccaagcacacctgggagctggaagcaggggatct

SEQ ID NO: 156073 - DNA, 130 bp, Homo sapiens
gtgtgtgtgtggcatggtatgtgtatgtaccacgtggtgggtttgtgtagtgtgtgtggtgtgtatggactgggtgtgtggggtggggaggtacgtgtatggtgtgtgtatacatggtggggtatgtgtg

SEQ ID NO: 156074 - DNA, 587 bp, Homo sapiens
gccagtgaaatctgaacactaattggatattagattatcaaacattaattttgttgttataaaagtattttgggttttaaaaacatgagcccttccttgtatacaaacttttggaacattcatgagtgaaaatgatgtctggatgtgcttaaacaccccttctcaccctcaaaagtcaattgagcattactggccacacttcataatttttagaactgaataatgtgtactgggttcattatattattttctccgaattttttgaaaaaaattccagtagaaatacaggaaaagaactgtaaattaaagtggtgggtgtaatgatttcattagagtattcactatacttttaagtgaatgttttgactaaaaaaataaaattaaaaacacagacatataggggtgaaaagaaggaaatgtgaaggaacaaagatgctatcatgtggtgattatgatgaacacagcatacatccactagccagtaactttgagacagaagtgaacaaatactatggtgttatgaaaagaaaataaaactagggaccccagtccactctgccaaaaggaaaaacattaagctgaaagct

SEQ ID NO: 156075 - DNA, 415 bp, Homo sapiens
atgctcgtgaggctccagagaacagtaaactcttacatgctgttggtgggaaggtaaattagtgcagccactatagagaacaacaggaggttttctcaaaaaaactaataatgggactgccgagggatccagcaaccccactactgggtattcaggcaatagaaaagaaaacaatagatcaaaaggatacctgtcctcatatgtttactgtagcactatccacaacagcttgtgtatggaatcaacctacatgtccatcaccaaatgaatggacgaaaaactgtggcacacaaacacagtggaatactattcaccgtataaaggaattaaatcctgttattcgtggccacgtggatcagtctgacagatgttatgttaagtgcagacacagaaagataaatactgcacattctta

SEQ ID NO: 156076 - DNA, 206 bp, Homo sapiens
agtgtttgacttgctttggcgctttgccaccaaaatctattagaataactgatttataagaaatattttgataagatgtgtatttaataaaaatactaatgtccttgacactgtggttcaagcttttttttttttttttttttttttttttcaaaaaaaaaaagccaattttcaaaattgtcacgaaaaatactatgtgggcccca

SEQ ID NO: 156077 - DNA, 548 bp, Homo sapiens
caagaaattttccttcaagaattttacctttgcaacttggctgtttggcttccagcttgtcttaactttcgccatgccttcctcactcagctgcgtcatttgtagcttttgatttaaagtgagagatgcgtgactcttttttacttgaacatttagtggccattgtggggttatttcattggcccaatttcaatattgttgtgtctcagaggatatgaaggccccaggagagggagagagacagggaacagctggtcggtggagcagtcagaacacacattaggttcactgtcttgtatgggtgtggtttgtggcgcccccaaacaattacaataggagcatcaaagatcaaatattataataatggaaaagtttgaattgtgagaattaccaaaatatgacacggatgtgaagtgagcacctgctgttgtaaaaacagcagcagtagacttgcacagggttgccacaaaccctcgatttgtaagaaaatgcagtgtctgtgaattaaacgaggtgtgcctgtatttgaggtgggctcagtttgccag

SEQ ID NO: 156078 - DNA, 1164 bp, Homo sapiens
actcaggaatgtgcttctgtaacagcagctgagtctcagccagtccctgcagccatatttcaaccactcacagccattcaaaccacgctcaaataaagctccaaggccgagctgtaaccaatccggcagtttctgcacctcgcttccattttctgtactcactttcctttttctgtccataaattctccctgaccacttagaagcagtggagtcattctgaatctgcagtgactctgagggctgcccaatttgaaagtcgtttcttccttgcccagtgacacccttaaatttatctaaagttgttcttttaacacagttggttcaaactgacccaattaccacactatggttgacatcattttcccgagttgatatccttcatatgtggctgcatgtccactgagcaggcctgccactgaggccctctattatatcaatgtcatcctctctatagtaattttaatctttcacaaaacagccctcagtacaagttactatttgaccaattacacagacgttaatgggtgttttgagaagggtcaaggaagaagagcagaaaatgatgaagtatggaatatgttatagctgagaattttctttaaaattacaaacagtgggtcaaagttatgtgtcagtcacttccagaatgccattttacttccagagatctgcatgagctgaccttcaaaataaatggactagggttcagaccaagtaatcaatcaatcaatacagcatgggatcctgattatcaagaaaccccacagagctcacagaactcagcagccccctcccaaggtgcctattccctcacttgtaaaacagtggcagtcatccctcatcttttcatggaaatttagtcaaaaataaaagtagtgtaaaatgcaaatcatcatcaagatcaatcaaaactcagatttctagatttctcataaagagggacttggacactaacacagacaggtgagcgaaaaacaaaccacaatagctagtgagacaaaagctagacctagtgaggtctagcccagggcatacaaagcacgcccacacattcaaacgcccttcagtccagtcacaggcccatgctctgggaagagctctcaggatagtaacggctctagctattgctcagccttccgggtctgccctggtcctcgtgctct

SEQ ID NO: 156079 - DNA, 547 bp, Homo sapiens
gcaggtgataataaaatcagagaagagtgtcaatgaaggaccagaaacctctttgtcctgaaattacaaaatctggaagccacttcattccagaaatggtaccacagctttctaagttcacacaatattgatgacatttccagccactatcagaaacatgagctactgctggggctcttgataagtagatgaaaagagatgtcaaattttacataatcttcatacagattattgcttatggcctgtggagttgggggaggcagatatagctgtactcagaactaggagatgttggccccacttaatcacacattaggcgttcaaaggaacaagagtctagaaattagttgctttaaaatgcccagattttggagagaaaataactttcctggctgggcgaggtgactcacacctctaatcccagcactttgggaggccgaggcgggtggatcacaaggtcaggagattgagaccatcctggctaacacagtgaaaccccgtctctactaaatatacaaaaaaaaattagccgggcgtggtggcaggc

SEQ ID NO: 156080 - DNA, 283 bp, Homo sapiens
ctctgtcaagcatcaagtcagtgaaaaataaaattagattgttgaactatgtgctattcacttaattctaaatttgaattatcattgtttcaaaatgaaatcaaaggataagtaaatgcaaaggccttttgtcattttgttatgctgtttattgtgttttattattttttgctttattttttttttttttttttttcattgggaagccgcgctctgttttctccccccccccgtaaaaaaaaattactacaggaaaaaccctttatgatcttctctctctcat

SEQ ID NO: 156081 - DNA, 317 bp, Homo sapiens
cgaagacactcacctgtggagcctgtgcacgtaggtagaggcggcggctctgagtccaggagctccagtgggcagctccccagcaccagccatgaactacgtggggcagctggcggagacggtgtttgggacggtgaaggagctgtaccggggcctgaacccagccacactgagcggcggcattgacgtgctggtggtgaagcaggtggacggctcgttccggtgctcacccttccacgtgcgttttggcaagctgggcgtcctgcggtcgcgggagaaggtggtgagtgctcaggctggctgaggtggctactgca

SEQ ID NO: 156082 - DNA, 340 bp, Homo sapiens
agggagtggtggttgctcacaacccagtgaacaaagcgggaggaagcttcctggaggacggggaaccacttttgggccccatccacctatccccatttgacagttgactcagactcagggaccccttggagcgggcttcaacccatgccctggcttctccgcttagctctgttcgcccctggcttctgctcgcgttcccctccggtgtttgctctacacagagttgacctggagttcacggaggtgatgagatggggcatgccagctcattaaagctcattaattagtctgctggcaaccagcccagtcagccctgccatcccgcccaccccggcacaag

SEQ ID NO: 156083 - DNA, 345 bp, Homo sapiens
tctctacaaaaattagccgggcatggtggcgcatgcctgtagtcccagctactcgagaggctgaggcaggagaatcgcttgaacccgggaggcggaggttacagtgagccaagatcgcgccattattgcactccagcctgggcgacagagcgagactccgttctcaaaagaaaaaaagaaaagaacaatttgtgtcatgatttagcacaaaaatactcccaacgcttctttcatttttttaattgcaatatctttaaaactacataatttaagagtttaaataacattataagaacgcaacttttcaaaaaaaatctattctctttcagcagacaaagggaaaca

SEQ ID NO: 156084 - DNA, 556 bp, Homo sapiens
agttaatttttgtatttttagtagagatgaggtttcaccatgttggccaggatggtctcgatctcttgacctcatgatccgcccacctcggcctcccaaagtgttgggattacaggtgtgagccactgcgtctggcctatatttgtaattgttatatcttcttgcttaattgacccctttatcattatataatgaccttctttgtcttcttctatagtttttgtcttgcatctgttttgtctaataccttgtattagacaaaatagttaacatttgcatggaatatctttttccatctctttattttcagtatatgtgtcttgacaagtgaagtgtgtttcttctaggcagcagatcattgggtcttgtgtgtgtgtgtgtgtgtgtgtgtgtgtgtgtgtgtgttttatccatttacctagtctgtgtcttttgattggagagtttagtccatttatattgattgataaggagttactcttgcatcttttttttttttggacatagggtcttgctctgtcacccaggctagaatgcagtggtgtgatcacaactc

SEQ ID NO: 156085 - DNA, 313 bp, Homo sapiens
atgggccgtggccaggctgtcacctgtctgtgatgggcctacctggcagcctcctcagctacagcaggggcccccttctttagctcccatctcaggacaggtctgcccacctcgtccctcagcccagaaaccagggaatcatccctgacaccagcttcttataactgtcagcctggtcagttctctaaatctgggtacctgcctgtcttttttgtcttcaccttcaacaccttcctgcatgcccctatcatctcttcctggactgtcagagtctcctaactggcctagccacgatcacttacacctcaccagc

SEQ ID NO: 156086 - DNA, 272 bp, Homo sapiens
ttcatttatctttgtgtctcctctttgcatgtggttggcactcagttgtctgttgaaatgaatctttgagaatactaccagcagtcaaaatggaaaccaccttggttcatagccacaaatagctgagatccattttttttttctctgtgtggggtaatacctctccctactcgagttaattactaaatctgacaaccatttaaaaacacaggtgattatcgggctatatgcttctgtttttttgagattgaagtctgtctgtcggcttagaa

SEQ ID NO: 156087 - DNA, 451 bp, Homo sapiens
agcccgtcgagtgtcaataaaggggacttgctttggggatgtgtctgggccccaggaccacattcgaggagcatctttcccttcccaaggcaaggcatcttggctacatgtgttggaggatttgcagagccaggatttgggggatagaccaggctgctttcccgacccatgacacacctggactcttcccttccctttttctggctgacagtcttcctagaaagaggtcatttgtttggcccctccatggggctgtgtgaagtcagctgacgggcttctgcacattaagcggagaggtcaggagcacgttatattcattgtgatagtttgtgtgatagttctactatataatagacattatgctgtattttgttacttttaggaaatacatgatgaagtgttttggttacattttaggaaattggctttgagttgacatgtaatgcattat

SEQ ID NO: 156088 - DNA, 286 bp, Homo sapiens
gttgcatcttagatcaaatgggaatgtccataagggagagatggagtctgtacacaaatacaggaagtaccaagttgtgtaagtccagactggggatggtgagggcctgacagaaggcaatgaggcaattagagattggagcctgggactacagaatcatggtctctgtgggagtctaggccatggtgggtggaggtcaggccgtaaagtccccaggccatgtcacccagtctcccctgaacactgagaccagcacttctatgctgcagtttcatcttcccaggct

SEQ ID NO: 156089 - DNA, 579 bp, Homo sapiens
cggctgaagagagaaccttggtgttcatagctcatctaatccaagaaagtcgaaagaggaaacagactcagggaaagaaaatatttctccgaggcttaagtttacagagggaagaaggtacgagaaagattcaagaaaaacacacattcaatgcacaaagcatatgggcctgcaatggggcatgaactaccatgcagtagagggaagagccacaccagatacccgcccatttagggcttgggacgttcctctgatgttgacagatgatttttcccattctatcagtgtggaaactgagtgtcagagactcatgtcccatgtgctgggtgaggtcaggtttcaccgcttcttgcctttttctcttccccatgcagccttctcccttgcctccctgccacatcaccgtggggtcctcctgccaggctgacggccagcacatctcttctggtttcccacacaggtcccaattgtatcaaggcaggaagaaaactcaagactagaggccccaggccgctaaacgattcatggcccacattgtagacctcaaggatgggcaaataaaatgtcacaaggcaagtt

SEQ ID NO: 156090 - DNA, 406 bp, Homo sapiens
gtgatcatttctatgatattaaaaatataagctttgttctgccaaatactttagaagatgatttattttccctcttttggttatagcatagcttgtttcagattaggttgcagctatgtgacgagttgttaaatgaaaatttaaattccagtaggtttaaaatagaaaatcactgcctgacttcaggctatctgcctggtaattgcagaaaaaacttcgttaggtccgtgtagaatgaatgagcacaggctctatgaaatgctgttcagacaaccatccagcagagaaaagactttgaagatgattgccttaggagttattgagcacacatactgaagaagtaattctaattcaaagaatgaaaaccttcttgatttttatgaagataacttactagaaccactgg

SEQ ID NO: 156091 - DNA, 232 bp, Homo sapiens
aggttacagagaaaccagggaataaggctagaatgatccatgtggtaatgcgaaaaggtcaaacgagagaatgaactcatgtttagctgatatagacacagatggatacatgtaaaaatgtttacacagtatgtctatatatccttccttgtctactgagaaaatctagaagcaaggtggctcacacctataatcccagcactttggaaggccgaggtgggcagatcacttg

SEQ ID NO: 156092 - DNA, 149 bp, Homo sapiens
cggctaattttgtttttgtatttttagtagagacggggtttcaccgtgttagtcaggatggtctcaatctaaaacaggagaatcatttattgagtgcactcaggcccagctgactcaacgtccaaaagactgggcccggaagaaagaca

SEQ ID NO: 156093 - DNA, 584 bp, Homo sapiens
ggtgagctaagagtgagcatggagaaagtataccctggacaaaagtggcacaccacttccactcacatgccattggtgaaaattaatcacatgaccgtatctagattcaagggggctgggaaatgaggcaaagcaaatagaacagtgagtggcaacagtctctaccatgcttcctacacttcctctatagtgaaatgtatcacatcctattgcaaatgtgtacctaactagttgtcacattggtagattttcagctttgttgtggtaagacctgacttggtcactgccatctcctcagcacctagtatactgcctggagtgtggtcaggactcattaatgacagcatagatatacgatcaaggaaggctgtccactctgcctcagactgtaataagagtgaggataagctttaaatgtcaatgtcataaaaggtaaagaaagattgtggcaatgctctagattaaaggcagctaaagagacttgacaactaactgcaatagctgtccccagactggatcctgtactggaagggagaaaatgttacaaatgacataattagatcagatgacaaaattggaatatg

SEQ ID NO: 156094 - DNA, 290 bp, Homo sapiens
ctagcccatgccgtgccccctcctctgaattcccagaggaatacctctctgtgtgccactcccccatgcctggcataaagacccccttgtactgttctctttctgtgtgtacacatctcatctccccagggagcctatgagcttcctggggggccaaactcagatttaccaccctcagtcttggacccaaagcacagctgactcctgctcagctttcaaggctcatggcagccttcacctcttccaggaagtctcctcaacctccaggtgggtttaggggcctcccacag

SEQ ID NO: 156095 - DNA, 546 bp, Homo sapiens
tgatttgaagtaaatttttgaagtaaaaattaatattatttgtatttccatacaaatgtttaaaaattgataagtactgagaatggtttgaattaattaagtatgtctgcagtgcttgactgagaatatttggagcttttggtatctatgtgcctataaaacatatatatgctcataataaacacataatttgtgtgtctctgtatatttttctgtactgtaaaagcatgttaaggataaatatccacagaatgtaagcatgattagcaaattcattattttatacacttgtattagtgctagctatttaacttttctgtattcatttttaaaactttctgagaatatttaaatttaactcaaactaggctgtttcttgttcttcaaaaaaaagacaagaattattcaaaaatatgtattaaataccctgtattttccaagtagttttagggacttactagatattatttctggattcttatagctctaaacctctatgaacaagctgagtcatagtttgagtcaataccttgacatattgatgct

SEQ ID NO: 156096 - DNA, 349 bp, Homo sapiens
aaatgggagagagggaggagagagggaggaggaggggaagggaagagaaagagggaagataggtggagggagaagggaggggggcaaataggaaggggactgaggaggacacagggagaagctgggaactaacccttcctgaagatgtgctaaaggctgaggtaggcactttacatattttagtcccatcccatgttacaaatggggaaactgaggctgagaaaaactcagatattatcatatattctgtgaccgtgacagaggtgggtgtgaatgaaggccagccctcttatgtcaccaaggcatccctctaactcacagaggagtcccagtatcggtggtgccacct

SEQ ID NO: 156097 - DNA, 215 bp, Homo sapiens
acagtagtaggtctaatgttttggcttaaagacaaaggtgacagggaataccctagttaatagagaatgcacttcagattccatataaagataggagcttgaattataactcatctttcaggattactctaggaagagataaattcttattacacactaatatgctaactctacacaataaaaaataagcaccaactgagcataacagttctgtg

SEQ ID NO: 156098 - DNA, 527 bp, Homo sapiens
cagtttaggatctagtttgcattacctccaagagaatagccatgtttgcttttctctgctgccacactgtagcatgttatgttttgacttgggacaaatggccactctgaccagcatgtgatggtactggtacctcatctctgatgattagtgatgttgagcgtttcccatgcctgttggaatggcaatccgttggaaatgtcttctcagttactacccatatgtatgttgctcaggccactgtgtggccccagcactgttggtttgcatcgggacttggggattgtttgtcgttgttagccaagacaaatgttacactgctgttcctacagtgagtagtgggagtggggtatggggacatatgcttatgcccacagttccatcagaaatcccactgccttaagacagtctcacgggaacccagtcccagccttgcagcactgggtagccctgtggcattttgactttggatgtatctgcattgttgaagtcactcagcatgttgccatgcatttatccacttaggt

SEQ ID NO: 156099 - DNA, 150 bp, Homo sapiens
ttttcagcctctggtcatcaccactcctttcggtccccaatccatgttgtaactcgttcaagcgtaacaccgcctaattattctgagtcatgagcacaaaataactcattctgtcaatcacattcttttttttctttttctttttaagat

SEQ ID NO: 156100 - DNA, 654 bp, Homo sapiens
aattttcactatagactgttggccagcaaaattacacaaacaaaaaaataattacaacaaactaaaattccctgattcattcaagtaacccgatttaaagtaaaggttaaacatccttaactgaaaaacgcaaaatccaaaaggcttccaaatctgaagctttctgagcaccaacatgacaccacaagtggaaattccacacataagtacttaagaggaacttggtttcatgcacaaaattattaaaaatactgtataaaattaccttcaggctatgtgaataaggtgtatatgaaacaaatgaatttcatgtttagacttgagtctcaccccccagacatctcattatgtatatgcaaatattccaaaatccgaaacacttctggtcccaagcatttaggataagggatactcaacctatatattaatcctaacgtagcacagatcctattaaaaatctctctagttaatcattttattcctttttggggaaactaatttcttccattcctattaacagttagaaagataatagcatttcagtcccagatctttgcacagcatacaacctaggccctgtggaatgctgtgggggaatatgaaacagttcagaggggaatacgaagcagttcagaaggcatgctgttgacctca

SEQ ID NO: 156101 - DNA, 363 bp, Homo sapiens
gtgaaactgttctttaactgttgtttcagttggcatgagctcaaaatggtcaagtgacaaactcagcttcactgtagtggagcggttgttgtgtcctaaggtagaagtattccaagacctctaaaccaagaaaccaagacctctaaaccagctgaccaagcgttttaaggatggaggaaaaaatgttttttgagtaggttattaggtatgataatgagagggggcactctgattcaatcttttaatttccagatctggactgacgtggtggctcatgcctgtaatcccagcactttgggaggccaaggctggcagataacctaaagtcaggagttccagaccagcctagccaacatggcaaaa

SEQ ID NO: 156102 - DNA, 180 bp, Homo sapiens
tctaactttgcacacctgcctatctcaaataagaggtacgtatataaatgtacatctcaaactataattatataaatacatgatgttgaattactctataaatctgtaatacttaatgtatgctatgtgaggtgcaggaaataaagctgtgcaggagacatacaatcccacccgtatgaa

SEQ ID NO: 156103 - DNA, 157 bp, Homo sapiens
aagctgaggcaagaggataccgtgaggccaggagtttgagaccagcctggacaatgtagcaagaccccatctctaggggaaaaaaaagtgtcttgaaaaggctctctataataagatctcactgtgtgtggcttcaaagacagctttattcaatttg

SEQ ID NO: 156104 - DNA, 286 bp, Homo sapiens
taaccacaggcatggccagtgtctgtagagtgaccgttaaaaattccttagacatgcccaaggaaaatgtgatagaaaataacaagcacgctctgagattagggcaggaaaaggattgatacagagtttattgacacagaggtattctgctaattatacaagtctctgcttttttttttttttccaacggagtcttgctctgtcgccaggctggagtgcaatggcgtgatctcggctcactgcagcttccgcctcctgggttcaagtgattctcctgcctcagcct

SEQ ID NO: 156105 - DNA, 286 bp, Homo sapiens
ctgtactcaaggaaagaaactgatggaaagactttttattcagacaaactgtccttcaaacataaaggttagagacaaacacctttttttaatttatttttatttatttatttatttatttttttgagacagagtctcagtctgtcacccaggctggagtgcagtggcatgatctcggctcaccgcaacctccacgtcccaggttcaagcaattccctgcctcagtttcccgactagttgggattacaggtgcctgccacccacgtccggctaattttttgtagtt

SEQ ID NO: 156106 - DNA, 382 bp, Homo sapiens
cagtacagattaagtccaatatttccttgttacttttctgtctgaataatttgttcaatgccaaaagtgggttgttgaagtctccagctgttattgtattggagtctgtcttctctttagctctaataatacttgctttacatgtctgggtgctttagtgttggtgcatatatatttacagttgttatatcttcttactgaattgactccatcattataaactttgtcttttattatagattttgttttgaaatctatttgtctgatatatgtatagctaatcctgctcttttttggtttccattggcatgggatatatttttccatccctttattttcagtctatatgtgcctatagatgaagtgtgtttcttgtagggaa

SEQ ID NO: 156107 - DNA, 236 bp, Homo sapiens
tcatttggtgcagaagaaaacactgaattccttggagccattattgaggcttgaaagtttggaagctctgtgttagcagcattttagggacagttcagccagaagtggatgtgttccctacagacatgaaattctagcaactgcattgtttcctaatgggatcacaggttatggactcatggagctgaaaaagtctccacaatgggagagaaactgagaggtgctgaatccagctg

SEQ ID NO: 156108 - DNA, 506 bp, Homo sapiens
tggtaactgaatgtgtattaccacatatgccaggcacaatactaagaacacgcacaccagggaaaacatttgctaagggcacttttccctaaagacacacattttagttcactctatctgcccagctctatcccgttttgcttcagggaccgctctgttatctagaatagaaacctactcaagagaggccacatcagcccccagcattcatagacacccgagaacagagggcctctttgtgtgcgcttgccttcatttctgtgcaattagagggaaactccttcaggtaaatcaaagagaaattctctgcaaacttttgcttcagaacttacatttcaattatcctattcttaaaacaggattttggcataaaggttgctgaccttggtttctaaatacaaagccttcagacttttcattgaaatgtactgactgttcaagtggcttttaaacataacattgctttaaagaaagaaaagttatctttctggtagtcttactgatca

SEQ ID NO: 156109 - DNA, 271 bp, Homo sapiens
cagattaacatttttctccaaagtggaggtggctgtttgagtgtaaaggtaatgtgctcctctaagagtcacagttaagtataaggaaacaaaaacatctgtaatcccaccacatggaacaacttgctaatatttgtgtatattcctttctgcttcatgtgtaaccatttttacatttaaatctttactcctttgggaatctcttggaagaggagatgtagagatcttaattctcaccaaaatttttctggctcttaccatttagtgaatt

SEQ ID NO: 156110 - DNA, 134 bp, Homo sapiens
cacacgcccacactacacagagtctatagtggtgaataagactgggatggtctctactggcctgcctgccttttcacttgtgggatttcagggctccttttctagagtgcaatgtcactccaatagtatttgac

SEQ ID NO: 156111 - DNA, 205 bp, Homo sapiens
gaggagggaacagctggagggagcaagagccccagatggttttaggaggcagatctctcagccctcagttgaagtacctttttactttcagataatttacaaaagtccaatgtaacgattaagaatgtaggacgtgaaatactagtcagccataaaaaggaatgaaataggccaggcgtggtggctcatatctgtaatcccaaca

SEQ ID NO: 156112 - DNA, 848 bp, Homo sapiens
gtaattcttggtgtgaggtaggtccataccacatagaattgagtgtttcattctcccactcaatgcatgaatcattaacacgtttgtatttattttcaattgctgccctaacacattaccaaaaacttagtggcttaaaacaacagaaacgtattatttttctgttctgtaggtcagaagtccaatatgactctaaccaggctaacatcaaggtatctgtaggattgcaggacttctggaggttcagtccatttcttgtctattcagattatggcagaattcagttttttggttttgtaggactgacgttcttgtttcctcactggctgtgagctgagggccattcccagcttctagaggctgccctcattccttggctcctggcttccttcctcccttttaaaagttagcagtggtggagagtccctctcacactttgaatctcccctgccccttctgttgcatctcttactgataatctagggtaatcttcctattatgaagtcctcaacctttatggctgcaaagtctcttgccactaccgtaacataaacaggtatagcaccaagaggcgaagatcatggaggcaaatttctgcctgtaacgccattttaatagactaatttaatagacattttaatggacgcgacagctagggagacattcatatcctcctctaaagcataattaggtgaaattgtttaaaagctagagaggttctaggctgggtgcggtggctcacacctgtaatcccggcactttgggaggccgaagcgggtggatcacgaggtcaggagattgagaccatcctggctaacacggtgaaaccccatctctactaaaaatac

SEQ ID NO: 156113 - DNA, 272 bp, Homo sapiens
aaactgctttatttcttataaaacgctgtcaactgaagccagtcacatgggtgcttccactactgcttgaaaatccgccagtaggcaagaaagggattgctctctcggaaaactatttgatgttagaccttatgataagtgtaggtttcaaaaaagaaaagactccaaacatgtaagaacaaaactgcaacagtggccacagacgcagtgaaagcagtttgctgcaagcagctgccaacagggtgtgagcagagctgggactgcccccatca

SEQ ID NO: 156114 - DNA, 260 bp, Homo sapiens
cgaggacactgccccgctgccctcctcacttcccagcgtctgctgtcccctccgctgctgctgcccggcaggattgctctgtgtctcatccacgtttgtccctgcagagttcctcgcctctccctggaaccgccagcctcatgccgcatctcagaggctttttttttctctcttttttttttttttgagatggagtctcactctgtcacccaggctagagtgcggtggtgcgatctcggttcagtgtaacctctgcctgt

SEQ ID NO: 156115 - DNA, 258 bp, Homo sapiens
  misc_feature (6)..(6): n is a, c, g, or t
  misc_feature (98)..(98): n is a, c, g, or t
tctttngtaaatgggggctagtggtgatgaactccctcagctttggcttgtctaggaaaagctttatctctcctacatttctgaagggtagtcttgtngggtaaagcattcttggttgactttttttttctatcagtactttcaatataccatcccactgtccccgggactgagaaagtttttccaaacaaaagcatcatgtcttgctcctcttactcgaatgaggcattcctttctcttatcccaggagggttttct

SEQ ID NO: 156116 - DNA, 491 bp, Homo sapiens
ttcagcagtttgagacctgcctgggcaacatagtgagaccttgtctttatagaaaattaaattagccaggtgtggtggcatgtgcctatagtcccagctacttgggaggctgaggcaggagaatgtcttgagccagtaggctgtagtgagcctcattacaccactgcactctggcctgggcaataaagcaagaccacatctcaaaaagtaaaaaattaaaaaataaagcaacttgctttaattcagacagtattagttgtcagaatgacttaccacaatggaagtttctcatatatttttttgccttataattttaggctgaatttattagaaaacatttaggggagctttcattctattttgtagaatagaggctacctcgaattaaaaggggaaaaattactagatctgccgcaaaatttaatttctaaaactcttctgtgtttggtaatagtgattgagggtggtggttcttgtttagaaaaaattca

SEQ ID NO: 156117 - DNA, 325 bp, Homo sapiens
atctctataagcatgatcccttaacctacttccagtttacactctaccaccctttatttttcctctctagtcccttttaggaaggcttattcatttttaactgacttcaattaattatcccaactgcaaagatggtcttcatgtcactcatctaatgagttgtctagagggagtggatgggtacaaaaacaggttctgctacttctggctaagggaatgcagttgttgacttgcattgcggctttggaactcttgtccttttcttcccaacttctacatcttctatcagttgtaccagctctactgtcttgcggtacgtgtttat

SEQ ID NO: 156118 - DNA, 545 bp, Homo sapiens
ggatgtggcctttcttctgtttcttttttcctggtggcttggaattggagatttacatctctctttctctctctctccccaccatccccctgtctttctcctcttctcccaccctacctcaggatagaaaaggccatattttctacaagcagggggcactctctttggtgccatttccatctgcccaaatgaaaaggatttttcatctcactggagaggtcaagtctgagacgcagactggagctaatctaagcaaatgggggggctcaacaagtccaacctgcactgccatttggaatcaacatctcagtagaaataaaatgttattttgctttgctgattcctgaaatgtacttacattccccttcaggaaatttgaggaaaagaacagtaatcaagggcaggatataagggttcctgtgtttcctgaacaaaataccatttttatagtctctcaaaagcacccagtctcaccaacagtcaatcttccaaccatcccgtatttcctacttccccttctctaacacacactccggctttaaccc

SEQ ID NO: 156119 - DNA, 726 bp, Homo sapiens
gtaaacataagtataaaatgtaatgttttttgaaaactattaggttggtgcaaaagtaattgatgttttgccattaaatggcaaaaccgggaaaacccacatagtttagtcccaatttgaaatgcttatttataattgctcataaacacacatgcaactctgaatcagctgtacatggcttctgaagactgccgtaagatttgacagggtaacctattctgtatagagttaaataacttggatcatttgatctattaaatgtctctgagtaccatttatgatggaatggagcactttggctgtaacactatctcatggaatagaagtgtgtttattctgcctacatgtgaaatataatactacttctgtttgctctttaaagaaatatcctaacagcatcttcttgaaagaataaagaacagcctgtgtatttttaggagttggtactctgcttgcgttttaagtatggaccattgcctttgtttttcagttagagtttttaagttttatttttgtttttaagggggtaaaacaatttattgatctcttaaatacatggatgagttttgtgattcccatttgacagattttaagatgtgaaaatggttaatgtctagaagcttagaagtgcagttggcatcacgtgttattttctgtttaagctaattctttgtttgatttatttaatagttcttatttggatattagtaaccatcaataaataaa

SEQ ID NO: 156120 - DNA, 467 bp, Homo sapiens
acggtatgggaagtcaggagcgcctctgcccagctgccctgtctgggaagtaaggagcgcctctgcctcgccgccatcccgtctgcgaagtgaggcgtgcctctgcccggcctcctcaccgtctgggaaatgagaagcgcctctgcccggccaccgtcccatctgggaagtgaggagcgcttctgcccagccaccgccctgtctggaaagtgaggagcacctctgcccagccccctcaccctttgtaagggaggagtgcctctgcccagcccctgcaccgtctgggaagtgaggagcgcctctgcccggccccctcaccatctgggaagtgaggagcgtctctgcccagccgctgtgcaaccttccacgtgtgaagtgacagccttgtgtgtgatctttctgccctccccaagtttgcattttcgacattaaagtttactttttaattaaaaaaaaggagatcgaga

SEQ ID NO: 156121 - DNA, 356 bp, Homo sapiens
gctgatggctgtaccatgaggtgtaggagaatcctgcttgtttgtaggaaacttacactgaagtgtttaggggtactggagcatcaggttggcaacttgctcacaaatggggagggagtgttcttttattgtacttccaacttgtttgtaactttaaaattgtttaaaataaaaaatactcatggggccaggtgcggtggctcatgcctgtaatcccagcaactctgggaggccaaggcaggcggatcacaaggtcaggagatcaaaaccatcctggccaacatggtgaaaccccgtctctaataaaatgcaaaaaattagccgggtgtggtggcgcatgcctgtagtcccaccta

SEQ ID NO: 156122 - DNA, 611 bp, Homo sapiens
cctctggggacactgagcagcttccctggactttaccaactaggtgtcagcagcacgtacccctgctctccatacccacaactgtgacaaaccagtgtggagtccccaaatgtcctcttcaggccaatctcacctcccccactgccttatccctacccatgtttgagaatcgcaggtctatataatagtgtttaatctagaatctcagtgataagacttttgagtggtttttgtttgtttgggttatctgcacttaattatctataatgatacatgttatttgtattaaaaggggaattaaaaagaatcttagcatcaggaaaaccttccaggtatttttgccataatgcaatttttgagttcctaaaaaccctcatactctacaaaagggcacaataaaagtaaaaagaagtcccatgggaataggtaagctggggcaggccactgagaacttatgcaaatttgtaaccaagcatcaagggaacaacagcaatattaaatgtttttaaatgaacaaattttaccacataaacactacagtaaatacagaactgcaccttttaaaaaatgcacaaggggggctaggcgcaggggctcatgactgtaatccc

SEQ ID NO: 156123 - DNA, 259 bp, Homo sapiens
tcaaggaaagttcaaccttattttattttacttaacaatttactaaagaatccaatgaggagaaaaacatacatcaatgaagaggccactattccctaaggaaaaatctgagcacacagtcagagagcctccagatgaagggctttgcacagggtacttcaagctccttcgtgatgggcacttcagtgacaggtgagagctggccagagcttgtggattacaaagtggaaggaactcctgctgtagcatagctctgaag

SEQ ID NO: 156124 - DNA, 336 bp, Homo sapiens
cctaaatattttggtttcttttgaaactattatacgtagcagcatcttaacattttacttcccaattatttgttactgttatatagaaaaataattaatttttatatactgaccttgtatattataattttatatactgaccttgtatattctttctctaattaattatacatattgtttgttgggggagaggatagtttccttaggattccttatggaaaacgcttgttttttgtgaataatgatagctttactttttaaaaaaatctatatgccatttatttttttgttacaggtgaatttttagaaaaaataaaataaaagtgatgaaataaa

SEQ ID NO: 156125 - DNA, 197 bp, Homo sapiens
tgttgggattacaggtgtgagccacaccacccggccaagagtaatttttaaaaaatgtttttccatgtatgagaagttgcttacaatatttagttttgtgctgtagcattgttttgctttttggctttgcctgtgtccttatctatttctcccataaactgtgaattcattgacaacagaactgtgttcatttctcc

SEQ ID NO: 156126 - DNA, 170 bp, Homo sapiens
attctgcattgttttcagccttgcagtgtgctaggttagtatttcttccaccgaccttgttaatcatctcatccatacagttgcttatgaatagtgttgccttccttgtcaataagagctatattaagagcaagcatccttttactgcttcttgactggttgtgttcttg

SEQ ID NO: 156127 - DNA, 324 bp, Homo sapiens
cattttaataaatatatagagatacaggtatagataaacataatcatctgtgtctttagacatatttgtatacagtataatggatagcatttatgccctgctcaccactgattctgattcttgcagttttatggtaattggaatgaaatcaataaacagtctacttcagtatattcagaactgtcattaaaactttctgtgatgatggggtgttctgtacattggacatgggatgtccaatacaatagccactgtctacttatggctattgagcacttggaagggctagtgatgctgaagaactgaatttttaatttattgggt

SEQ ID NO: 156128 - DNA, 101 bp, Homo sapiens
tctttgccattgttcacagatgtgattcccatctcatcatttctagattttgtgctgcagaatttgagagagtgctcactctaaaacctacaagttataca

SEQ ID NO: 156129 - DNA, 382 bp, Homo sapiens
agtcgtctgatggattttcctctttggtacacctatgagcgtgttttagaggagtgaagggcaggtctcatggacgggaatataaaggttagtatacaccagtccgtggtgtgctggagccagcttgcactagcttatttaaggggatcaccaagaatattaacaaattcgaaaatttattcatatttgcctttttccaaaaaggacttaatatgcttattatgaataatacaataattaaggcatgctatttatgtaggatagtatactgcaaatggggctgctaaactatactgattgacattattgagcatagtacagttgagtgtgtgtctccccagccatatataaacacaataataagaatagctaacatttggcc

SEQ ID NO: 156130 - DNA, 564 bp, Homo sapiens
ctgagcccttagttttaaccatcaccccatacctttgttttatatcctgtcaacttctgaaattttaattgttcacttattagagatatgaaactcactttgttgcaccttaatgccacctatattttctggttaaaatatatgtataccaacacacccccactattcttgtttataaatctccacccttccagagtctcgtgacgacagaattcatttcaatgaaattatttataggtggaagaaagtggaaggagacaatatgtatgaacacagtccctaccttcaaggagtttgttttctggttgggaaagacctaagtgtggaggttgacttagaacaagaaacaggatgtacctgcttaagtctaagtaggtgaacttaggtactagatactttggaacaagttaagattgttaagataaaaagagattttgctttgtgggcttgggaaccctgaagatgaaatataggatattgttactatagttgtttcactttcagatatttcaaatattaagattttttgattcagctatgtggagatggataacataattgatg

SEQ ID NO: 156131 - DNA, 213 bp, Homo sapiens
gttctctctatactcttaagtctctgatgcaggaaagatttggcccatgcacaattcttcttggcctcttaagaacagggaatctatgggatgccagagttccccatatccaatggctctataactccagggatatggccagtccaccagaaagaaaacactgcacattgaacccagctgcccacggttctctgcagccatcacgctccagag

SEQ ID NO: 156132 - DNA, 1706 bp, Homo sapiens
  misc_feature (217)..(217): n is a, c, g, or t
  misc_feature (225)..(228): n is a, c, g, or t
  misc_feature (234)..(236): n is a, c, g, or t
  misc_feature (244)..(244): n is a, c, g, or t
  misc_feature (267)..(267): n is a, c, g, or t
  misc_feature (279)..(279): n is a, c, g, or t
  misc_feature (281)..(281): n is a, c, g, or t
  misc_feature (283)..(283): n is a, c, g, or t
  misc_feature (288)..(288): n is a, c, g, or t
  misc_feature (291)..(291): n is a, c, g, or t
  misc_feature (298)..(298): n is a, c, g, or t
  misc_feature (301)..(301): n is a, c, g, or t
  misc_feature (320)..(320): n is a, c, g, or t
  misc_feature (328)..(328): n is a, c, g, or t
  misc_feature (338)..(338): n is a, c, g, or t
  misc_feature (356)..(356): n is a, c, g, or t
  misc_feature (366)..(366): n is a, c, g, or t
  misc_feature (369)..(369): n is a, c, g, or t
  misc_feature (677)..(677): n is a, c, g, or t
  misc_feature (696)..(696): n is a, c, g, or t
  misc_feature (709)..(711): n is a, c, g, or t
  misc_feature (714)..(714): n is a, c, g, or t
  misc_feature (716)..(716): n is a, c, g, or t
  misc_feature (738)..(738): n is a, c, g, or t
  misc_feature (741)..(742): n is a, c, g, or t
  misc_feature (747)..(749): n is a, c, g, or t
  misc_feature (752)..(752): n is a, c, g, or t
  misc_feature (755)..(755): n is a, c, g, or t
  misc_feature (767)..(769): n is a, c, g, or t
  misc_feature (777)..(778): n is a, c, g, or t
  misc_feature (786)..(787): n is a, c, g, or t
  misc_feature (789)..(789): n is a, c, g, or t
  misc_feature (805)..(805): n is a, c, g, or t
  misc_feature (807)..(807): n is a, c, g, or t
  misc_feature (819)..(819): n is a, c, g, or t
  misc_feature (829)..(829): n is a, c, g, or t
  misc_feature (831)..(831): n is a, c, g, or t
  misc_feature (837)..(837): n is a, c, g, or t
  misc_feature (839)..(841): n is a, c, g, or t
  misc_feature (844)..(844): n is a, c, g, or t
  misc_feature (846)..(846): n is a, c, g, or t
  misc_feature (849)..(849): n is a, c, g, or t
  misc_feature (852)..(852): n is a, c, g, or t
  misc_feature (858)..(858): n is a, c, g, or t
  misc_feature (860)..(860): n is a, c, g, or t
  misc_feature (867)..(868): n is a, c, g, or t
  misc_feature (871)..(872): n is a, c, g, or t
  misc_feature (883)..(883): n is a, c, g, or t
  misc_feature (890)..(890): n is a, c, g, or t
  misc_feature (902)..(902): n is a, c, g, or t
  misc_feature (904)..(904): n is a, c, g, or t
  misc_feature (915)..(915): n is a, c, g, or t
  misc_feature (917)..(917): n is a, c, g, or t
  misc_feature (921)..(921): n is a, c, g, or t
  misc_feature (1594)..(1594): n is a, c, g, or t
  misc_feature (1689)..(1690): n is a, c, g, or t
  misc_feature (1692)..(1698): n is a, c, g, or t
  misc_feature (1700)..(1700): n is a, c, g, or t
  misc_feature (1702)..(1702): n is a, c, g, or t
acagacgcccacagtgctaaggctggtgagggccctggagggccaggggtggctggcccctcctgatctgttctcactcctttgctgagaacctcccaggggcaggaggggacagctgaacttcagagctggggaggtgcccccaggtgactcacatgggaggcatcagctcttcccacatctcttccaacagcttgggcgttggcagtgctgggantacaggcnnnngccacnnngcccggcnttttttgtatttttagtagaganggggtttcaccntntnagccnggntggtctnganctcctgacctcgtgatccncccgcctnggcctcccanagtgctgggattacaggngtgagccacngcncccagctgggtcccagcatttgcgggattcaaggtggggatgtgcagtctgtcaggagtgttaaaagcacggcagcatttccagtccccaggcctcctctccttgcttcagccacgcccaccctcctctgtgcctgctcatgcccatgtgcttctgttgggctgtctgctggtccacaggaggattactggtgttccggattttcagcatgaacacagtatggggtctggcccgaggagggcctggctaacagagcatggattcaaaatcagagcagagctgggtaccgtggctcatgcctgtaatcncagcactttgggaggctgnggcaggtggatcnnnagntnaggagtttgagaccagcctggncannatggnnnaanccngtctctataaannnacaaaaannaaaaaaannanccaggtgtggtggcangngcctgtagtccnagctacttgngnggctgngnnnggngnatngcntgaacncnggaggtnnagnntgcagtgagcngagatcntgccactgcacncnagcctgggcgncngagngagacatttaatatttgtcaatctgatggattgaaatggtaggtcatttgggctttccctgcaagctccaccttccgggttcacgccattctcctgcctcagcctcctgagtggctgggactacaggcgcccgccaccacacccggctaattttttgtatttttagtagagacgggggtttcaccgtgtcagccaggatgatctcgatctcctgacctcgtgatctgcccgcctcggcctcccacagtgctgggattacaggctgagccactgcgcccggccgggttttctgtaatttctagtgaggttggacatctgttccagttacctactgctacgtaaaagtcgcggtcacctcaagtcagacaccattcttaaaacagttaacacaaccattttattatatctcacagcgttgtgggttaggaatctggacagtgagggcagggttaatcttcagttctgtgccaccagctgggatcacttgagggtgcttggctggcatacgggttagtctggggaccactgccccctttccggcatcctctgtgggttccagcatttttcttttttttttctttttgagatgaagtctcgctctgtcacccaggctaaagtgcatttgtgcgatctcagctcactgcaacctctgcctcctgggtttaagtgatcntcatgcctcagcctcccaagtagctgggattacaggcgtgtgccaccatgcctggctaatttttgtattttttttttgagatggagtttcactcnngnnnnnnngncngagt

SEQ ID NO: 156133 - DNA, 872 bp, Homo sapiens
  misc_feature (760)..(760): n is a, c, g, or t
  misc_feature (855)..(856): n is a, c, g, or t
  misc_feature (858)..(864): n is a, c, g, or t
  misc_feature (866)..(866): n is a, c, g, or t
  misc_feature (868)..(868): n is a, c, g, or t
tcacacttctggcctcaagcaatccgctcgccttggccccccaaagtgttgggattacaggcgtgagccactgcgcccagctgtgtcgagacatttaatatttgtcaatctgatggattgaaatggtaggtcatttgggctttccctgcaagctccaccttccgggttcacgccattctcctgcctcagcctcctgagtggctgggactacaggcgcccgccaccacacccggctaattttttgtatttttagtagagacgggggtttcaccgtgtcagccaggatgatctcgatctcctgacctcgtgatctgcccgcctcggcctcccacagtgctgggattacaggctgagccactgcgcccggccgggttttctgtaatttctagtgaggttggacatctgttccagttacctactgctacgtaaaagtcgcggtcacctcaagtcagacaccattcttaaaacagttaacacaaccattttattatatctcacagcgttgtgggttaggaatctggacagtgagggcagggttaatcttcagttctgtgccaccagctgggatcacttgagggtgcttggctggcatacgggttagtctggggaccactgccccctttccggcatcctctgtgggttccagcatttttcttttttttttctttttgagatgaagtctcgctctgtcacccaggctaaagtgcatttgtgcgatctcagctcactgcaacctctgcctcctgggtttaagtgatcntcatgcctcagcctcccaagtagctgggattacaggcgtgtgccaccatgcctggctaatttttgtattttttttttgagatggagtttcactcnngnnnnnnngncngagt

SEQ ID NO: 156134 - DNA, 523 bp, Homo sapiens
acatttttatttacaaactcttttctacccactgaaattcaatgccattagctgaccattcttaaaccaataaccagagataaatgattgcctcccagaatagtatcttcagcactactcacctactagccaactggatagtcttccttcccaccactgaattaacataaaattaatccatctactcctacacaagcactacagttgccatcaagatacttcctggttcccaatttctacccgttatctccaacacagatgattttcctgggaaattccttgttacacatcaatttactacagtaacactttcagcaagacaaagtaccttgtgcatgttaattacaaggggaaagctagtgcaaatggaaaattaaatacattttattgatctcttcattccagtccctggattttcctcttttccccactgtttttgtccctttgaactccctaatacaattttgattatattagttgaaacgctttcttgccataccttgtacgcctttgcttctgtttg

SEQ ID NO: 156135 - DNA, 255 bp, Homo sapiens
tgctaaaggagaagagtagttcaggtatctaaatcttaagctgtgtcaaatattgaaagtaactcttttaggttttaagttataatggtacagaggaaaaaaggtggaaatgtggaatttagcaaatatcaaataatagtgtttatgttcataaccagagaaataatgacaaataaagacaacttgtatctacggatacttccaaatgggcaaaactgttacaaaaaggagagcacttggtatactgtaattaca

SEQ ID NO: 156136 - DNA, 287 bp, Homo sapiens
tatttagaatatagcccctgcttttatttcagggaagaagctttgtcctgggagtaccaaatggcacaagccaggggccaggaagacagagcatgcaagaacacagcaaaatgtgccagaaccaaagtcaataggtggctctctaggacatcaggaacttggggtttcaaaactaacttattcttaataaacggcagtttatcagttggaatcttcttaggaaactagaaaaaatacaaaaatacagtaggtaaatatacctgtaacaagccaatacttaaacatca

SEQ ID NO: 156137 - DNA, 1436 bp, Homo sapiens
actgatcaagtatagttaataaaaggggctgggcggggtggctcacactggtaatcccagcactttgggaggccgatgcaggcagatcacgaggtcaggagttcgcgaccagcctggccaatatggcgaaaccccgtctctactaaaaatacaaaaattagccaggtgtggtagcacacgcctgtagtcccagctacttgggaggctgaggcaggagaatcgcttgaacctgggaggcggaggttgcagtgagccgagatcacaccactgcactccagcttgggcgacagagtgagactctgtctcaaaaaggaaatatcagagttgagaatagaaggatgtagcatggaaagtggaacagatgatgtttttgttgtcacaaataaggggagctaaaccttggcctgagcccttgtgagagggagtacagagctgaattgtgtggataacttacattttaggcagagggttgagaaatacccatttagctacatagagtaagttaaaagttcagaggtttttccgtctctggcgtccaaggtgtaatgaattccttggactgtactgagacctgcagaagaacagacaggagccagttgttcagaatcatgaaaaatcaagaaggctgtgattgaatggagtgtaaacccacatttcccttggaatgcaggtccaagataaatgtgctgcaacaaagcaaaatgtgtggcaattttcatactgaagttgaaccctgttggggagggagagtgggaagtttttagtaagtttgttaaaaaattgtatagggctgggcttggtggctcacgcctgtaatcccagccctttgggaggctgaggtgggtggattgcttgagctgaggagtcggagatcagcctgggcaacatgacaagaccctgctgtctctacttaaaaaatacaaaaaataaaaaaataaaaataacctggtgtggtggtacacgcctatggtcctagctattcgggaggctgaggtaggaggatcacttgagcccctgcaggggtggggttgcactgagccaagatcacgccactgcattccagcctgagtgacagagcgagaatctgtctcaaaaaaaaaaaaattaccacatagttcttattaatttaggctgtataaagtgttcgtcttagtgtactatcttttagtaaatgtaaaacttattcactgtaattaatctatgaccttcccagctacttatacatgtgaaggtagatgatagttttgttaccatggtttagctttaaaaaggagtgattacaaaaaaaaaattgagctgagcatggtggctcacacctgtaatcccagtgctttgggaggctgaggtgggagaatggcttgaggtcaggggtttgaggccaggctgggcaacatagtagagaccttgtctctacaaaataaaagtaaaaaaaaaat

SEQ ID NO: 156138 - DNA, 343 bp, Homo sapiens
atagtatgtagcggttacttctaatatgtgggagtccttattcaatcattgtgggcctgtcactgctgacactgctagataaattaaataaaataatactcctgcctcacagtatttagggaatagtgatttaatgaatagttaacactgagtattggctggtagaatcatggagttgtaacggattttagaaatactccaaagtcatgctcaagtcaggagccctttctttaatgctattgataaaaaatgagtggagagtggggataggaaatgtatcctaggcaaagataaagtggtagaggtatgaaagagtggtggatttaaatacacttaagcattt

SEQ ID NO: 156139 - DNA, 211 bp, Homo sapiens
gagatgcagctgggagtatgtgtgagtacagacacatctaaaaacacaaatacgcagatgaacacagattgggggatgtgggcgctcctcttcaatcagtctttgcagcctgggctcttgcctcgcagtgtgccgttctcatatgatatctgctcactgaatcacggcttgctgcccaggccctgcagccctggcccatcgtccaggcaca

SEQ ID NO: 156140 - DNA, 324 bp, Homo sapiens
gtcaggtggtgaaaatgttctgtacctctagggagatggtagttgcacaggtgtacacatttgtcaagctcaccaactatacacttaagatttgtgcacatactgtacgtaagccatatctcatttaacgcacctagcagaaaggaggctaggcagcgcttagtctgggatcagtcttagaatggagaggtgcttctggccaacagcacctaacactgcagctgggttttcagagagcgtggggtcctcacaggcagagcttcccatgaggagcacagagcaacagttcctgccaggcacacagtggggaaggcctcgccaacc

SEQ ID NO: 156141 - DNA, 208 bp, Homo sapiens
tttcaattttgcattatacattattattaatttttaaggctagttcattaaggaagttcaaaataatatgaacaaataaacatataaatatcaaatacttgttatttaactacttgaattagtacacaaagcattaataataaaaaccacaggccaggcacggtggctcacacctgtaatcccagcactttgggagaccaaggcaggt

SEQ ID NO: 156142 - DNA, 465 bp, Homo sapiens
cattttgttgggggtgcagggcatttagttttctttaccacgaaatcatggtgcaactaatgaaattatatttgtcctcacatctcgttgttctacttttccccactgcaagtcttaaccccttgaggaaaaatctgttttctttcatccgtttcataaaaggctgcaatattcagaaaggtacaaacacaaagtcatctatctgcttttcaacaaataccaaggctgtcattaggcatttgcatctcctatcagtgttaacacttggagagattaattagttatttcaggatgcaaagtacctgtatctaactacgaaaatcctgctaaagaactgagttcaccttaatagtttcaaaaataatgcattaatactgtccctcaaagcatccttcatttctcacttgccttagtcatcagcacttctccaggatgtacgtttttaatataaaaaataaggtaaaa

SEQ ID NO: 156143 - DNA, 128 bp, Homo sapiens
cataacagtgagtacaatttttctctcccatcctcagccctgccttctccttagtcccaccctcaaagttccattgcagcagaacctctctcaaactaaccaaaacagttgccttttgatccagtgtc

SEQ ID NO: 156144 - DNA, 191 bp, Homo sapiens
ggctaagattacaggtttgagcaactgcacctggcccagtgggtgatatttaaaaccataattggtgtaacatttcctgttctgttaaaatttctgaaataggattttgttgcaaaaattatggcattttggctgggcacagtggctcacgcctgtaatcccagcactttgggaggctgaggccctggatc

SEQ ID NO: 156145 - DNA, 338 bp, Homo sapiens
cagtggaagggggcggcctggctcacagccgcacagcgcgggaccagcgcagtggcagagggcacggcccctccagggtttgagtcacgtggcctcctggaaaaggcaactgtgggaacaggcctcagagcagtggctgcccggggctgtgggccagggtaggaaatccaccccaaaggggcccaaaggagtgttccgggctgtgggaacatatcttagctgtgctgctgtctacacaactgcatacactggtgaaggctacacctaacagtgaactttaccatatgtcagttgcagaccacctgatttatacacaaagaacggaggtctcggccggg

SEQ ID NO: 156146 - DNA, 602 bp, Homo sapiens
agcctcccaaagtactgggattataggcatgagccactgcacccggcccagagtcagttattcttagagcaggtgttttggcttttgtctttaatgcttccctccccactttaacataactgtaatatataattattggggaaaatttagaacacatggagaagtaaagagtgaaattgctgactgccctattaccccaacctccaccctatagagatattttctccccatccccccaagggcagaggatggagatccctgggcttctccaggtggggagtggtaccatggtctcttcaggtttcgtagcagacaggccccattgaccataggatatgtgtccccaaggtggttagaggccatcacctgcctgaggtcagctcaatgggcagggctgggcatctcctggtggtctacccaccatgcctgttcatcaggctggggtctgacctctttctggtgtctggtgctgatctaggcaaggtgacaagtgctcaacagaggagtcctggttccttcaaggaagctgggaagtgtaagacggagcaggctgcgtttgtggtttttgccaaggcttgacttttgaccacttttctgaaaaa

SEQ ID NO: 156147 - DNA, 583 bp, Homo sapiens
agcctcccaaagtactgggattataggcatgagccactgcacccggcccagagtcagttattcttagagcaggtgttttggcttttgtctttaatgcttccctccccactttaacataactgtaatatataattattggggaaaatttagaacacatggagaagtaaagagtgaaattgctgactgccctattaccccaacctccaccctatagagatattttctccccatccccccaagggcagaggatggagatccctgggcttctccaggtggggagtggtaccatggtctcttcaggtttcgtagcagacaggccccattgaccataggatatgtgtccccaaggtggttagaggccatcacctgcctgaggtcagctcaatgggcagggctgggcatctcctggtggtctacccaccatgcctgttcatcaggctggggtctgacctctttctggtgtctggtgctgatctaggcaaggtgacaagtgctcaacagaggcctgttttagaagtttcaatagcatagtggtcaagcttgtttctcctgggcagcgctcttccgagggggtaccgagctc

SEQ ID NO: 156148 - DNA, 532 bp, Homo sapiens
ttcagggtgttacttctcattttagcggcaatacattttgcttccgtgtgatgaaacatcctacccgtttgcatgttgattgtgtctcatgtcccatctcgcaacaggcagtaaaaccccatctccagcccaaagcaccttgctaaagagcctgcaccgcagccactgtgcctttgcgctctggctcgtgcgacctctccagatcttcttcctcatttcgtctgttcactggggccctcttctccctgtgactcgcctcagccttttcactccttgctggacatggagtaggactattgggaggatgaaatagacgaatgtgtggcaagcatgtaggagagcctgtggcacagaagcagcactcggtacatggtgcttgttattacatccctactgatgggagcaagatcccatcagagtctcatgaatgatatttcttaagatttgctcctcctgaatcagtttatgtttttctaggatttcctgctgtctcaggtagtggtcatgctgcttttgatactcttttaactca

SEQ ID NO: 156149 - DNA, 393 bp, Homo sapiens
ctaccaaatcctgagtcctccacccaattaattcaaaatctgtcaaaagactgcacacatatgaacatatccatatacacacagactcacataaatatacagacacacatatagtcatccatccctcagtatctgtgggggattagttccaggacccccacagatgtcaaaatccacagatgttccagtcccttatataaaatggcataatatttgtatataaccttattcatatcctcccgtatacttttaatcatctttagtttactaataaaacctaatacaatgtgaatgccatgcaaatactatttatttatttcagacagagtctcactctgtcacctaggctggagtgcagtggtgcagtcatagctcactgtaacctccaaatcc

SEQ ID NO: 156150 - DNA, 345 bp, Homo sapiens
tgagagaatgtgcactccctggcggggatcaggggtgcacagggagcatctcatttcttggcattggagaggcgggtccaggccccagtcttccctcattattcccaaccagaggagcaggacgtggtgagtctccagggccaggcagcctctgtgttgtctggagtggggacatcatgtggcacggtgatgccaggctgcgtgtcctggccttctttccccgggacctttttttttttttttttggagacgaagtctcactctgtcgcccaagctggagttgcagtgagctgagattgcaccattgcactccagcctgggtaacaagagtgaaactccgtcaca

SEQ ID NO: 156151 - DNA, 341 bp, Homo sapiens
ggagctcctggtgtgatggaggaggcatggccctgtcctccaggacactcctgtctgatggggcaccatgacttctgtttcctgggactctctgtgtaacagaggggacacagtcctcttgttctgtaggagctgtgtgcctgaggaatgaagcatggcctccatcctgcaggagcctccaatctgatgggggatccatggccacttccctcagagagattccctatttgagagaggagccctgacctctgtcctcaggaaggacccctgtctgatggaggctcatcttgtcctctcactcaagaaaccccatttatggccttcacctttgaccccttcac

SEQ ID NO: 156152 - DNA, 299 bp, Homo sapiens
ctgactcaggtcccaatcattgcaggatgttcaaggacgggagctggtgccatgtcctaccctgactcagggagtgattcagactgagagttggctaaatctagaaggatttttggattgcattataaccttttaggtattcatcttatcctttagctaagaatagatctggaccatgaacaagcccttctgaaatcatcctcctccactagagttctgagctttctttccgtgtccaatctagacagtagggatcactgcacgttgaactttcctcgttctttcttctgcccagtttg

SEQ ID NO: 156153 - DNA, 410 bp, Homo sapiens
  misc_feature (354)..(355): n is a, c, g, or t
  misc_feature (359)..(360): n is a, c, g, or t
  misc_feature (365)..(365): n is a, c, g, or t
  misc_feature (372)..(372): n is a, c, g, or t
  misc_feature (378)..(380): n is a, c, g, or t
cagatcccggtgttccttgtctgtgaattgatttgtctattttgttttattttttgagactggatctcagtctgtcacccaggctagagtgcagtaatttaggaattaacattatgacttgaactaggaagatggtagtgcgaatgaagaggaaaggccgtgaaagatatcgttaagtgaggcaggggggtgaggacaaaagagaattagcttccaaagacaggagttctagacctgggtattctgtggggcctgaactcccagccttggttttgccatacatcaatctctctcttttttttttatctttttttttttttgtgaaatggattctggctctgtcccccaattggnnttgnnggggngcaatangggccnnnggccctttaaacctccaaggcacagttatt

SEQ ID NO: 156154 - DNA, 501 bp, Homo sapiens
tacctcaaaaagtaaaataaaatataaaatgtaatttggtcagggaaggctttactggacactgacatttgaatagagatctgaagaaagagtgaaaacaaggcatgcagatacctaatgagaaaaatggtccaggcagagggaaccattagttcagaggtcctgaggcaggtgtgtgcgtggcgtgttctaggaatatctaggcagccacggtagctccaatggggtgagaacaagggagaatagtgacagatgaggtgggaggggtcatcatgcacggctttgtatgccattgtgaagactttggctttaacattttcgtgctttgggaagacactgagggttctgagcagaggagtgaccaaactgttaaaggatcactctgttgctgtgtggagaataaactgtacagagcaaaggcaagagaccagttataaaactaatgccataatccagacaacagatgatggtggtggcagcagcggtgatgagaatggcctg

SEQ ID NO: 156155 - DNA, 520 bp, Homo sapiens
ccacctcccaacctttcccggcatggggtccttactgcgccagtctgcaaaaggaacccttccgagggtccgcttgtatcccagcccgcgttgggcagtcacccgagggtaaacccgggaccctggcctcccgccacctcgcagggcgccggccttgggatggcgtaggggttgcgtggattgggggtcgttaattttgcaaagatgacacctccttcttccttgaaagcctctttttgaatttaattcagctgggaccctcttccaaacattcaagcaggatgtcgatcctagagtccagaacggggacttccaccctctccacagaccccagcccagcgtctatgggggacccagcgcagagaggcacggaaaacgggcacctcccagcagacatggtggcacggggggacaaacgccataacagagacagtcggaagccctccagagcccagggtaggcaggaacgtgttcaaagaggaggagactccggacaggggctggcatgggagtgggggta

SEQ ID NO: 156156 - DNA, 557 bp, Homo sapiens
cgggtctggggatgctgaagctgttgggggtctgtgaccagttttgtaaatgaagaaaggtacttcagggattcaggttgaagccaacagacctttcccagatgccaagggcattgttctggccaacacccctgggcctgcctttgaggcatcttcagtagtatcagagatgctgacttggcattccagggaggtggaacctctggtcctggtgattttccttagggccttagattaaaacacacacacatgtatgcatgtacatacacatgcacatattcacatcacagatgtacacatcacacactcatgcacacatcatatatacacacacacctgcacatctatgcattgtaaaggggactccctcaattgtcaaagtttatttcaatgctagaagaaatggcaaaaaaaggacaaagatcttcaccaactgatgaatggataaacaaaatgtcgtcttcccagacgacggatgttattcagtcataaagagcaatgaatagtggacatatgcggcaacgtggatgaacctcaaaaccacatatgatatgatt

SEQ ID NO: 156157 - DNA, 219 bp, Homo sapiens
aacggagtcctatctattagttggcaaagtggtcatttgctgttggcttagatgaaaacttaccaatatcacttgtgacattcctgaagtatagaattatcttgtcaaaactttagttataaaaaagaatctttagttttctttaaaaacttttaaaaaattattttcaatctgttttagagacagggtctgtcttcctttgttgcccaagctggagtg

SEQ ID NO: 156158 - DNA, 459 bp, Homo sapiens
ttcttccaacacatttcaattagaacactcttaggatgtcgttacagctatgctctatattggagtctctgatgaaatcacatgtctaaaaatctcagcatgcttttaatcaacagaatatacacgtgttttctttttttactataaaggatataccaaacaactttttgaagactttacttcaaaaaggcacgtagttttgcaacatttttggtaagtctttaattatttcaaaatgaaaaattgaaaataaaatgcaattatttactcagcccccccaaaaaaaggcctgtatggggaatgcatgtggtgtgtgtgtgtgtgtgtgtgtaagtgtgtgatttgaagaattgaaaaaattttattggggttttgtagcatcactttgatagcatcctgtaattttgtattgtgtttgaaataaaaataaagtgaacacactgataaaagaatttgaaa

SEQ ID NO: 156159 - DNA, 256 bp, Homo sapiens
acaacatccagaataccagagagggttcctgacccaattccacaatcccgcatgttcccagagctgccctagaacaaataaaggttccagacctagaattacaggggcagaacacagagaacccctttttccattttaaacaaactaacaagcaaacaaacaggagaaagaacaattctaaagataaaagttatgacagaaataatataaaatacccaagccaaacgagagagccaagggctagtaatctctgcca

SEQ ID NO: 156160 - DNA, 198 bp, Homo sapiens
agaaaagcaaactgctactctgtgtgtggtctgcagaccagccgcattggcttcatctggttgctgattagcaattcagaacctctgatactaccccagagctattgaatcgtattaaaggttcagagtagccaggcatgatggcacacagctgacatcccagctcctcaggaggctgaggagggaggatcacttgag

SEQ ID NO: 156161 - DNA, 386 bp, Homo sapiens
gttctttttgagagggcttcttgtggcaattgctattctctgtgagccaacctgttacgaaaaataaaggtaacttttgagaaattaatatgaagttataattcagtggtatatggaatacatccagaatctatcccatgttaagtagcatgttctgcattttcagaacggctatttagaaagagcacctcttgagaggctgccactgattagctctgtgaccttggatgagtgagatcacctcttggggtctcctgtccttgttagttaagagtgacccgaaaggccctgacattgcttcgggcactccaattctagatcctctagctctggggaatgtggctggctcttacttcccctgctcccgtgctggcttttccttcttg

SEQ ID NO: 156162 - DNA, 375 bp, Homo sapiens
tagctgggattacaggcatgcgccaccacatcctgctaattttgtatttttcgtagagacagggtttctccatgttggtcaggctgatcttgaactcccaacctcaagtgatccgcccatctcagcctcccaaagtactgggattccatgcgtgagccactgtgtccagcaaaaataaaatttagaaagagagagagagagagaaattaacattcctgataaaatggtaattttgtgaactgttgggcttgcttttgggcacccacccagcggataactgtcactcacaggtcaagtgacctgtaaccacagggtgtttctgtgtcgaggccaatggtagttcttgttccttccctgagtgaatcttcgaagggg

SEQ ID NO: 156163 - DNA, 566 bp, Homo sapiens
tcatgttggtaactagggtgggagtacggaatcaaaaagcatgcagtgagcctggaggagggattacagagtctaggggaggatgagtcctgaacaacacctatacagtaaagacaaagaagaagagatggattttgaaatgttgaggacaggactgcagctgatagaggttatatgtttggggtgggtatgtgtgcgagggaggcaatgtttttctttctagttctgttttcaactctagaaatctttgcacttattcccataaaaactcttaaaattttgataactatgctaggaaagaaatatatataactctgctttcctatgcctgtgacattgtcttgggggagtgattgccccccacgccagtggcatgtagtactgtatagtgttgtaccaccatcacttttatctaattccaagacatttcattaccccaaaataaaactccataaactttaagcagtcatgtcccattcccttctctccccagcccctggtaaccatcaatctactttctgtttctatggatttatctgtggggaagtgattctgacctcctcctg

SEQ ID NO: 156164 - DNA, 490 bp, Homo sapiens
gttactaaaaaccaaattcgtcaaagtttacttttaacttgttcatgacttcgtttttaaattttcatcaaataaagatataagtaggtttttttttttaagttcttcgttccatcaaactcctgacctagtgatccaccctcctcggcctcccaaagtgctgggattacaggcatgagccaccacagtttggcccccttctgttttatgtttgggtttttgagacaaggaatgaagtgggaaccaaattaggtaatttggggtaatactgtctctaaaatattagtaaaaacaaagctctatgtaaagtaataaagtcataatggccatataaatttcaaaatccacactgggcttcttatgcaaagaacacggtacaggacatctaggtcccacattcattcaaaattctggttcccagattcaaaattccaactgtttatatcaattcctacatggatggcctcccctcctcagatactgggcttcc

SEQ ID NO: 156165 - DNA, 349 bp, Homo sapiens
ctgcatgtggagacaagacaactgtgagaggaattgctaagaataactctgggctttccggtcttggtaagtggatgaaggctgaagccccattcaccaatggaagacgcgtggttttggtaggaaaaaccataagtccaatttttggacatgctgatgcctgtggattttccagatggaaaagtctgaaaggtagctggatacatgggtgaggctcaggaaagatggttgcattgataaaacagtgggcctcttatgcaaggcccagagcaggctcctccagtatctgcagtaaagccattaccttcactctctcttgacccaaccctaaccgtttaacaggagcact

SEQ ID NO: 156166 - DNA, 311 bp, Homo sapiens
aggtgggagtcggggctgggggagagagcgcgcgcgcgggcttcggcggggagaggggggccgggtcatgtgatgtacagacacccccgctacaggctggctgcaggggtgacgtcaccacccttgactgcagggggtggcacttccgctccctccccagctgctccccagcccctggcaccgccggctggagccctttcgcagtttgagtgggcagagggagagaggggttttccttctggccccagcccgactgcttctcccgccgcccggagtccccgccctgggaccggaatgggagccgcggccgc

SEQ ID NO: 156167 - DNA, 415 bp, Homo sapiens
cttgaaaccctttaccatcttgacttctatgatgacatgctgtcctggtctcctgccaccacccgaacactcactctcagcccctttacagcctctacctcccttcatggccattccatcctaagttcttttctctccaagccctctgacattgagatctcacatacacccaaagctttaaccatcacctttgtgagaatgattccaaaacctgtagctcttccttttctttcacactcaattccaaagttcagctgccttccatatgtctctccctggaggctccactctcccctcaaactcaatggcttagtaataattacagtgaaaatcaactcctgtcctgctccccaaaagaaaccactctcaagcttttctctttttagcgtctagaatgtttgcctccatatctcaa

SEQ ID NO: 156168 - DNA, 549 bp, Homo sapiens
atagaaaggtatgaaataacagaccacattctgggagtgaaagggatttgggtaaatggcagcttcagacatgcaaaggatggtcaggagaaacaactggaaaaactgaaaaaatctataaaggattttggtatgttagaatgtatcaacctgatcaatgagtaatgtagattcattagggtattttaagcatttaaagaacataatcggtcattattttagatattccaaacatctaaacatgacaaaggcaaacaagagaaacaggagttagctaggcacgatggctcatgcctgtaataccagcactttaggagaccaaggcgggcagacgcttgagctcaggagttcaagaccagcctgggcaatgcggtgaaaccccatctctactaaaaatacaaatattagccaatcgtggtggcatgcatcagtggtcccagctacctcgggaggctgaggcaggagaatcgcttgaacatgggaggcagaggttgtagtgagccgaggtcgcaccatcgcactccagcctgggaaacagagtgagactct

SEQ ID NO: 156169 - DNA, 289 bp, Homo sapiens
atctcaatctccatctcaagtctatcttaatcattgaaggagtgctctccatcttcaagatcctaaattaaacacctgtgtgtttctaatctttctcttggacctctgtttccacaatgagaacacgccagagctaaccagctggagaccacgtggcacagacatgagccatcctggctgaggccatcccggaccagctgagctgccaggtgaccacagacacacgttcaggcccagcaggtgtcagccacgcctggccaggttagcaggactgcccaactggcccgtg

SEQ ID NO: 156170 - DNA, 448 bp, Homo sapiens
ggaagtacggatgtgggaagtgcaggggacttcagatcacggggtgagggaggaggctcactgagagagaagaccagtactgtgctctgtggggccagctcatgagaccgcaaagatagtagcagctttgatgccaggctgggaattctgcctgcgctgttgggagccagtcacgtgttccacacaggtgagtggcctgttcagattctgtccctgtgtgctccatcctagtggtacctgggagttgtcatctccgtgcctctcttttttctgtccccaaatctccagttatcagtctttctattgcacctaaaaaaactgcttgcctctctccctagttgtatgtggtccctgtgtcctcatcactcatccatcaagtgacaaaactcttctcttaaccttcagccttggcctcctctggtctaccctttccatgctgccagaggga

SEQ ID NO: 156171 - DNA, 545 bp, Homo sapiens
ggagagcagagccaggttcagagaaggaaatttgggttttattctgggcataatggaaagccactgaggggttgattttaggcagaaaacagtgctgtggccagattttaatttttaagagtcacacttgctgctggttggagcacgaattggacgggacaaaaacagggataagggaacccaaataggaaggttttacacaaatccaggccagagacaatggtggcctagaccaaataaaatggacaacagatgaattcaagtgatattccggtggtataactgatggaattcatggatgaactgagtgttaagcatggggcttcactatagccacatttagcttttgcttttggttgaacagcggtgtcattttccgagatgggaaaagctggggtttaagcagaaaaatgaagagttccactttaaatatgttaaatgagatgtttgcgtgacacccactagatgtcaagagagcagctggatatgtaaagtagatttggaggaaagatctaggatggagctgcagatctggtagttgtcct

SEQ ID NO: 156172 - DNA, 200 bp, Homo sapiens
ttatgcgaaaatctccaccaggtggcgggattcccgatgaattattcttttggcccgtcggtattttctagtcaccagatccaaacagaagagaaatatgcaccagtaagggtctctgtaggcctagtgcaattgttccaaagaagtcacagaagaagacaaaggaggatgctgtggcccagtgggcggggcctgtcagg

SEQ ID NO: 156173 - DNA, 403 bp, Homo sapiens
ctaaataaattatttagtaacaaccttgcatcatagctttagattcactaatgagccaaggtagctaaagttctgagaagctttttgttttttaaagatatgcctctcctccccacccccaatacaataacaaggtaactttaaactatctatcccacctcaaatatcccccacagggacataatataccctgtatttgaggtgagatagtgttatccatagggacataataagagaaagctgtatttcgttagttttgtttttaaaagataaggagaaaattagttttagctacccttgaactttttgaaaaatggcattgaggaaaaaaaaagacactgaattgctgtgatttaatatctcccttctgtgatacctgttcacaatattagatattacttta

SEQ ID NO: 156174 - DNA, 334 bp, Homo sapiens
agatgatgaaaacaactatctttgccaatatcaacttaacaaaactgggaagaggtgggatttgtgaaactaaagaaaaaagaatgttttctggaaagagctcaaggacaaaggtaggaaaccttgtcacaaggtacaaggtgagtcttcgacaaacagaagatccttgaaaaaggtacaaacactaagttcattactccttgtctcccaaaaggatctaccttctgccacctgtttataacatatccttcacagatgacactattaacatcaattcctgctctaactttttagcaatctcccttaaatttcattgacaagtaaaacaagtggg

SEQ ID NO: 156175 - DNA, 183 bp, Homo sapiens
tattgggcacttaactgcatgatgggtaccgtcttgtttctgtgtttacttgcataatttcggacagtcttcagaaaaaacatgtaaattatcccatttacaaagattaaagaatttgcccaagggcacacagtagcaacagagtgtcaagacgtgaggccaaaccctttacagactcttaag

SEQ ID NO: 156176 - DNA, 246 bp, Homo sapiens
ggataccaagaaccaaaatatcacataaagttatcttttatagacctgtcataccaagtctcagacaactagaaacaaattttaaaatatgttacctcttcacaacaaccctcttcattcgatctaggtttattgtccttccaactcaaaccaacaagacaccatacctcatgaagtagtaattatactgccacaaatggtgacagattaatcatattctctctgaaggtccctgcaggctgcagt

SEQ ID NO: 156177 - DNA, 509 bp, Homo sapiens
agaaaaaagtgtacataaataatagagcaaagtgttggggggaagaggggatataaaggaactctgtaattactgtacagtgttagagaaataatctcttaaaaagtaaagtctgttttttaaaaatatgcaagatttgggcctcactaaatacatcttgcgtgtatgaagttgaggccttggaataagcattttggtcaggctctccagaggatctgcctgtattctgaggtttgagaattcctggatatcagtccatctcctttcaccatctgtttcattctaagaaagagcttaaaggggctttgtctagagaactgtctcttgtgtgttaggatgtgtttcatctttcagaaggtggacaaaaagcttcctgctaatgctagaaatatttgctgcaattccacactgacagttgaaccacagtaaagacaattcaggcaagaccagtttcagacacaggaactgtcaattttcgaacgtgtgcagcctttcttcagaagtgtgcc

SEQ ID NO: 156178 - DNA, 360 bp, Homo sapiens
tgtcatgctttcactgtcaacagggacattatggtattattccctatcctcctcttttatgtatggacttcaattgagtagttttaattgcttttttttttgagatggaatttcgctcttgttacccagccggggtgacagagtgagaccccacctcaaaaaagaaaaaaagactcgagaaatttggaaaatatttaaaactaaatgaaaacgaaaaatacaacttatcaaagtgggggggatgtagtaaaagcaaggctggaagagaaaccggtagcatggaatgtatatatgccaaagggagaaggatataaaatcaataatcggcttccacttcgggaaactagacaaagggaaaca

SEQ ID NO: 156179 - DNA, 516 bp, Homo sapiens
gtcatttaattgtaaaccaactagcacccacccatccaaacccagtgctagaaaagaaaaaaaaaaaaaggtgttgacggagaggtctgcagtcttcaacaccttctgtttcagcagctcctgcaaatcctgtcccttcacttttcttacctatgtagcccactagtagttaacaactgtcaggcaggcaagagtcactgtggcccagaggtcaccaatcttattaaatctctatgccgccactaggactaagtaatgcccacactgctcagagcaaggcaggggggaaaatgattgaagagacagagttagaaaagccagagcagaaatgaaaaacgaataagaagtgagtaagtggtagaaaaaccaaatacttccacacatggactgtccctacctttcatctaagaatacaacaatcagccgggcgcggtggctcacacgtgtcatcccagcactttgggaggccaaggcgggcagatcacaaggtaaagagatcgagaccatcctggccaa

SEQ ID NO: 156180 - DNA, 645 bp, Homo sapiens
cagaattatgttactaccttagttaactctagagctttgagtggcttgtttttaacagactgatgtaattttggagttctttattgataggtatatgtgaacgtttgtttatttaacctgtgtgttttgtacttcctatactggacataccattttattttccactggatttgagattcagtcttgactgaactattcactaacagttgggcaaattactttagttctctgggtttaagcctacacaccgataaaataaaatggaaaaaataacatctatctcttggggttataattaggattggagatattattaataaattgatgaattgaatacctagcacatagaaagtgttaaataactgatgattatttaaattggagaaatgttcaccatatttagaaaatattaaaacttttttaaacaatttccatctttctgataaatttgctacatttttcttcattcacctcgtgtgcttctttatttttttgcatgttctctgtttttatctacctaatttccccaagtttatctttgaacctggagttaccgtctcaccaatactatactggaagggaaagagattattccttaaaaggaaatcagtataccgttacaaagaagtaattgatgttccaaaa

SEQ ID NO: 156181 - DNA, 231 bp, Homo sapiens
caaaagccttgtcaaaagtccaaaatatactgtagaagtgttttcccagtatacataactaagcaaactctctaatgaattcctaatgaaagatttgatggcagtttattagaattttgtccgaaagggaaagatgttacaatgttaataaaattctacaaacttcacctcaggaagtgtaacttgacttctttttaaatatctctttagaaataaatgccctaagtcttg

SEQ ID NO: 156182 - DNA, 334 bp, Homo sapiens
caaaccagggacggagactgcacagctgcacagctgcaggagggttggctctgaaggttaatcaaatggatacagtgcttggtgaagtcagtctcttgacggagacagtggacagatttcagaaatggagagtaggacacagctggtctacctgatgtatcttgtaccagtttccaaaaatattgccttccctgcctatctttggagacagaagttctgctgcaatgaatgcatttctatgacatgcttttcaaatttctagagtcatcttttaggctgtaaataacctgtaatagacataacgccataagtcacgttaaattaacttaaattt

SEQ ID NO: 156183 - DNA, 413 bp, Homo sapiens
ttactcatgaataaaacatgaaaaatactcatactgatggataacactttacacaacactgaatcaactcccctttgcttgcctcctcctaaaggactggcttaatttcagtagtagaacccaaacatgaatcaatctcatgactaagcattaactatgcatccatttagcaaatgaaagtttattttagcatttgaaattctgtggttcttcaggaatatagccagataaatgatttttactaacaaatgcaactaacaccatttcatctcctctctaggaatgactgaagactcttgactatcatctattcagcacctggaagcattacctttttgtaatacgaaaagaaaaacagctgaaagaaagaaaatatacttgtcccttcaaatatagatcatataatcaaatac

SEQ ID NO: 156184 - DNA, 195 bp, Homo sapiens
agagacttctttttcttctgctcataaagatttaaagatttgagtttacagttcctggacccaccacttatttgagagaatgttgttaacacaaggatagaaaaacaagcatcttccttcaactcagaggtctatagcagtacacttccaataaaacgcgtttttgcttaagctagagttgtatttctcttctct

SEQ ID NO: 156185 - DNA, 591 bp, Homo sapiens
catgacttggatagtatcttttgtagaagataaaattcttttcatatagatgtttttattatttctgattaaaaaccaaaggcttctataaaacataatcttgtgaaaaattcctgtggaacactaaagtttatttagatttgtaattttgtatgaatcattgcttgatacagtaatagaaaaaaagtccagagtaatagataattggcaatcctttgaatatctttaaaatactcagttgtttcaagtgggtttttgacagcatctatatataattcaattaaaatttgagttatctggccagtgtctggagtgtgtaagtatttgactgaaaagataccaaggtaaaactgacctttagttacatgaaataaataaagggtttgacttatttattctgtctagattagaaccactgtatctccctactccaaaatgtactgtggaaggtatgggcataaccagaaagtttttcagaaaggatctctgggtctctggaaatgcccagattttggttaaataccgatttctttttaatagaatggaaagaggcagttttaaaaacagaagatttaaaggccgttcttgtca

SEQ ID NO: 156186 - DNA, 598 bp, Homo sapiens
aatcaatagcgatgccactttattactactactagtgtagggctattaatactactttagcgctactattactttgtcagtgctaattactactttatctgtagcagtattaatttgaggtaattacatacaacctctttacttcctttccaacaagctcgtaagtacattcattgcacatatttttgagtcccaatcattctcccagtagtgtgctggaagctgtgttcagggagtttgaggctctcatccaaggtgtttcagtggcagccctgttcagtgttgtcctatagaaacccagtgcagtgatcctgaagagtttagctttacattttaaaattttcattcaatgcaaatcaaaccaaagtgattacttttggcagactgacaatctgttttaccaaatctatgtaatgcattttgaaggtctgtttagagtctatgataacaaattgctaattatttccagagattttcaatgaattctgaagtctgtcaagtgtggtgattatagtactctgaaattgcttcaaaaccatgaatattgaatactcctacttacaagatgacctgtatcatcaataactgagttaccata

SEQ ID NO: 156187 - DNA, 309 bp, Homo sapiens
ccccactatatacaggacactccaagatgcttacgaattcatttaattatttttaatggtcacaaccatcttgaaatgtaggcattattgtccaagatgataaaagcaaaactcagagaagttcaacaacctgtctgaggtgacacagccaataagcgtggctaaacctagattctatcccaggtttacctgacctcatacctgcattagtatatcattatgcctttggccatctcattataaaattaacttcctttgtatttctctgttcaatcaaaaggtaagaacaatgaaagacaaagggaaaca

SEQ ID NO: 156188 - DNA, 170 bp, Homo sapiens
caccccctcaccactttgttcagtgacttcatccaccaaatattctatttcatcactcttaagttctcccacaaaacactaggacataagaaagaaaagaagcttttatttttatttctttctttcttttactttatttatttattttgagacagagtttcgctcttgtt

SEQ ID NO: 156189 - DNA, 390 bp, Homo sapiens
caggctggactcaaactcctggactcaagtgattttctcacctcagcttcccaaagtgctgggaattacaggcatgagacatgagacactgtgcccagccttgttttatatttttaatctaatatttaaatctttgatccattttgagttaatttttgtatatgatgtgaagggcaccacttcattattttgcatgtcactatcagctgtcccagcaccatttgtctaaaagataattctttctcgattgaaagaatggtctttacactttttgaagacaactcaccatagatttacaggttcaagcgattctgctgcctcagcctcccaagtagctgggattacaggagcatgccaccatgtccagctaatttttgtatttttagtaga

SEQ ID NO: 156190 - DNA, 436 bp, Homo sapiens
ctggtacgatttaaaatggtgggcatggatttcatcccccttcatctctgaagacactttagatgggaagctgaaacacccatctgccttctccaagtgttcaaacccctgactccttctccgagttgagactctcattggcctggctgacattggactatacccatagatttgtcatttttctaattttcctgctcctctcatggaactagaagaagttctgaggatgtctctatatcaccagagggcttcaaagaaataagaagtggtgggaagcatttcccatcttcttttcagtcacgttacaccaattttctttctagctctcttttctggggggtcttcctggttctgctcctctattcccagactctcactccccatcttgcgtttttgctacggttggaggcgctctcctggtagcccctcagagaca

SEQ ID NO: 156191 - DNA, 252 bp, Homo sapiens
ctcagtgccctccctggaggattaagtccaaaccccttagcttaacactggaagcctatcttagaatattactccctgtctgcttcccaccaactcccacgcctgatatatattttaaaaaccaaatactctatcctttgagcaagctgaccttatgaacccctaaaaactacatgtgaaaatttttgcttgtgtgcatttttaccagggatgaggtccaatgctttctctgtttctgagaagatctatttt

SEQ ID NO: 156192 - DNA, 961 bp, Homo sapiens
gaaggcagcagtgccctggcctggccacccgcgaacccctctgtccaccccatgctgcgtggcacagggcaggcgtggggcctctagctggagccttgagtgggtggatcctcggtggggctttaaggccaacctgtttatgaaaatgcatggggactgactgcagatgcacagacaactcagatgcacagacgcccggacgacgtggacacccagacgatgtggacgcacagacgacatggacgcacagacgatgtggatgcacggacgacgtagacacacggatgactcatccacagatgactcagatgcacggacacccagacgacgcggacgcacagacgacgcggacgcacagatgacgtggacgcacagatgacgtggacgcacggacgacgtggatgcatggacgacgtggacgcacagatgacctggacgcacggacgacgtggacgcacggatgactcagatccccagacgactcagatgcacggacacccagatgacatggatgcacggacgactcagatccacagatgactcaaacgcacagatgactgggatgctcagatgaccgctgctgtgctgccaccccagggctctctgggcgtttcctgtggtttgggcaccaggagcctgggagtcccatgctgcccccagggcactacctcctgggcccagccctgcatccggtggcagggctcaccgtcatcaccccaacagtgcagggtggtctcagggacctcctctcatcattgccaagaactggctccaggatgtttccatgtggccggctagtatggccaaagtggaccctggcgtgctgtccccttggacgcctccaggccctgcccagcacgtggggctcgtccatcctgtgcctgaccatgctctgccatgcggggcctagcccagccccccagccctgctgcttctccccaccccacccccgccacctcca

SEQ ID NO: 156193 - DNA, 591 bp, Homo sapiens
  misc_feature (1)..(1): n is a, c, g, or t
ncagcacactttattaaggacctgtagctgtgcaggatgcaaacatctgggcatcagtgactttcctcctgcccccgttgtccctgatggtggcagaagatcccagctgaccacagcccctttccctggggtcagagggagaagacaggcgcagtcagcaggggatccaaactgaatggtgatagagacatggctcccaaagtactgttctcctcattctaccgccactggctcaggtcaagccccactcctggcctggatcattacaattgtcttctagttgctgtctttctgctcagtcccaaccctccaagccatcctgttattctgaaattcacatctggtcattcttcccagcctaaggcctgatccactgctccccatgtcctatgggaaagtccccattctctaggtggcactggaggcccttcaggatctgtctctaatgtcccttccacactcctttcccagctgtccccaccacactgctgttgtctgctgcagcagacaacagcagtaactcttgtgttcaccaggacccagaacctttggaagggataggctcgttggtgacattgtgacttcagattt

SEQ ID NO: 156194 - DNA, 590 bp, Homo sapiens
  misc_feature (1)..(1): n is a, c, g, or t
ncagcacactttattaaggacctgtagctgtgcaggatgcaaacatctgggcatcagtgactttcctcctgcccccgttgtccctgatggtggcagaagatcccagctgaccacagcccctttccctggggtcagagggagaagacaggcgcagtcagcaggggatccaaactgaatggtgatagagacatggctcccaaagtactgttctcctcattctaccgccactggctcaggtcaagccccactcctggcctggatcattacaattgtcttctagttgctgtctttctgctcagtcccaaccctccaagccatcctgttattctgaaattcacatctggtcattcttcccagcctaaggcctgatccactgctccccatgtcctatgggaaagtccccattctctaggtggcactggaggcccttcaggatctgtctctaatgtcccttccacactcctttcccagctgtccccaccacactgctaacaacctggctgcattgacttttttggatcttcctcaacagtctttgtacttttcacgcctctgtgcctttgctcaagccgatctctttagctggaatg

SEQ ID NO: 156195 - DNA, 381 bp, Homo sapiens
caatatttgcttacattatagcatctaatataagatgttatttgctcattgtttattatgtactccatgctctcacaagaagcttagctttgatttttttcttaattttggtggcttaaatttgaaaatttaactttgcattaaaggagggtttttatttaattaaagaatgtattctggagcttgattacaaattaaaatccaacatttgcttaacgtggatgggtttacaattataggaaaaactttttgcacttcatgatttagtggctgtttaactttgtactcaatatagtaattaatatatgttgctgcatttaattttctgtttaattttttaaaataaaaaggtaaaggatgtttgctgcttttaaggagatt

SEQ ID NO: 156196 - DNA, 321 bp, Homo sapiens
gtggatttttgtatttttagtagagatggggtttcaccatgttggccaggctggtgttgaagttctgacctcaagcaatccttacccacttggacctcccaaagtgctgggcttacaggtgtgagccaccatgcctggccaagtagacaaatcttaaatgagattttcaacaaccttttacaaatgtacacactcagatgaattcatagagcattttcatcatccatgttctctctccgtcctttcccccactccaaatgtagtcactatttaactttgagttctaaagattaattttgtatatgcatatgaatgaccctg

SEQ ID NO: 156197 - DNA, 392 bp, Homo sapiens
tatatttttagtagagacagggtttcaccgtgttagccaggatggtctcaatctcctgaccttgtgatctgcccgccttggcctcccaaagtgctgggattacaggtgtgagccaccatgcccgggccatatatattctaataccatcactttggagcttaggatttcaacataggaatttccacagggacagcaacattcagaccatagcaaaggcctcctggaggctgctgcctcaacttcatcaaaactgccgctaaagcctcctggaggctgctgcctcaactgcatcttcagcagtctagggtgtgtcagctcagggataacagaaggctgcctttcaaagttgtgtctcaataagaaggtcaccggttgtggcttgtagaaagttt

SEQ ID NO: 156198 - DNA, 531 bp, Homo sapiens
cgcctgtccttcccctacttcaggtggaggttaacgtcagctcctccatggagcctgccctgactctgaccggacaacttaaccacacagcaccacgccccagccctccagacactgaccctgctaggcctgttcccacagcacttcataatcttgaatacacaattcatgtccttctttattatgtctgctgttccttatctgtctaacccagctgtaacctaagctctagcatggaaatctgtcctttttcttcctttctgcatccccaacatctacagcaatgccaggcacagagtagacacccaacaaatatatcctggaaaaatgaatgggttacaatttagtgggagaagagagacatatggtatactaggaagataagccctatcgagaaaaaataactcaggaaggggaatggaagaaagggaggctgtggggatgtgtcaggaagctgaggagtgtagatctggttacttttgggcaagttacttctctaagcttcagtttcctcatctataaaatggtttg

SEQ ID NO: 156199 - DNA, 315 bp, Homo sapiens
gatgagctccagaggccaggtccggggtcccctgcccagccctggagtgtgagggtctgagtgtgtgagtgtgtgtgtgtgcaggagagtgcctgtgtgtctgagtgtgtgagtgtgtgtgtgtgcaggagagtgcctgtgtgtctgagtgtgtgtgtgtgcaggagagtgcctgtgtgtctgagtgtgagtgtgtgtgtgtgcaggagagtgcctgtgtgtctgagtgtgtgagtgtgtgtgtgcaggagagtgcctgtgtgtctgagtgtgagtgtgtgtatgcaggagagtgcctgtgtctgagtgagtgtg

SEQ ID NO: 156200 - DNA, 317 bp, Homo sapiens
cacagcaaaggtttgttatgtaaacattatactttattatcagcctttgttttccaatacaatgctttaaaaatatcctctgttgtataaaggacattgttgcaaaaaggcagctcaaaacttgtccttcccttcctttcattgatctgttgcctcttaggcaatatgaacagctgtctccagctcacccacaagcaagctgaacataataataaggtagtgttactggcctgaatctatgaatgattatacaaagggtgccagctcttttccattaaagataaggtaacaaagataccatagagaagaaaactggt

SEQ ID NO: 156201 - DNA, 193 bp, Homo sapiens
aatgaatatgagatcaacagcagaactatagaaaaacagctggttaagagtaaaagtctaatccatctggccaaaaaacagatacaaaaacagccccacacaactgtgagacctcaacaacattaaccttcacagtgcaatagtttaatggttctctaaatctaactctagagacagaaaacaaatatccttc

SEQ ID NO: 156202 - DNA, 167 bp, Homo sapiens
ttgtgatccgcccacctcggacccccaaagtgctgggattacaggcgtgagccaccgcacccaacctttcttttctaaactttccaaattctcttagtgaaaagccttcagggtgattatattgcttttagcttctgtattcacttcagatgttccactttgcatag

SEQ ID NO: 156203 - DNA, 686 bp, Homo sapiens
aatacagaataacctacgagattgagaattcttgtagattccaatttatttcctaaagatttagaaacaccacctaagagattgatttgacccaaaggctgggattaaggacccacaggtagaaaaataagcatctgagtagggacaccctttcttctttccttattttgggggaaggatttcaggatgggtagaaatacagatgcatttgaaaatctagagaatagtctcagttttctttccaaaggagtacactcacacttcttaattgtgatgggcaaagggcagggctgagataccagaggtaggttgttatggtttggaacagctgaccagggatgagcctaaggagatactgtccagttgaaggctcagctgaagttatcagggaaattctgaaaggctcattaggaaccttttgtagaccttggtgcttttttgccactgtactctttccaagtagttaaccgaataccagtcaacttagaaaataaattcaacacattttactgttaatttggcttatatttattgttttaagaataactgattttttaaaaaatgatgaaatacaaacttctgccatttatctcatcatttttcgcaatctgtgattttcttttcctttgtgagggaatgctgggaatacatcagtagttgcccagttctgactgtttataacaaac

SEQ ID NO: 156204 - DNA, 168 bp, Homo sapiens
agtactgctttctacatgtgctatcacactggaaaaaacccaaccattgcatctttcattaaaaaagaaaaggtaaaggaattgttagagtgggcctgtgtgaatcctatcatcctgatctcagaaatccaggggtcaagagttggcaaatatttccagtaactcatg

SEQ ID NO: 156205 - DNA, 504 bp, Homo sapiens
aaactaaaacgagtttaacactcagtcaatgtagaagttccagaaaagattaatgtattatatcaagagttgtcagtgcatgtttcagttacatgtagaatgcatgtttgtctttcacaaaaaaaaaaacaacaacaataaatgacaagatcaaagttttaagtaagccagcatttagctaatatatgaagtactctgggatactataatcaaatacaaaagacttacataaatacaaaacttaaatatacaacataaacataatacataaacagaaaggtttaaatatgacataagaacagcctactttatacttaaacagtgaccagacccatcaaagagtcattttcttacaatttttgtgactccattttgttgtcgttaactgtaacacggctgcaaagaacagtgtctgaaagcaatattagttaagctaagtatctactcattcttccatcttcatccccatttaagatccaaggatgccagagcaagcaagatgga

SEQ ID NO: 156206 - DNA, 1143 bp, Homo sapiens
gggaggccgaggcaggcagatcacctgaggccaggagttcaagatcagcctggccaacctagtgaaaccccatctctgctaaaaagaccaaaaaaaaattagctgggcatggtggcaggcacctgcagtcccagctacttgggacactgaggcaggaaaaccgcttgaaccttgggaggcggagtttgcagccgagatcacgccactgcactccagcctgggcaacagagtgaaattctatctcaaaaacaagcaaacaaaaataggcaacaaggcaggatgcttaggatgtaacactaagcaaaagaggaaaaattgattgtgctttgcttacaactgtgttgcaaacgtaatcactggggacaaacaagggtagagcaaaacagtagcagtgttaggcaaaatgatttgcgttttttattttctaaatcagttatgatgcacttctaatactttggtaatgaagaaaaaaatatgatttgtccagcacaaactgggcatgaccagacttgacagcagtctgtggcgtagctatccagagagtttggttgacgccaagctcaggctgagatgacagcatggcgtggcgcctaaggaattggcacggtgcccagctgggtttgcagtggccttagaaaacaccatagaagcctccatgcagcactcacagccagaggctgggtggcactgcaggggttgggggccttggatgagcacagcatcattgctgtttgtttcacagagcagaacacaggctcagcaaggctcatccacctccccaaggtcacacagccttgggctggaaaacatgtttcccatgcagggttccttcccaggcaccccagtcaaacctgatgaattaagaaaattctggctgggtgtggtggctcacacttataatcccagcactttgggaggccgaggcgggatcacctgagatcaggagttcgagaccagcctgcccaacatggcgaaactccgtctccactaaaaatacaaaattagctgggcatggtggtgcgcacctgttatcccagctatttgggaggctgaagcaggagaatcacttgaacccaggaggcagaggttgcagtgagccaagatcgcaccattgcacttcagcctgggtgacaagagcgaaac

SEQ ID NO: 156207 - DNA, 331 bp, Homo sapiens
tgtcattgctttggcagtggaaacgcacgtggcctctaaagagtgggtcccaaggtcatgaaggcctgtggggtggagggcaaggtatctctttccaggctggaatggcagaagacgcggcggcagaggggctgcatgtcctcctcacagcaggcccctgaggacctttatcctcctgagccatgaatgtccctcaggagtgtctaaagcacccggtggggcagggggacccctataggccttaggagctctggccaattagtggtcagtaaaacgcagaggtgaacaccatagaaccacaggtccaggagaattttgtaaaagctctgag

SEQ ID NO: 156208 - DNA, 156 bp, Homo sapiens
gttctaggtaggaaaaggcagcagctaaggctcatgataagggaactggctttagaatagggttactctcctctccttgtcctccccagatttggacctaaggaggcagagctatggctagggaggcctacgagaacacagagaaatgggttcaag

SEQ ID NO: 156209 - DNA, 142 bp, Homo sapiens
ccttagcagcacctgttctccatcttctttgcaactgacctaatttctcatccacggtatagccctttgtattgctccactggattgataagcaatcctgcctttcctgacctctgaccttaacatctttccaggtatcatg

SEQ ID NO: 156210 - DNA, 141 bp, Homo sapiens
tgacaggcgcccaggtcctgaagtctctggttgccactgaggctttaccacctcagttgattctggtatactggtggtctttgccaccatgaataatgttgcagagcatacctttgcacataaagccttttcctcatgatg

SEQ ID NO: 156211 - DNA, 447 bp, Homo sapiens
aattatgggagctacaattcaaggtgagatttgggtggggacacagccaaaccatatcacccacttagtgggtggatttagttcttactgccattaccacaaacttggtggctgaaaacaacatttattcttgcacagtcctggaggccagagtctgaaatcagtatcatgaggtcaacatcagggtgccagcagggctgtgctccctccggaggggaaagccattcccttcttccagtttctgggggctgctggcattccttggccttctcctcttctgcttccctattataaggacccttgtgatgcattaggtccacctggatattccagaataagcctcccatttcaagctccttaatcacacctgcaaagtctgttctgccatataaagtgacatgcacaggctccagatattagggcctggacatctttgggggccattta

SEQ ID NO: 156212 - DNA, 481 bp, Homo sapiens
acggtttgagactgaagttaagtctgatcttccaactttcctagtttaaagtttacccctttagaaacgttgtttaagggtgaaatggagaccaggtaatataaaagcagtcaaggaacttgttgcaagaactttttttgagatgagaggacgactcatcataaaaacttggaactaaacgaaaaagatagcccggctctagtttaagctataagacccttctacacagtctgtcagtacactcagtacagtaatgtctctcaaagaatttattctagcagaatcattaaagatatgcagagactttattaaaatgatgaaaactgagaaggaacctaaatatccaacagtagaaatgggtcgcgtaaacttcggtatatccatatatgggaatgttacattgcattgtcctgtaaaaccatgttgcagatgtgtttattggcaaataatgttcatgacgtactgactcatagaaaactct

SEQ ID NO: 156213 - DNA, 402 bp, Homo sapiens
attctgcttcttttctaaaacatctgtaataagaattttcaagatacatataaatttagtaagcagtagtggaaagaaatatgagaggaggtgtttttaaaagccttaaaatcggggccgggtacagtggcccacccctgtaattccagcactttgggaggctgagggggtatggtcgcttgagcccaggagtccaagaccagcctgggcaacatggcaagaccctgtttttacaaaaaataaaaaaattagccaggtgtagtggagcacgcctgtagtcccagctactcaggaggccgaagcaggaggatcacatgagcccagaaggttgaggctgcagcgagctgtgtgcgcaccactgcattccagcctggtaacagaaagagattctgtctcaaaaag

SEQ ID NO: 156214 - DNA, 407 bp, Homo sapiens
ttttcttttctccttccttcattacagtgtaagttctgaatgatgaatgcaaaaacaattgcctatattatgcagacttgggaataatatttgccacacagtaggcactcagcaagtgtttgttaaataaatgaattaataaactttatacttggactcttaaacgtctttattcccctactttgctccaaagagttacttataaaagcctctaaaagtaacctctcattccagttgcatgaagtcctattgaaccaaaggacattcctctaaggctagtttatttgtctattccttcccattctttccatgtctaattttagtaaagttggtaagtcagttattatatatcatttcattctactttccaagaaaacaaacagatgttttatctaatcctgtgggag

SEQ ID NO: 156215 - DNA, 459 bp, Homo sapiens
ggcccattgtccataactgtgtaaaatcagctcaatgcctgtgtagccccattatgtctgcccataatatttaggaaagtgagtcttttagcctcattcacatacagagtccatctcacatcagcacctgcgcgtccccgtcacgcttgtgacctcgaaggccctgaggatgattcctgtgacggtttttcagccactactgtacgtgggttactagtgctttgtcatctagaatggggttcgtaaccgagggggacgctgccggtgcatgatcatgacaagcctaagagtgagaggatgcttttcactgagtggggggcccgtgctgggccctgagtgctggcgtgtatcgtctctcctcatgcggcccctggaggacgcaccgtggggccgactggctttcccggttgtgctgctgatacgtggctgaaccaggatctgtgctctggccctgaagct

SEQ ID NO: 156216 - DNA, 349 bp, Homo sapiens
agagcacagaaataaacccttacataaaaggccaaatgatttttcacaagaatgccaagactacacagtggggaaaggacagtctcttcaacaaatggtgctgggaaaactggataacaagcaaaagaatgaagttggactctcatgccacatacaaaaattaacatagattaaagacctaaaagtaatacctaaaactctgaaactcctagaaggaaacataaaggaaaacctttgagacactggatttggcaatgatttcatggatatggcaccaaaatcacaggcaacaaaagcaaaaatagacaaacaggacaccaaacttaagaatttctgtgcaccaaagaaa

SEQ ID NO: 156217 - DNA, 637 bp, Homo sapiens
caagtaacaaagccagcccaaattctaggggagatgaattagactccaccttttaaggagacaagtggcaaaatcaccttgcaaagagttgtgggattggagatactgatgcagccatatttggaaaccatctagtacactccacctcctacctaaaataattcgcattcctctcacatgtaaactgcactaatcatcaaccgcctccacgggcacatcctattatggcatctgctcaaagtccagggtctagtcatctcagtcagctgctagtgtagtgggatgcggttccccatgtttctgtgtgtgctcagatgtgccttctctccatctggaaaccagtgaactaaaaagacaagttatctgcccccaacacactcaacacacaatgatgaggcaaggacaggaaaagttctgcagacaaatgattatatactgtgcacaactggggccctgaagagagaagagaataaccaaggggaaaaaatggggaggtactgcccccaggaagatggattaggagtccatgcagtcttctggcaagggatcatcatgaaaccaccactgtttcctgagcgtttgctcctgtcaggcactgtttggaacattctccaacatgctttctcatttgaccttc

SEQ ID NO: 156218 - DNA, 426 bp, Homo sapiens
ctctattgtggtttccaacgctgggcaggcttaggactgaataattaaagtggattctggggcatgggctgtccctagttgtctggtgcgtggccctggagagattagggcaggtggagtataagagcagattaaggagggagttgagggggttgggattagttgacttgcatttgaaaagcgtgctttcagaagagttatttactatcatggctgggtgaggtggctcaagcttgtaatcccagcactttgagagcccgaagtaggtggaccatttgacgtcaggagaccgaaattatcttggccaacatggtgaaatcccatttctactaaaaatacaaaaagaattagctgggcctggtggcgcatgcctgtaatcccaggtacttgggaggctgaggcaggaaaatcgcttgaacccgggag

SEQ ID NO: 156219 - DNA, 760 bp, Homo sapiens
cagtgattagatctgggatgaacacagcctatagccagatgattggagccaacaaggccttagttggaacatttgggaaagagaaatcccatgcagggagacagcctgcccatgatgaagccagtggagggcagaagaggtaagaatgagggacaggacaagtctggaggacactattggagctcctgggtccagccctgcctgatgctcgagcacctggaacttttccataaattctccttctcccttgagccattctgtgcaagcttgcacagtcacactcaagcgtcccaactaacacactgatcacataatgtgagattctcagggttctctggaaagcctcttcccattgtcttctgtggcactaatttattttattcacccctgaggttaaacacagggtgaattcactgactttcacctcattaaccccacaactgtctccttggcacctaactaactagtttcctattgctgttatagtgaattgccacaatgccagcggctcagattaatgcaaatgtattaccttatggttctggagatgagaagtctggtttgtgcctcactgggctaaaatgaaggtgtcagcatggctatgttccttttggaggctccaagggagaatccattccttgccttttccagcttctagaggctgccccaaacatttggcttatggcttcttcctctatcagctgctcctatcattacatctcctctgaccctccagcctccctctcctaagggcccctgt

SEQ ID NO: 156220 - DNA, 583 bp, Homo sapiens
ggaggtggaggctgcagtgagccatgattgcaccactgcactatagcctgggtgacagagtgagatcctgtatcaaacaaaaacaaaatattgggctggaattgaaaagttgccacatgcaatcttttgtatgtcaattaatctttctcgaccttacgttttttttggctgtatgatatgagaagacccaacacagctcctagtacagaataagagagtaaataaatgttaatttccttcctcctatagtaggtgtgtgctttaaaatttaactagatttccaatttcaatcttatttgggccaaatctcctgctgaaaactacaagtgctaaataaaatgcagcacatatctccctaaaagcaacatcagctgacaagaaaataaggaactaccatgcaaatacatggaaattaaacaacatgctcctgaatgacttttgggtaaatagtgaagttaaggcagaaatcaagaaattatttgaaactaatgagaacaaagatacaacataccagaatctctggggacactgattaggcagtctaagagggaaattatagcatataatgcccattaaaaagttg

SEQ ID NO: 156221 - DNA, 539 bp, Homo sapiens
cttcatgtgtatattgtctcatttaattctcaattagcctgtgtcattgcaaggtagagatgtggaaactgagttaaaggttattacttgtccaagatagttcaaaatagagctaggaccaaatctctaagtcttacagtccaggtcaaaaaacaagtacttttttatctggttatacagaaatctggaaacagtcactcccagcctcacaattaaaaaaacttggatatacagaaagttcatagttttccttgaactcattatagtgctgagatttcacggcaaccaactggcccagatactccagagtcaaagacactgtaaggagagttgacatttgagcattagacaagacacagatggtaagagttaagctagggtgattggtgaattgctggaggccaggtgtacactgacagaactgtgtgaaactcctgggggccgcagtataacacagggtgagtctgtgttctcttgtatacttttttactccgtgaatcccatggggtgctcagaagctcctgaaaaggtctcgctgt

SEQ ID NO: 156222 - DNA, 233 bp, Homo sapiens
tccatctctagagggagtcaagtccaaaacaaagaccggcaatctgtctcctctctcagaccccagaaacaggagggagaatggagctaaccagacagtgacttccttcactcacctggcactcgatgggcaggaggcaagatagcaagaccccaaagcctgcctcagctagcctctgagctccaggtctctgagccccagcacagcctataccctccctcaggggctctctg

SEQ ID NO: 156223 - DNA, 434 bp, Homo sapiens
tggaagagcctagactggtcagaggtgggtgaatatgtccagacacaaagaaaaacctgggcacaggagatctatgagaggagagacggccgtgcaggatctggaagggagaagagtgggcctcagtctccctctctcctcagccagagtcagctctgctccagctcaggcacccttcaccaggagccaggcccagggctctgctcttgtactgtgtggtcacagcactcactaggtcagtccgggagggtctgcaggctggaatcacagggccgtgaaaacaaagtgctggtgaagcgggcatggggagggagcctggcctccctctgcaggagacaggctgtctgccaagcccggcacgctcttcatttgttcacctgcccatctgcccatccatccacccacccatccatctactcctggagtagatgccg

SEQ ID NO: 156224 - DNA, 413 bp, Homo sapiens
gaaaccctgtgtctactaaaaataaaaaacaattagccaggcatggtggcaggtgcctgtaatcccagctacttagaaggctgaggcaggagaatcgcttgaacccaggaggcagaggttgcagtgagccaggatcgcgccattgcactccagcctgggcaacaaactgcattaaaaaaagaaagaaagaaaagaaatgaggaacaatgtaggaaactggtgtaaaggccatcctgttataaagtagcaaagaccttggctgaattttgtccatgttctagggctttatggaatgcagaacttaagagtgatgaagtagggtatctggtggaagaaatctctaagcatcaaagtattcaggctgccacacagctacttttaaccacatacagtgagatgtgagaagaaataag

SEQ ID NO: 156225 - DNA, 682 bp, Homo sapiens
agcccagctaattttttgtatttttagtagagaaggggtttcaccatcttggccaggctggtcttgaactcctgacctcgtgatccactcgcctctgcctcccaaagtgctgggattacagtcttaagccaccatgcccccgccgtgtctttaatatatggaagttcctacatggtagaatttatccaacctgttatttaatgacccctaggtttcatattatagaagatttctttaccctgagcttatgaaaatgattccccatgttttcatctagtacttagggtttcattttttcatatttatatttttgatctctggaacttagttatgtacaaagggataatgtagggactcaacttattttccagaaagcccaaccagctatcccagactcttacctgtttttgaggatatctacagaagaagtcttctgtaagactgttaaaaagagttaggacttagggaatttgaagaattacagcaaatcagggtcagattaggtgagaatcaatttataaatttattaatcagtattatatattctgaatatttttgcaacctttggtataattagtattaatgagatacacattgaaggagagtttttccacaaacctatgttgggtttgtgttagatcaggaagctagaaatgcctttttttgtgtgtgcttttttttt

SEQ ID NO: 156226 - DNA, 282 bp, Homo sapiens
actccccctgccttttgatgacacaggttctgcataaggtgagagggaggacagggtgacatccatttcttgtaaaaatgcctcaatgagaaaagggccacatgcatttcttgtaaaaatgcatcagtgagaaaaacaacagcagcagcaacaacagcaaatatttactgaatctcctagtatgatccaagcccccaaatcaagaaaatgtgaatgctgatgtaaaaaaggaaggtatttgttcaaactgcctggccagtgtttttgaagaaaacagagatc

SEQ ID NO: 156227 - DNA, 337 bp, Homo sapiens
tcgtctcactcctgggctgccgagttcctggagtgggcgccatgctcttccttctttctccactcaaaccaacctgggctcatcttcaggatctcactcttctctccaggcctcagttttcttatctttaaaattagaagggctatctgggctggcacaggcgaagccctctcttgccttggccacctcccacaccagaatagtcaccatggcccatcagtgacctcacagccacctcccatgccaggacagataccaccagcctgtcagcgaccccacggccacctcctatgccaggacagagaccaccagcccatcaatggcccaacagccacct

SEQ ID NO: 156228 - DNA, 544 bp, Homo sapiens
ctcaaataatacacattgtacccattaagtaatgctgtaatctttattagtttcttcctgccacttggtttaggtttaatttgctcttatttttccagtatcttaaggtggaaagttgggttattgatttgagatctttctcattattattttaatacaggcaattatagctctaaatttctgtctaagcactcctttagctgcattccatatgttctggttatgttatatcttcatctccattaatttcgaactatttcctaattccccatgtaatttttctttgattaattggttatataggaatgcgttgttaaatttccacataatttctagtttttcatgttccttttcattattggtttccaatttcatcctgtagttctcagaatcaaatttaaatttaattcctttaagatttattggggtttatttggggaggggggctagaatatggttattcctggagaatatttatgtgcacatgagaaggatatataatttgatgttgatgattgcatgttctatagatgtttgttaggac

SEQ ID NO: 156229 - DNA, 658 bp, Homo sapiens
tagacttcgtaagctgtaagtcccagagaaagcataggtgaacagggagatagctcctatggggtgaaagggactaaaagtgcttctcaagacacggactaaagccagcttcacaaccctacatcaaagaggagctctagaaaagaagctaaacaaaaactgctgcccagcactaactagcttatttggaacagcagacctaacgagggagaaggacacaaatataaccttgctaaactaagcagcctgtgggttcattaactgtgtctctgatattccttggtagcataatagaacagaaaatctaaaatatcacattatcagacctgattctggactgaggcctttggccaatgtaaggaaaccccaaaactaccaggtatgatagaataagcatagagggagaaagaaacaaaaacaaataaaccaaatgtttgtgcctacaaataagaattccagacatgtaaagaaatgttcagttgggcgtggtggctcatgcctgtaattccagcactttgggaggccaaggcaagaggattgcttgagccaattagtttgagaccagccctgacaacatagtgagaccctatctgtacaaaaaattacaaaattagctgggtgcggtgccgcactcctgtagtcctaggagcttgggaag

SEQ ID NO: 156230 - DNA, 384 bp, Homo sapiens
atcaacatttcaccatttagctgtgagcagcaaaatgagactaagctgttgtagtgctcatttgcccacctacagcagttctttggtctgggcggttttttcttcctgaaggtaggccccagctgaatccaagttacacataaaagatgttacacaaagttacacaaagatggcaggaggtagggctgtggaagctgccttccaattcaacttcctttccgaacgaatagctaggtaaagtgggaagaaaaaccaggggtgagcaggtgagggacgctttcaaaaatacgctctgtccctcactattgctcacggcggccacaccacttctcttttgacttctgcccatctcaggctgccattctgaattccacagactccctc

SEQ ID NO: 156231 - DNA, 429 bp, Homo sapiens
aagaaggtaggagggtatgaaagaaacaagtagatcaagtactgtttctttggcatcctataattgatttaaactgtagtaattactctagtaatgttcctgagtgtacagaatgaacaaacctgaaagcctaagtactatcttggtccgtctagctcccacacctagcttgagagtagcctctcatatcaatgcttccctgctatcctttcaaaactctttttgatgggataagtgggcaaagatcatgccatcgtctcaaatgctaacttcctttgacaagacagtttctcccagggatatcccccacaggcctaggccaaatctctgactcactgcaaaggtccatgtacactgaactgatagacatcactatttttattggaaaacacaatttatataacactcttcctctggaataatactctt

SEQ ID NO: 156232 - DNA, 172 bp, Homo sapiens
tttctagaactcctgccctatccaacccggacttttttgcttcattccccattcctactatcagttgatttaggcgaggaaaaaataagcagagtgaggaaggaccctgtttgggagagctcttcccacttaactagattaacaatttatataatgattatttagtaatcct

SEQ ID NO: 156233 - DNA, 271 bp, Homo sapiens
agaaagaataagctgcgcttcttgcaggtataggactcactgcaacttgtttcttcacagccagcaacggagagagactccaaagctagctctggacatcccctcccctttgccgtgttctgttggttggaagccagtcacaggtcccactcaccaggggaggggatcacagaaacgcatgaacaccaggaggctgggatcatggggtcaccttaagtccatcaaacatagcacctgatagcttgatggccacgattacaattgattgggt

SEQ ID NO: 156234 - DNA, 309 bp, Homo sapiens
gcgggcagatcacttgaggtcaggagttcgagaccagcctcgccaacagggtgaaaccccgtctctactaaaaatacaaaaagtggccaggcatggtggcacatccctgtagtcccagctactcaggaggctgaggcaggagaatcgcttgaacccaggaggcagaggttgcagtgagctaagatcgtactactgcactccagcctgagcgacagagtgagactctgtctcaaaaaacacccaaaacccaaagatttccggcttctcttgataagtcaggggctctgcaccccttatcagctccactta

SEQ ID NO: 156235 - DNA, 393 bp, Homo sapiens
tgttgggattataggcatgcaccaccgcacctggccctacccttaatactttagtattaatgttttagtatatttgccttaaagttaatgacattctccttgctacctgtccacaatacattcataaaattcagaaaattacactgagtcattattaccatctaatcttcagatttcattaaagtttagctaattgtccatgtaatgtcctttttgtccaaagtatctaggtcagaattatgtgttgcatggagttgtcatatgtctttggtctccttcattctagaacagttctttaatctttctttgattttcgtgaccttgactcctttgaagactacagaccagttattttgtggaatcttttttagtttgaattttctcataattgga

SEQ ID NO: 156236 - DNA, 137 bp, Homo sapiens
tcagagaacaatccattctttaatattatacacagtctgaactgcacaggggtcccttctcacgtgattttgagaaagatcattggtaaagagtagacataagttgatctttaggacagtaatcttatccttttagg

SEQ ID NO: 156237 - DNA, 113 bp, Homo sapiens
tctcacacacacaaacataaacgtacacaatcattgaaaccaataagaagcacactagtaaaaaaaatgaacaaatagtccgggtgcagtggctcatgcatgtaatcccagca

SEQ ID NO: 156238 - DNA, 352 bp, Homo sapiens
ttcatggaagatcaagtgggtgatggttaaggagaaaccacgaagagcgtagcctcagtaggtaacgtctgctccagctagagctcaccatgcatgcacaccaaacccagatgccgaaaaccaaaaaatacagcagaacgcacccaactcccaaaccactgagaaagtattttaattttgctttgatcactccagctgcgcttcagagtccccagcatttcagcagcatcatagaagaagacatcaatcactggccatggcacaaggaaactcctgcttggctatcgggctgctcagattctggatgagggaaagcttactttagtggaaaagaatgacttaaatgaattta

SEQ ID NO: 156239 - DNA, 360 bp, Homo sapiens
ctagagtagtccccttctcgtacatggctcgtacatggtctagccacactcgcacttccaagtaggtcctatattgggactaagagtctcattagcagaagattcctgggttccaagatgccctgagacttctctccaactggaaaaaggttgctgaacaaatgaaattgatctttgatttttctcccccttgattatgtcatatgacaacataattcttgggtattcagaggcatcctgaacttgggtcagggtgtacctgtcagtcttatttgttcagtgtcctgtaagtcagacacatttttctgtgtttcttcattcccacagtcctggtcgcacatatactctgagacgcagaag

SEQ ID NO: 156240 - DNA, 555 bp, Homo sapiens
catcacctcagtacaatacgtttttatttagtcaccctactctgctatcaaactctgaatttattcccactattgcatcttttgctgcttaattcatctgtggttaagggttaacaaggaaaacacatccccaaggtaatttacttccagttctctgtatctgtctaatttaaatatattcctctgcaccctacgtcattcttttgaaagaaattaggctactgtgttatttgatgctgaaatgcaatctttcaagctattacctgacatacaatttctaaatgcagttcagaaaagtcatccattttacaatctgtaaaagaaacaaaacttggattctaagtccaaagatatatgccctctatgtaaatttatcttcactccctctacacatattttacacaaagtcacaagtggtttgtgcattcagtatgaaccctgtgtatctaaaaggggaagagccaagatttcagctcctgtcattagatagtccaagaatttaatattataaaagatattgggacagtggaaacaaataaataaaacagaagtctg

SEQ ID NO: 156241 - DNA, 144 bp, Homo sapiens
aaaatgatcccacaaatatatttaaagtgacacctgtgacagaggctttatgatattatgataactgataatatgatcagaaaaatttccctgagaaagtgatctttgagctgtaatcttaaaggataagtggaagttaactag

SEQ ID NO: 156242 - DNA, 359 bp, Homo sapiens
cttggtagagctaggagtgccaatggtatcagcaaggccagcctgcttccctgtgattcatggtaattctcactatgactttgacatgatgttcctacactgtgcctatcaacacttgtagacacactgtataagcgtttgttacatttactttttcttttgtcattacgtcttttattacagaggccactgtgcactccacaatcacacacttacacagctccgccttgccaagcagtgtagaccctgccaagcagtgtagacagattctggataactatctttgcatccttccccataccatgtccccgatgttgaactgaagcagctccttccacgttccctacccgttaattagc

SEQ ID NO: 156243 - DNA, 593 bp, Homo sapiens
cccctcaatcctgctggcccacagaagacctatgtaatcatacttgtaaggcactgatctaagagctttacaaagccttgggccataggagctgccagcattcaaacatttttgacatataaaaacagcaattttatgcagttcaatctattaacttatttaatcctcctaaataacccatgatgtaagtactgctgatatcctcattttaaaaatgaggaaaaggaagcaaagagaagttagtaaaccaccaaggccacacagctagtagatgatgggccttggtggcatcgataaacaccggtgtttatcgatgccacatccatactttgtccttgtggtgagagaggataaaatgtgatataatttgttattcaaagaacatggcaaccgtaacagacaaaaggaagcatggcatctaggggaggagagtggagagttttccatacacaaacacatttaaacttccctgtacaaaaatacctgctgctgctttagaaatcgttttcctttatgaatagtcaggtcttgcagtacaaatccaggtgcagtgccagcaagtatttcaaataaaattcaacgacttgatattc

SEQ ID NO: 156244 - DNA, 120 bp, Homo sapiens
tgctaaaaggttaggatgggtaaagaattagattttctgaatgcaaaaataaaatgtgaactaatgaactttaggtaatacatattcataaaataattattcacatatttcctgatttat

SEQ ID NO: 156245 - DNA, 226 bp, Homo sapiens
aattcggtaccaaaagacaagattttaataaggatcccccctaggggatccttattaaaaattccaaacatccgccatctggttctaggaagggccaaaagatatttggagaaggaagtcatgattattccatcttcaaagcaaaaggaacttaaaggctctcttctctccaccttcctcccgaggcccctttgtttagtatttttaataagattaatagggccga

SEQ ID NO: 156246 - DNA, 362 bp, Homo sapiens
aagtcatgattattccatcttcaaagcaaaaggaacttaaaggctctcttctctccaccttcctcccgaggcccctttgtttagtatttggccgatcaggatcccccagtgagcagaagaggtcaggacatttgctggagtcccagctggacctgtgactggctaaatcactttgagttccttgcttctcctctccatgcctcagtttcctcatctgaacaatgggtgcaagactagagtgcttccagcactgatgttccaagacttcaagtcctggtgcagaaaatccatctggtccaggtcactggggcctactttggggctgagaaatgaagggtaggatgggggcaagggagtgggag

SEQ ID NO: 156247 - DNA, 391 bp, Homo sapiens
ctcccagagactttgggccatgccagggccaggatggcggcaagcggatagaggactatggataagaagctcatcagggcccacccacagtctctgagccgcctcccatctgggtccacagctcccatttcccctcctccagattgggctccctcctctaagacaggtagcacctgcagttagcggtagctcatcggtaccgagcacctgctacctcccaggggcaactgtgcgtgttagacccactgtctggtcttctcactgacattcgcaggtgctcagggagacaaagcagtgtgcccaaggctatcccagaagagctgcaatccttgccacccccaatcctgcctcccttctcttggggcccagagagcttcccttccccctccac

SEQ ID NO: 156248 - DNA, 511 bp, Homo sapiens
tgctgggattacaggagtgagccaccgcgcccggcctttctcaagtaacttagtgagaaagtctgcattgggaattaggtattgtgacgtctcataggcctattttattttttaataggtaatacgttcacatggttcaaaattcaaagagcatgcaatgaagtctctcacactttgccctccagtgccaccctgtccccctcctctgaagtaaccagtattaagttcttgtatgtatttccagagatagccaatgttttaatacacaaaattacagatatagttttcctcctttataaaaatgcaaactttagcatctgcactgttttacaccttgttttgatttgtatacttcggagattgttctttgtcaataaagacattattgtgtaaaagcatctttaatgcctgtacaatatcccattgtgtacatttatcataattcttcttttgatggacattgatgtttctagtctttacacgctatactgcaataaatcactttgtacat

SEQ ID NO: 156249 - DNA, 499 bp, Homo sapiens
cttttcccagagttatgaggaaataaaggggtgtagagctaccccacccaattaacaagcagtgggtctgcaaagataagcccataacaataagtccaccccctgtacatatttgtaagcatatgactggagatgtgcttacatgtgtacctgctatatttatactcacttatcaatctatgatcaacatatccagacttacctaccttccattctttcttccttttcttttttaactttttattatagaaaatttaaaacacagatgtagagagaatcatgtaaatgaactctcatgtccacatgaccagctttgtttaacagctgtgaacacatagccaatcttgcttcatttataatacccccacctccagtgcatctatttaatctgtaattacttcagtatgtatttctaaaatataacgtctctttaaaaaaacaagaaaaaatggaactatgagcttaagtaccacataagtgacaggttaaaaaagaaaaa

SEQ ID NO: 156250 - DNA, 218 bp, Homo sapiens
ctgtcatccccaggtcttggatgatacaagtcaggattagtatgcctgaggtcttttggccttggatcaaactgggatttgaacacacctctgtccacccctaggcctgtgttcttaggcaccataatgttgtagcactcacctgtgaggaatggatttttttcattgccttggatttttttcattgccttgaattattttcagatatgaaaaacatt

SEQ ID NO: 156251 - DNA, 526 bp, Homo sapiens
ccttgctgatgtcaatctttgaaacatgattttttaaaggttacattatatttgatattattgatataccattatttatgtatggttagacataatgattgttctgtttttttgcaatgtggtattttatttattgcattttctctgtcttttagctattctgtgtttatcatctatatagttctcaagaatcataatcttatctttttattagaatgtcaaagttaggtaaatgggcttttaaagaaataactcacaaagattcaacctacaagaagctttttgattgtctcttaaatcaatgcaagttatatatgttcacttttataatatagattaaattctgtcaattaaatgagtatgcttgtatctttcctatttgctgatatgttgtgagatgatgtacaagtcttcattttggattaaaagaggctgcagatatgtgcagaatgggtatgaaagtttccttacaagagagaataaaaggatggtttaactcttgctagaaaaaccccagctttggcat

SEQ ID NO: 156252 - DNA, 112 bp, Homo sapiens
tgttcacagaccatcctttgttcagcaggaggaaccaagggcaggcatcgccaccaaggagtggccagctttccctggcccttctctatgacatgtataaaatctgtaggct

SEQ ID NO: 156253 - DNA, 123 bp, Homo sapiens
tgggattacaggcatgagccaccatgcccggccaattgtattccattcttatgatcagtctttttgctgtaggtttccccatacattttggttagaagaagctcatctgaagtcctcaagaaa

SEQ ID NO: 156254 - DNA, 395 bp, Homo sapiens
atgcattcgcagcctcacagatcctctcttctctcacctttgattccaggtaatgttttctctccttgacaatgcagacctgcaacccatggttctgttctcagctccctccttccttactctgccctctgtccctctgtccctctgtggttatccattgctgtgacctgattgccctcctataagctggagaccagctctccagagctaagaattcagctgccttctcttggacttctctgttgggatatttctacaatttttatgtttttcttgatagttatattcaaatattattttgagattgtcacaatttaaaagatgttcaataaatgttaactattactgtcgctatttttaaaatgtgacaatctcaaaataatatttgaatataa

SEQ ID NO: 156255 - DNA, 422 bp, Homo sapiens
ctaaactgtgttctaggtctcatccaattagagaaaaaaggatcacctcctcccttttgacataggataggaagttgaacagggaattccacaaggcacaattctcagtaagaccaggacttgtagaaaataatgtaatggcacaagatctgaattagatcaagagaaagcatatttccctaagaaatattttctttatatttcctgtcttttgtatataaaaagtctaattttaatgttgcattattaagttctaaatttatttctatttagaaaaggtataattaaacaaagcaaatctacatatgactttagtctcatagctctaaataataacacaattactaaatattcatagcaagttttcataaaaatttcagaatcgtataaacaaattaccctaaatagatatttggtacaaa

SEQ ID NO: 156256 - DNA, 492 bp, Homo sapiens
aaacaaaataaaaattagatgggaatattgctcaagccctggaggttgaggctgcagttaactgtgattgcaccactgcagtccagcctaggtgatagagcaagaccctttctctaaaaataaaataaaataaaaattaaccttctatcatatttcccagtaacaccttccctcctacatttctcctagaagcccttaaattttgtttttcacatatcgtttaaaacttttaagtgctgatgtctgtctgtgtcatccctctttttttttttttttaaatgtctttttgtcacttctagctggacctaccatgaaagacttctgaatccaggaagagaaactgactgggcaacatgttattcagagacagcgtcttgctctgttgcttaggctacagtacagtgacatgatcatggttcactgtagcctcaaactcctgggctcaagtggttctctcacttcagtctcccaagtagctgggactacagacat

SEQ ID NO: 156257 - DNA, 779 bp, Homo sapiens
tgggcccttgacatcccagcctcctccaggacagcccctccacgcacctcttcccagacggcctccgattcagttctcaagacccggggccttgtcccctcctttgagaagctgcccctcagtggggggcagctccctggcttttccgggctcctccgcccacaggattcaggcacggctcagccagctctggtttcatccaccctgaggggcctgtctgtgcataggcgccctcactaaatgcacaagaagcctttactggtgttgctttgttaaaatgtgactgtcatcatccaattccagtttgcccatctacaaaacacaaaacaggtataagaagagacagaaggcctagcatacccaaaggtctaggccggtgtgcttggtaaatgagtattattattacttctggatggtcgcaaaatacatgaactcttctcttcacccttcttcagtttcatttaaaaaaaaaaaaacaggtatgaaatgaaccttagagtcatttatgaccatggccccacagcgaggctacgcagcttgggaccaggcccgtaccagagcgcaggagaacacgacacaaagtgttattgaggccaccacctcctgcacgaccagagggaataaagcctgctctgtgcagggcctcctgggcagggtgtctgccccctccaaggccgccagcgcgaagcctgcattcttgcacgcgcacccacgttcacacccagccgggacgtggcactcaccgccctggccggggcctgagccaggactgcagatag

SEQ ID NO: 156258 - DNA, 243 bp, Homo sapiens
ggcacagcctcaggccctgccccagacctgcagaatcagaaactctggggtgaggcctggttatctgctgtaacagaccttccagtgggttctgatgccctctagagcaggagaaccactagcttagaggttgcagtatgtttggcatcttgccatttgtgttagttcagaggaatggctgacccccatgtctcatttctaagcttcaggcagcttttctcctgggcagctgtcattctgttg

SEQ ID NO: 156259 - DNA, 524 bp, Homo sapiens
gttcacaacagtttgcaaatactatctatttaattctcaacctagcaacagcagagaaagagattattattcctctctcatctatgctgcccccactctcctccccgctgcccccgattttatgttttggttgtgtaaattattgctaaatgaatagaactttcaaataagtcctatgctaggacttcataagtgcctaggaaattccaagctgtatttgtaaatttaaagggaagatcagcagaaaaaaatgtcaagtacttaaaatcgactttttattaaggacgcatgagaccagtgagtaggccttagattggatgtgtccacatatcctctgagtcgctccctggatccagcaagaaataggggtgggtgggacatctttgtccctacaccatagcgttggggaagagtctttgtattttgtatttttattttttttttaatagagatggggtcacacgatgttgcccaggctggtcttgaactccttgcctcaagggatccttctgcctcagccctcc

SEQ ID NO: 156260 - DNA, 378 bp, Homo sapiens
cccccagcttccaggatcgtggcaccacgttgacctccctgtggccattttcctggctctgtcccctgggcttggcaaagtgtcggcccacagcagcttccgagctatgcttatttcaggccctgcgtctatccattaaataaataaacgcacacacatacatttagaagtgacccctttgaaacaaagctaaacaaagacctcatatagcatgagctttgatccagaaagacctgggtatgagtccccggaagccgggtacgatccccctcagctctctattctgcccctgtgacgggagacacaggacttggcttgcagctgtcaaggtcaagggcgagaaggctcaagcacagcacgatgtcccgccctgagcat

SEQ ID NO: 156261 - DNA, 367 bp, Homo sapiens
ctatctgcccaaagcctgtcacaattaatgtataaacctaccgtctacagtgttagctgtgacctcggttctcatacaaagtgctctgctgaaccatctgtttcagatgatttctacacttaaatttgctttcattaaataaaagagggacccataatttattccaagtgagatgtcatacctcacatgtcagcaccttcttcattaacccatccaatttgcactgagaagacttggaatagaacctgtgtggcaggtaatggaggtatggcggggggtggagggtggagaaagcacttctccaataagggtggggagtgatatctttctggaagcagagaacctggtcagaagtggcttgtcttaa

SEQ ID NO: 156262 - DNA, 542 bp, Homo sapiens
ttttttaatttatgtgtacatttgattttttttgtttgttttcatcaaacctatactccatgggcctatatgttacaccaatagccttgaattatacccaccccgtcgccctggcctcagtgagctgaggacattgaagcagggtaggccagtactgtcagcctcactggcatagaaagaaggtggaggaaatgggtgctgctttcatttctgaggtataagtgatgatgtagataactgctataggaaatgcccacgcatagaacaaatggtaaagaagttccaggcagtcagctggtttcaacaatgaataaagcaggacaccctgcttagaagttgaaatcaaaatgaagagccttggaaagagatacctgctctacagtgtggtgagtgctggaatggaggagaaagcaagaggaatagcaatagagtcaagtcttgaaggatgacggcacataaggagaaagtgttccccacactaaggaagagaaagtggaagcacagagttgaaagggtgtggcacatccagggaagagtggaca

SEQ ID NO: 156263 - DNA, 548 bp, Homo sapiens
gtttcactttctgagcttctaggtctgtttttattcaggccctgagatcccagaaagagcctccagggtagagagtaaatgagttctcccaggtcaatgccagatggcagccctgggattagaattcatgggcccttgtttgcagccagctgtgccctcccctgagtcctgcactgtttcttcttctgaatgctcaggattgtattcaatttagtaaggtttgtggacacataatcacagctcctaaataaaacaattactacagagcatccgctgtgaggaagacaaacactgggcacctttgcccctgagagcagactgagagcgagctctggctgagtttaggtctgttccacttgaacaaaacccaacacaaacaaaccctcttgggatctggcaaagtcctcatctgttcttgtttcttctccaggcttccttgtgcattaaaagagcctgtgcttaaacccacagtaagggcctctgctggaagctggaatgtgctgtttcctggagcaagagagaggccaagctgagggacagcctggatc

SEQ ID NO: 156264 - DNA, 310 bp, Homo sapiens
aaaaattagaaaaaaaaaggaacatcttcagacctaaactaagaagttgcaagggtacctgtaaaaggatcacatatcatctattataagccaagtgtatgagagctctttcattcaaagtaacaaatcctctagaaaaagtagatttagtccatgttttaatgtggaaaaaaactgaagtaacattctaacacttcatatgaaatccttcatctttttccttttcctaccttccaatttcgggctctgcctctctggtagtacatggcaaatccaagaattgagtattttttcacaaatttaatatctg

SEQ ID NO: 156265 - DNA, 142 bp, Homo sapiens
ccgagattgtgccactgcactccagcctgggtgacagagcgagactccgtctcaaaaaaattaaaaaaaaaaaaataagagagccaggtgagaaccccttctccctcgcataactggctgaggagagtcagacacacaggct

SEQ ID NO: 156266 - DNA, 318 bp, Homo sapiens
cctctgttcccatctttccttcccactgggaccccatggaacagaagctctgtgctacgccctcctcccctgcctctgcttccagttggcctcagaaggacttgcattcacagtcatccagagcttggcagtgggtcaggccagggcagtgacagccagtaggatgttttcttctggtgccccacctgcccaggtgttgggtctctgtgagccactggcctctagaggaggtcaccacaccacctccatttcacctgtgcaggcaaacatcccctttctgggataccctccatctgaagcccagagccaggctcctta

SEQ ID NO: 156267 - DNA, 201 bp, Homo sapiens
gactgataatgagaaaatgaaaagaagaaaaaaaaaactgccctaatcaaccttgggtcactgtgatgaacaagccctcatttcagaaatgttcatgctcgtgtagattctaagctattttgaaccctcttccctcatcacgatccaacttggcccacatctcactattctctccacacagtggccatgcccacctgcatc

SEQ ID NO: 156268 - DNA, 519 bp, Homo sapiens
tggagaactcagagggcagtcatatcatcctcaggtataaccctctgagctgactttaaaaccagaccccatccatcctaaaggagtgtctcgaggagaccaaaaaccaagggcataaccctggcaacttgttttgaagcacaataggacatctcagctaggaaagacggcaggcaagtggcgtgtgggtcgtttcaggccagcactcacttagtgagcacttactgggtgctagaccctgtgccaggtgcctcattcaatcctcacagcaagaaacaaatctactggtatgtgtgaaagttctagagaaacaaaaccaagatggagtatgctccacagtcaagctccattctcagtagatggttaccttaaaaagaagcaggagttggccaggtgtggtggctcacgcctgtaatcccagcactttgggaggccgagctgggtagaccacggggtcaggagttcaagaccagcctgaccaacgtggtgaaaccccatctctacttaaaaaaaaataca

SEQ ID NO: 156269 - DNA, 410 bp, Homo sapiens
tgtggcccagggcctggctagggtgcacacagtggctactcaaggcaggacacagcaggtgtggggtggtctgggcctgtgggaccgatgggtgagtcctcggagacccagtgcagagggaaggcaggtctcggctccacctagaaccatctgcccctgagagccccgtactgatgtccctatacctccatgagccgcctgcctcctgcatcagcgcacgacggacaccagacacacagacatgggcttgacaacaccgccacctgctcgctgcccagcagactaacccgctttggcttggggcccaaaaattcaccaaccattccagtgactctctcctgagagaaactggctcgactcctaattcctgtcccgtcctgtctcacatgcaagagggacctcactcagga

SEQ ID NO: 156270 - DNA, 370 bp, Homo sapiens
gttgggacggcgggctccagccccagccccagccccagccccgtactgcgggtggcgtgggcgcggccgtgtggccgccacgtccccattcacagctcatgactctgcttccacagggcttcttagactatcctgctagttatcttcattcccacaagaccaccagggcggaattaatccgactgaatcagtcaccaactttattgaacaatcccaactttttctttcccttcagcgctgcgccctgcgctatctacaggaggctcttcagtctttggcaccagtgtatcttttagctccatctcccaacactccccctcatcttgcgctctgggcaccatcatctgtttcctaacaaccggtccttttt

SEQ ID NO: 156271 - DNA, 658 bp, Homo sapiens
gaggggacagagagaggcagggggacagagaggctgggggaacagagagagggagaggaggccggtggggaaacagagttgttttttcctctgttagctctcatccctgaaatcaacaaggaaataggaccggttcactttgccatgttggcttgaggtgccctgctaagagctggggttccatccagccttccttggctgtgacactctgtggaactaatcttcaacttcgcagaagttgttccctggcctctggaatcccaccttggtgacttaaaagctagtggactgatagaaaattcagtccccgttacttaacttggattttgaaaaccgtcccctcattcaggtttacacagaacatgctattgcccgtctaagcctgaggggaccacacaccccagaaacaccagagcagatcatgttcaaaaccgccgactgtcctgaagacagttgacaattcatgagtttgacgcacgttttttccagtccaagagctggagccagatacccacccgtgacgccctcccacatcttccaaacgggcacttccaaaccttgtcctgggcatgtttccaagccagcctcactgctgcaggctcatgtcatgccctctctcctgcgtgctcccagatcccgcagagagagcgtcggtacc

SEQ ID NO: 156272 - DNA, 555 bp, Homo sapiens
tcaggagaatgatccccagaagcatgagcaatgcagatgccgaggcttcacacaagaccctggagggtcttattcctgcagccgggacctgggcatcggtgtgcttgaatgctcataaccgattttgaggggagcccaatcgataagctgtctgccagtcatgctcatcacactgtagttttcacacacgtcacacggagaccctgttcgtatgcacatttgggtgcttgagcagggttgcgcccaagattctgtggttctacggagccctgagttgtgccctgggcagctttcctctggggctggtcaactttgatcactgtacctgacgagaaagggaccatgaagtctaatcagcaaatagagaaaaggaaggggccatttcccacaatcatttccacggaaacaccacgtcggatcaataagtctcactgcgggacagggactgtgcttcagagatgcagctttcgcagctggacaaatgacccagaaattccccaaatgccatttttaaacacacccagtgagattgatttcagggctttctgaatttat

SEQ ID NO: 156273 - DNA, 443 bp, Homo sapiens
atataattgaataaggaggatagataactattttacttattttaagtatcaccaagggataatcctaggtgaaattcccatttttttatgaccagagggctgaagaaccaagaaatgttcttgagcatttagagtaaatttggaaggcaatatcagctgcctccttgtaggaatagtagtgttgcttttttgaagacccatttagagaaccaaattcatatataacctcttaagtgctcgaaaccatatattaaactgtgtatgaatattgctttaccatagatttgtttgtgtgtttaataaaggaacaccttaattggtaacttaattttcttagatttataatagaactctaagggaaaagattgttgtttgacattaatgttaataatccagcattgacttattctctcacattaatttgtcctagttgctttttaatg

SEQ ID NO: 156274 - DNA, 340 bp, Homo sapiens
atcatcttatttttaatggttgtgtggggaactgggttcagcatttttgcttgacagccttgagataaaataaatccataaggaaaaagcccacttctgtttcttttcatcccagagagattaatgggcaatatatgagtgtaagatactggaaaagtctgttgagaaacctagtgaaatctcattctctgaaaagttgggggattacaggtgctatcgaatgcatcatacctaagggttagatgaaatgacttccaagagtttggccctattaaatctgttaagaggtttataatgccagcaggtgatgaaatgaaatttggatgccttagtttcagta

SEQ ID NO: 156275 - DNA, 325 bp, Homo sapiens
gaaaaagaaaaaaaaaggtaataaattcacaatcagctgacaatttgaagttgaacaacattctccagagcagctcctaaatcaggaaatgcccccaaggcaggtttgagaacaaacagaaaagtacttcctatagcaaaactttcttggcacaaatgcaactcatgaggaccaactagactcaacttcatatcccacagcctctccctgacctgatggctttgcaaatgcagtcagaatctgaaatttaacatatccaacaccaattttcttcttcactggcatgtctgtcattctatactctatctcaactaaggctttcacc

SEQ ID NO: 156276 - DNA, 269 bp, Homo sapiens
aactagaaggggttacagaagcttgagccctacccattcaagtcaaagagggagggaaggggagaggtctggtctccattctctccatgcaaataatctgtgcattgctcatgtgcctgggcagagagagagagactagtgtgcatgtgggaacacttaggcatgacactgaatggagccacacatatgcaaaaacaggagtaggtgtttggtgtgtgtgtgtgtgtgcgtgcacgtatgcatatcagtttcacttcttggcatgctcc

SEQ ID NO: 156277 - DNA, 443 bp, Homo sapiens
gatgggggtagaagtttattccacagtgagagggaaactaaaagcaaatgggtccaggagcaactcctgactaataaaggctcgctgcaccaggaagatttccttacccacaaatgactgttccacttgttcactaatgcttggaaaagcttttatggagaaggtactgcgtcctgttttctatatttagaagaaataaaatcccttaaaaaaaaaaaaccctacctataaaaacgatggactgcacagtgtagcttggagttcaaatcccaacttgccaccttagagttgtgtgcccttggaacaaaatcactttccccaaatctgtttctccatcggtaaatgacaccaacctcaggctgtcattgccaagacttgtagatgctcagcagagtacccagcaaacagcaggcattggaaagccagactgaatccaccctaaa

SEQ ID NO: 156278 - DNA, 502 bp, Homo sapiens
agactgcattaaccaacttagaaatgtacaaaccattcttaagtttacagagcattatatctccattatgttcttcatccttgtagtagtcaaaggctcatagttacatctctgaatgtctttataaccagccaattgcataccaatacatctatcaggacaatcaacaatataagcctagaactaagttactatctttagcgtactcagcatcaatgctgagtgcagccccaatgaacagtacacatgcaaacaaatacctaaacagatgtaacagaactagtagtacattgagcctaggaaacgcataacaatcacatcatttgttcatgatgtgattgttcatgatgtgatggttatcattaaccagtcttttactactaaacttaaatggccaattgaaacaaacagttctgagaccgttcttccaccactgattaagagtggggtggcaggtattagggataatattcatttagccttctgagctttctgggcagac

SEQ ID NO: 156279 - DNA, 343 bp, Homo sapiens
accgtttctcctgtgatccactctcttgtctccaaaccctctgaggatgtgtctcattagcagtttcttctcccactactattttaactgtctggtttttactgagtcttctccttcaacctacaaacagacttaagtctcttccatcttaaaacacgaaaccggctgggcgcggtggctcacgcttgtaatcccagggctttggaaggccaaggtgggcggatcatgagatcaagagatcaagaccatcctgaccaacatggtgaaaccccgtctctactacaaatacaaaaattagctgggcgtggtggcacatgcctatagtcccagctactcgagaggc

SEQ ID NO: 156280 - DNA, 295 bp, Homo sapiens
aacgggtgatgcggttggcatcaggtgtacagacattgacgaatgtgtaacctcctcctgcgagggccactgtgtgaacacagaaggtgggtttgtgtgcgagtgtgggccgggcatgcagctgtctgccgaccgccacagctgccaagacactgacgaatgcctagggactccctgtcagcagagatgtaaaaacagcattggcagctacaagtgttcctgtcgaactggcttccaccttcatggcaaccggcactcctgtgtagatacaccccaaggattcctctctgctcac

SEQ ID NO: 156281 - DNA, 437 bp, Homo sapiens
gactcacagttccacctggctggagaggcttcacagtcatgactgaaggcaaatggggagcaaagtcacatcttacatggaggcaggcaagagagcttgtgcaggggaactcctatttataaaaccatcagatctcatgagacttaatcactaccaccagaacagtatgggggaaactgcccccatgattcaattatctccacctggcccagcccttgacacatggggattattacaactcaaggtgagatttgggtggggacacagccaaaccatattattatccctcaaaatagcctgtattcccccatctccctctcttctgtgaagagggaactatgtaagctccatctggcccttccttgagtctcatattttacatggctccatgcttatgcaagttaataaatttgtttgcttttctcctattaatttgt

SEQ ID NO: 156282 - DNA, 493 bp, Homo sapiens
tgagatggagtcttgctctgttgccaggctggagtgcaatggcatgatctccgctcactgcaacctccacctcccgggttcaagtgattctcctgcctcagcctcctgagtagctgggactacaggcgtgtgccaccacgcacagctaatttttgtaattttagtagagatggggtttcattaataatcattaatattagacaactgtcagactcacagtggtggatacaaactttctcaaattctgatttttactctaaagctcaaattttatcattggcaacaaatattgtcagttgctttccctgaacagacagcttcccttctttcatttttgagaaaatatctgccagtatcccagttggtttatcaatcattctttctcttttttttttttgagacggagtctcactctgtcacccaggctggagtgcagtggcatgatctcggctcactgcaacctccacctcccaggttccagcaattctcctgc

SEQ ID NO: 156283 - DNA, 511 bp, Homo sapiens
aggcccaggggattggtttgaccaggtgtgccatttacacagctcgagaaaagactggccctcctaccctaatcttttactgtgcaaatacagctactaccaggtggtcgccagtacacctgcacagatggctttacttgtcctgcgccatgaccccgacacacgtggcaacaaggaaaagggagcaggaatcgccatattgaatgtacctggcttccaggtgcagctgctggcatttacatatgcaagcctctagcttacatagctatacttgcagctagacttttcaggctgctttatattagaaaagaaatggtttggaggctgctttttattgaaggaaaattccaccaaggattcttttactctttctaactgcaaaataatttcttaataactcctgtattagcagctgaatttgcaaagaaaataaaggccgtgtccttgtgaatcttttttctccccttaactctcagaaatcaccacctgtctcaataaactacatcataat

SEQ ID NO: 156284 - DNA, 367 bp, Homo sapiens
cagaccctgccctaggttttcccacgctgctccctaggcccaaagcccctgggactttgctcagaaggcactcttctgctatgaagccttcccgtatctgtgaggccccttctgcgtgttcttacagtgggcattaatcactctgtagcacagctgctctctactttgagctctttctcagtagatggcaagactgtttttcacccaacactgtactcccagcttcgagcgcagtaccttctggcccaagactcagtgcttgtttgttgaatgaatggataagcgtgtgtttatgcatcgtattttattttatggtgcctatgttctaccagctaccctttcccaaatgcaacaccataaaacactc

SEQ ID NO: 156285 - DNA, 524 bp, Homo sapiens
tctcgctctgtcacccaggctagagggcagtggcgcaatctcggtttgctgcaaccttcccctcccaggttcaagtgattatcctgcctcagcctcctgattagctggaattaaaggtgcctgcccccacgcccggctaatttttgtatttttagtagagatggggtttcaccatgttggccaggctggtctcgaaatcctgacttaagtgagccgcctgcctcagcctcccaaagtgctgggattacaggcatgagccaccatacccagcagcattttaaacaatctgaaacaaatgtatgaaagtagtgaccgtgggtgtactaactttctagaaggtagctgagcaatctcagtattgaatttgcacaccctttgactctacacaaggtttgtatctactaagacactttttttttgagacagagtcactctgttgcccaggcggaggttgcagtgagccgagatcatgctactgcactccagcctaggcaacagagtgagactctgtctaaaaaaaaaaa

SEQ ID NO: 156286 - DNA, 406 bp, Homo sapiens
ggagaatcgttggattagttataattatgtgcaagtaattaaaaaatgtctagagacaaaggttaagaaccaatcttgaaggtcattgaatgcctggataagaagattgaacatgtgatcatgggaagcagtcattgtctgcagtaatgtgttgttttggaggattcaatgaataattttaaaggacataaagagttaaaggacataaagcttgaatggagagagagattttaataaggaatcaaatgaaggttaattcttttctttggacctcaggtttgacgatgtttgctgaatggaatgtcagtagaggaggttggcatattgaagggttctccacaaagacaatgaagttgtacaaaagaggccaaaaggaaaatagtaagccagatgccagtgtcctcaa

SEQ ID NO: 156287 - DNA, 201 bp, Homo sapiens
ggggcaggcaactgccccttgtcggaaccacccccacctcggtgaggatcattagcgtcaaaggtgcctgcgacggggtagcaggtcgtgccgtcacccccacaccgcagacacttgtcctcctgcttggacgagtccagctcgtgatcacagccgacaacccggcagctgccatccacacagacatcccgcttaaactcg

SEQ ID NO: 156288 - DNA, 612 bp, Homo sapiens
cagaatgaatgacctaggccatgggaagtaagactgggaagtgtttttcatcttcttagagtttgggatatatggatgaattgagtgaaatgaggattttagtgagtatctctactaggttcctgacagggatggtttctccagggattcaactgaatcttataggtagatctgatctggtgaaagataaggtataaattggcctgtcaacaggacattcgtactggtagttattactaccatgatggctttaagagattttgggggctggcaagaagtagagtaaatgtagcagaacagatggatgttatagggaaaatatagctgtaaggaacagtgagagcttagtgatggtggcagtagagcataaaagacaaattatctttaactttggctttgcaaaaattggggtataaagcgttgagctcaacgctttatacttcctagacgtggacagtcctgccgagtactctggccccgagggaagttattcggcttcgccgtggattcttcgtgccagcgcgtctcccggatgttcttctcgtgggagctcccaaagcaaacaccaccagctgggatgtgggagagggaggtctcaatggatggctctac

SEQ ID NO: 156289 - DNA, 518 bp, Homo sapiens
gcttattgtaaaaagtagtttgtaaattgtataaagaaaatattgaatgtaaaaaattttaaaacaaaggaaaatgccactttgaaagagtactgttctgacattctctttttaaaaattccttctcataattcctacctagaataatgtgagtacttaatagagatttagtaagtttttggtgactttatattctgacgcgctttagtttacaccataaagcactgaacagttatttccaaagaagtgtaatattgtagcatgctgtcagtatttttaaggattttctaatttgccaggtacctgagagcagaaaccatgattattacacttattttctcccagctgtatctcttagccagtgtctggcatataactgacactcactaaatgtttcatagaaatacaagagtaggcttttgtttgttttagtttgcagatacatttctgtttatgaaaatgctcaagttttcttgagatacagattttttgtataaaggagtgtctaggttgtatag

SEQ ID NO: 156290 - DNA, 411 bp, Homo sapiens
catgtaagttgtaccttgattttagggcactgatacccattaagtatactgttgtttatattttacaactctccgtttggtatttctatttgggtttcataatagaaattagaagttagttacacagaataaaatcagcctttggaattgaagtttgagctgaatgagaattcataaaattggtaatacatacttattttgcaaaagtaggtatgtgttacttcctgacttttttgtttttgagacagagtctcactctgtcacccaggctggagtatagtggcgcacgatctgggctcagtgcaacctctgcctcccagattcaagcaattctcctgcctcagcttcccaagtagctgagattacaggccaatgccactgtgcccgactagtttttgtatttttagtgca

SEQ ID NO: 156291 - DNA, 261 bp, Homo sapiens
ttgggaggtcgaggctgcagtgagccgttttggcgccactgcattccagcctgggtgacaaagtaagatcctgtctggaagaagaatgaaaaaaagacagtgatgatattcttttattcattccacaaacatttactgaacatctgctatgttctcaagcactttttaggcactagagatacagcaatgatcaaaaataaagtgcatagtttcatggtgctgatattctacagaagcagacagacggtaaggggtaccgac

SEQ ID NO: 156292 - DNA, 410 bp, Homo sapiens
atggagagtttgctgagcacctactatgtgccggcccctgtgctgatggaacaattttatggagagagacccacaaagacacacacagacaaaccaatggcacagacacctacacctgcacagcactgacttgagaggtgagaaaaatccttcttcaggagcatggggagcttttattgcttaggagtggtaattgctgacacacaaaatggtcagactccccagaacacatggtgtttctggggataaaaattattggaggaagaggatttttaaaatttgcaagtactagagagtgaaaaggaagatctattggtttaattttcaaaggagtttaattgctgctttttaaaactatatggagtatttgaactgagaaggactgtagagattgtaaggtcaaatgtctc

SEQ ID NO: 156293 - DNA, 517 bp, Homo sapiens
atgtgtgtgtgtgtgagagagagagagaacgagaaagaaaataataataggtcttattagtacaaaagacttactaggcatccattaatttttctttgcctatttcaaaagtgggaaccagattcaattctatgcattttcacaaaatggctgtgccagtgttttttaattcccattctttggaaaaggcagatgtcaatatagagcacagggagtggtggagactagaataccttactgagctgtggaacccctttagaaagaaactcagcactttttccaagttcttttttccatccaataagatataagggcaactcaaaattttaagaaatttttgctcccctctcgttcctccttatgattaagaccttgggatctgatcacacaggctgagggtcacaactccacactgccgtttatcaggtgttgtttaaaacgtggggcattagcaattccaggcctcatgcaggcttttctgtgtaggaaaaataataaatagaacagtagcaactat

SEQ ID NO: 156294 - DNA, 755 bp, Homo sapiens
cacacttgactgcatttggtaattttctacccttattcctagtctgcttagaattttgaaaactcaagcttgaaagaggatgcattgacttctcaatgaagaaacaggcagccaacaccctcagacttagtgatgaatcatgagaggcaacattctgaaactgggaacacaatggagactatggaatatactaatttgctaatttctttttcctaccttattgaactggtcaggatggacaaaccaaagtcaaataatggttaaaaagaaacaaagaaaattatttccagatgttactgtcttcctagtggcccaagacacatttaaatttaattaaggagttcagttacaacgtaacattttaaaagataattagctttctcatatactgggaaaaactggttagaaaatatagagatcactcagtgggatggaatcaaatagaaatgtgtctggtaaaggttgtatttcatgttaagtgagaggaatcagagtaacagctcacataacgcttcagaacttctaagtgccaagcattatgctgaagaccttttttttttttgagacggagtctcgctctgttgcctaggctggagttcagtgacacaatctcagctcactgcaagctctgcctcccgggttcacgccattcttctgcctcagcctcccgagtagctgggactacaggcgccggccaccacgcccggctaatttgtatttttagtagagacgggatttccctgtgttagctagga

SEQ ID NO: 156295 - DNA, 371 bp, Homo sapiens
caggcttcactaaacacttgtatgagttagttcctgtgctaaacagcgtatataatatggtgaaattgaatgatgctaggccgggagcggtggctcacgcctctaatcccagcactttgggaggccaaggcgggcagatcacttgaggtccggagttcgagaccagtttgaccaacatggtgaaaccccatctctactaaaaatacaaaaattagccaggcatggtggtacgtgcctgtaatcccaggtactcgggaggctgaggcaggaaaatcatttgaacctgggaggtggaggttgtagtgagccaagatcacaccactgcactggtcgcagcctgggcaatcgagtgagatcctgtttcaaaaaaa

SEQ ID NO: 156296 - DNA, 472 bp, Homo sapiens
gagctggagaggtagacggtggcccaggagagtgcagagaccaaggaagaggagttcgagaaggcagcagcgctcagcagtgtggctgcaaaacagacagcaaggagaatgagccttcaaaacactgtcgggcttggcaaggaggtgcctgacgaccttggagagaaccattgctggggcctggaagccagattgcagggggttaagaagtgagtgggtggagaggaagtggaggcagagggtgtagaccactccttggagaaatttggcagggaaagccaggagagaaaaagggtcgggaactagagagggcagtggagtgaagcaaaggttttctgcacaaggaacaagagagagatgagagtggcccattggaaccagagccccatttgccgctgacacacccaggcccaccagctgaggggctggggagagacgggtactcactaacactccgaaagaagggttcagc

SEQ ID NO: 156297 - DNA, 383 bp, Homo sapiens
gggggtgttacaagataacccgacggatgatggaaatagggaacgagacaatccccagcgccctggtcaggtcacggagcggtggcaggcacagggttacaaggagcacccagctgcctgggacaggacttcaggaaaaggagcatcgtgactggggacagatgtatggtggctgttacatcctggctgagaagttcagctgtgatgacctggcctagatgaggtcatcctttttggagcatgggggtgcacacagggtggcagcagaggcggcaggattcactggggacacagcagactatgcccaaggctgccaagttctaggtgtggctctgcttttgtgggtggcacagaagtgagtccatccaactcatggcctctag

SEQ ID NO: 156298 - DNA, 368 bp, Homo sapiens
agagtgagaccgtgtctcaaaaataaataaatataaaaataaagcaaaaaaaaaaagaagaagaaggaaaaaagattctagaaccttctgatggcatcggtgtgttttgctttcagataattggttaagtgcaggcagccacacctttgacttccatttcaacttacctcccaggcttccttctaccttcaccagcaaatttggccatgtcttctatttcgtacaagcttcctgcatgggcagggaacacattttagccaagaagaggatgtacttattggttcaaggaacttccaccttccacaaagaaaccccattccaggtaccgatgggggaaaggtggaggtgggaacaatctccaagctcca

SEQ ID NO: 156299 - DNA, 608 bp, Homo sapiens
ttttaatagagacgggggtatcactatgttgcccaggctggtctcaaactcctggcttcaggcgatcctcctgccttgacctttcaaagtgctgggattccaggcatgagccaccatggccctccatccttctgatagggacccttacggtgacattgggcccacctggataatccaaaagcagccctccatctcaagaccctcaacttaatcccatctgcagagtccgatggaaggtgggacgtatacaagtcccagggatcaggacgcagtcatctttggggatcatagttctgcctcccacagggtctgcttccctcagtccatttctttgctgtcaatggtcctatatatgcccagattataggttataaagtccttctacaagcaggtgacacatgaacacaggttcagggcaggcagaccccagccatcacctcatcatagttaacctagttaaattagcctggcatgtggcgtggtgcctaatgcctgtggtcccagctactcaggaagccaaagcgggagatttacttgagccaaggagatcaaggctgcagtgagctatgatcataccactgccttctagcctgggcaacggagtgaga

SEQ ID NO: 156300 - DNA, 370 bp, Homo sapiens
taaatttgtttgagttcattgtagattctggatattagccctttgtcagatgagtaggttgcgaaaattttctcccattttgtaggctgcctgttcactctgatggtagtttcttttgctgtgcagaagctctttagtttaattagatcccatttgtcaattttggcttttgttgccattgcttttggtgttttagacatgaagtccttgcccatgcctatgtcctgaatggtaatgcctaggttttcttctaggacatttttaagactataaaagtgaaattatagaaacgacagaagtctattcaatacaaacataagggctttaaaagaaaaggctttgaactaaaaagaaagtgacagctttagtg

SEQ ID NO: 156301 - DNA, 232 bp, Homo sapiens
tgaattataaaaagtagatacaaaacaggcttttaaagattttcaagtcttgctttatggtttttagagaaataagtttttttcaaaaatataaataacacctttcgtatcaagattgatttctcttgagatctttagtgacctaaaattcttaaaactttctagagtcttccaactttggcaatacagaattattttttagttacaagctctaaatctctccctcaaaaaa

SEQ ID NO: 156302 - DNA, 412 bp, Homo sapiens
gcccagcatagttccaacttacacctgctgtaccagtgtaatgactaatagtcccctctttcactctgacagtatcccaatttggatgataaataacatcactatactatctaaaatgaaatttctctctcttgctcttcctcatttctgaccaactttctctttcacatatattgatggttaatgagttactcatttaaattccagcttaggagtttgtttattctgcgttctctctccctttttaatcaattattgcagactatttactcaatttgtcttagattagtccttttgtttctttaccactgccaccactctagtccaaaggttcatcaaatcatacctagattatgacaactaccatcctaacacctagattactataactaccatcgtaactgttcttgtt

SEQ ID NO: 156303 - DNA, 1269 bp, Homo sapiens
ttttagtgacagccttgaaatgtggtgacccataatcaaatgttctaaaccacgtttcatgatagactttacttcatgaccagttacttagtgtcatcatcaccacatattactctgcacgtgtacttcatactaaattttggattttagaaatgttctgaaggcaatacctcaagaaatatttatacagaaaacaaaagtttagttctattgaaatttaaacttgcttctctctacattgctttgcatatttcaaaaaaagaaaatatattcaatggcatttttatcaaccacttatatatacatagatacatacacacattctctttggcaaaatttttttccagcatgttttaagaaatttttttttaagtccttgctctgctctttttaaaaatggtctcattcaaagttgtgaaatatggggtgatgatatggaggaactctcctaagtttggttcatcaggaactctctctgtctttctgagacttttctccaaggatgttttgctgcttgtttggttatttgaattttgaaatcaggatctgtagatgttcttgtctcttctgccttatcaccacactctaatctgctcaccctgaccttccaccttgaagtgaataagcgcttaggcaggcatagtcctgtaagccgatagtgccaccggcctcagctaaatgaaaggaaaggaaattgtcctatatgcatttgctgtggattcatggattggctttctgtgatagagaaagcttgtttgtatctttggggtcttaaacgtgcatgggaaataccattctaacacactgcttgcttctaaggtaagactataggaaacacaggaaagttgccccattgagtgacatttaagacgttttctaaaaatagatggacagtgtctagcaacatcaaatatatgatgcaattatgctttgtgggtttttcatattttaatgtgatttcaatatgttataactatttttatatgtatttgtcaaatgtgtgttatttctataactctttagaattttgaaccacctccaacatttaaaattacagctggagcaatagtttttgatgagcactgtgtggtcataatgttactcaacatacatattatgagaggcagaactgagctgcagtttagtagagaggcgtgaggcaaaagtgaatggatagtcttagtatttaagcagcacttaatccaccagaagtaattatatcataatagcttctgcaattaaataatcaccaaaaactaaaaaaaaaaa

SEQ ID NO: 156304 - DNA, 1137 bp, Homo sapiens
  misc_feature (1)..(3): n is a, c, g, or t
nnnggctgggggcataaggatgtcttttggagtcagattcactggaatattttttgccactggcctgtacttcccttgtcctgttaataagcttaattttattggtacttcattttccattttcatttcaaaatgttctcatgagtttaaaaatcaattttaccataatgtaaatacagacctttggataggcaccaatctctaagagtagaatactgagaggcttgtctattttttttaaggaatagctttttctaaacacatagtcaagataccaatctgaagtctttcattagctttgaaaaaattataagcagtataatgtacatggtctctgtccattttgactaatttaccacaaaaagcaaattgagaggcttgaacctcaaatctgtagtaactagaaatgcacgatgtgatgactcctacgatattaacataccttatatgttacagctggcagatttgccagccaaaaattcattcccagcgataaactgagtaactagccacccaaatctctacattttgagcttttcttcacagaaacttaaaatcatcttggttaaagtgaaaatgtaaaatgagatcttggtagaatttaaaaagacaaaatggctttattaaagaccacaattgtgtcctcacttggaattattttttcttcctgcttaatctcatgacataaacacaagagcagggagagtctcaattaaaagcaagaatcctggaattcatcctaggtccaaatccctgctttgccacttaataatggtgactagacaagtcactaaacctctccgagtctgtatcttttcctacataacataaaagcagcagtgatcacatggcattgttgcaaagattaaaaaattcctgttttactctttcattaggcatgtggaaagttttcaataaatattagttattgtaacttctaatctagttccccttgtttactagtgaagaaaaggagatcccaaagagttgagacacatgtgcccacatttatccaactggttgatagttctggaactagaagctgctgcccctgatgcctagaacagagctctcattaagctgcagggcagctagggagcttttggtatctgtgttccagacatttccctactcacc

SEQ ID NO: 156305 - DNA, 475 bp, Homo sapiens
tccacacttcccatcctggtccaagcctcccagattactgcagtggccatggacttgcctccttctttcatcttagttccccagttatctgcagaggaactcagcggagtggttaggaaaatgcatttaaaacttagatcagactacatcatttatctgctcaatattctgcgatggttccccatgctcttcaaagtgatggtctaagttgttacaatggctgtcattcttacctgattcttgttgcctttctggccttatttcctaatcctcaccccctgattcactctgctcaggccacattgaccttcttggtgttcttccaacacaccaggcacgctcctaccttacagcatttacactggctgttttctcttcctagaagccattccacagaaatcagaggactccttcactttttttcaagttttgctcaaacaccccctcaattagacctacattgaccatcctattt

SEQ ID NO: 156306 - DNA, 257 bp, Homo sapiens
ggtccaaactctaagaatccagtcttagacagcaccaacccattgagtccctgcatattctgtcacaggtaagctctttcttgccttagggatttaagctgcagatggaaaatactaattgctgatttaccaacccatagacatactgccctccataatatttaatatgtaacttggaaaaacgaaacaattctgtagaaaacctctgatgtgaattacatcacactaacaatgaaaggggcccaggccttagcaaa

SEQ ID NO: 156307 - DNA, 357 bp, Homo sapiens
tccacagggaacaccttgtcccctgccacagcacagtaactaccatgccccacgctaaggtccttcctctgaagactccctgtcgcccggcccagcctccacatcaaatcagagataaccctggaccactcaccacatgcctggctcagttctaaacacgacatgcttttcctgccttaattttctaacaactctgagcaagtactactgttataatccctaatttccagatgagggaatggaacccctggagccatgtgatggtcaaggtcaggtcactcagctggtcctgagagctgcgatttggccctgggcagcttgggtgatatgcggcacccaacctgcaggccccacccc

SEQ ID NO: 156308 - DNA, 409 bp, Homo sapiens
ggcacagaattgttcgtagagttattttattatccttttaattactatgggaactgtagtgatattccccctttcacttatgagtaatctgtgtcctctctctctttctcttagactggctaaaggcttattgattttatttatgtatttttcttttttttaaaaaaaagcattggatttcattgagtttgtctattaattttctgtttttaattttatgatttctgctctaatttctattacttttttttcttccgcttacttggagtttaatttgcttttctttttccagtttcttaaggtagactctcaggtgattgattttgatcattattttctaatatattcattcaatgttataaattttttctaagcactgctttcactacatcccataaattttgataag

SEQ ID NO: 156309 - DNA, 320 bp, Homo sapiens
agggacccaggctttaccgttctgtgggactaatctccttctgcacccagctgccagcagggaaaagaaggcaaagaatggacctcttcagacctgttcaggagtggaacgtcactctgttcatcttcttggggctcagtcatggggctctgccagttgccaggaagcaatggagcagtgtttttggccaaccttgagcagacctctgctgccctgtgctaatgctgaaagtggctgcctaatcttctgggctttgtggactaacttccgctggccaactgtgggtcataggagcttttcttgcccccctccttaaattt

SEQ ID NO: 156310 - DNA, 322 bp, Homo sapiens
ggttttcatccaagtgttttaaataatattaacttgcctgaccatcaacttttctcatctgaaatacataaaccacaaacatgattttaaaaaattagtgaacatgaaagtgctttggtaaaccatcagacactttgcaagtcttacgtcttatgattattgtctcataagaaaatggagtgttccaaggaagggaaagagtagtggcagatgctacagagtttcagaagaatatttatttctagcccaaattgtttggcttgtaatttaaggaagttaagtcaaagaatgaatttgttctctaatcacttagaacagtatt

SEQ ID NO: 156311 - DNA, 175 bp, Homo sapiens
tatactgcccattttaataagctacactgaggtgatttctatttttctctgatttattaaatatatgtaatgaatcaaaaaagtcatagagaagtcagactttccaatgagctacagtccttaatcacatagtatttgtgagcattaactttttacaagatactcttggatgata

SEQ ID NO: 156312 - DNA, 398 bp, Homo sapiens
actgagagagaccttctcttccaccttctagacgagctagcaagacatcagattttgaaggctatatactgaagctcaggaagtccgtaacgagaagacaacataactactctacagttccacaggaaagcagacacttccagttgcgcccagaactcgaacttgtcaagaagaagttgctagcagaagtggtccagggacaaagtaggagccccagaataagtaccccccattatcgaagaggaaacaaaaggagattctgtagaggaaaatcagggaactcaacagaggcaattattatcccgaatgcaaatcgagccacaaaaggacaggaaacaaagtctggccccatgcaaagtgggtagctggtactgaaaggatccctctgactcaggaaa

SEQ ID NO: 156313 - DNA, 164 bp, Homo sapiens
cagtgtcgctttgtggctagtgttgggggtccagacttgaggcgccctgggctgtaggatgcccacagcctcaccactcccatgaactcctccagccccgtttcaccccaggccaccctccccgcagcctccccctgctcccttgccgtcagcgctgcccattt

SEQ ID NO: 156314 - DNA, 654 bp, Homo sapiens
aaaaataccttttatttaacattactatggaatgaggttctccacattaagtaataatacaagcctaactctttataaaaaaatttttaaaacttatcaccctttaaagaaaaacatttctgaaaatctgtttaggatggctgaaaaaacatacttacaaagttatcattaataatataaattaacatttttctgatacaatgatgatctatctatctaatgaggtggcacaaggaaaaggtaaaggggcttaatatgacagtcttttaggaaatttttattctcttttcctgccagatgtcattccacatcactatctactttattagccccattctcctacaatctgctgcttctagttttgtataatttatgacactagattctattagaagtgagtataaaaactagattttcaatccttacttattatctctattttaagtcttaggttttatatttagtattaagtatttctagatttttaagggttattctgattagttccaatgttgaaaaattttccctttataagtaaggcatgatacttggtttaccttaattcttccataaagaacatatcaaggctattttgcaacactgtgctaaacaaaactagcattaaatatatagtctgacaatatactaacaaaa

SEQ ID NO: 156315 - DNA, 353 bp, Homo sapiens
atccccctctcccttcctccctagcaggaactggtcattgtctaagggtcgtgattcttaaccgttctcagccccttccacacaggcaaaagcccaaagcatttcttccttttttttccattctgaggccaccttaggtgctagtggccaggtagtgtttatagaaaatctggtctctcttgggataaatatttttaatttttaccttttaaaaaagagaacatctttttttttttttttaagacagttgggctctgtcacccaggctggagtacagtggtacaatatcagctcactgcaacctctgcctcctgggtccaagcactgctctcgcctcaaccacctgagtagct

SEQ ID NO: 156316 - DNA, 227 bp, Homo sapiens
gccacggctgtaggaactcaactactgcttagactggacagtggatagagagagggtgaggagtacacacccagaacattctctccaagaccccttggtcatgctgcagggcagaaaagggtaaataatggctgtgggaggacagagggagaaggcccagcacaccagaatagacatagaaggtagaatacaaaattcacatgagttttaaaagcatcacatcagag

SEQ ID NO: 156317 - DNA, 159 bp, Homo sapiens
attcatctttcagtgaacacttgggttgttccgcctcttgctattgtcagtaatgctgctgggaacatgagtgtccaagtcactgttcaagatgccgctaatttttgagatctgtgtttgagctaagtgaagctgttgtctcctggcgatcccaaatag

SEQ ID NO: 156318 - DNA, 148 bp, Homo sapiens
taacatcttacattcacagagcagaattaccaaagctaagaaattaacattggtaccacactactaactaaattacaggctttattcagatttcagctgttttcccacaaacatccttaaaatattttaaaaaattaatttctccacg

SEQ ID NO: 156319 - DNA, 172 bp, Homo sapiens
gaaggaaaagtataacaacaaaaacctgtcaacataattttctattcccagcactccaaaaaagcaaaatgatactacttgaaaatttggatttacacgaaggaaaaaagcacatgaaatgacaaatatattagtatatataaaatacttgtcttatttttaaaaatctctc

SEQ ID NO: 156320 - DNA, 730 bp, Homo sapiens
cattaatctgttgtcctactgatattctgttcttcaatatttaaaaaaatgtattataaaataaatattgcttttaacattactgccatattaggctccttctgagtcaactgattaaaatttatttaacatacttttttagaacagttttaggttcacagcaaaattcagcagaaggtacagagattttccatatacctctgctcccacgcatgcatagcctcacccatgatcagcatcccctgcgcgagtgggatatttgttacaactgatgaacttatactgacacattgtcaccaggagtacattagggttcactctccgtgttgtgcattctatgggtgtgggcaaatatataatgacgtgtattcacccattattgtatcatccagtatagtttcactgccctagaaatccttatttatataacttttatgaatatttggttttttagggtaaattctggatgagcactgctaagtgaaaagatttgtgcattttattatcagaatgctctgatgctgtttcacaaatagtttataagcaactgtgaataatggaaagacttttgaactgtgggtattctcataaaaaatggaactcccagctgggcgcagtggctcgcaccagtaatcccagcactttgggaggccaaggcaggcggatcacctgaggtcaggagttcgagaccagcctggccaatgtggtgaaaccccatctctactaaaaa

SEQ ID NO: 156321 - DNA, 602 bp, Homo sapiens
agtgcctatactagcacttcatacacagcaccctgcagtgtaggtgctggtctcattgcataaataaggaaacaaggtcatacagtaagtggtagacatagggtttctatctggtcccagtccagctctgactgaccctaaagggtccttcttcacttcaccgtgtggagaccctgcttgcttctcactatagtgcagtggaagtagagcataatcactcttcctcccctcccaagtctcaacttccaatatgaaattgtgctttaagtccttgtttgaaggggcaagtgagatacataatacaaaagaacagagtagttctcaggagtttggcacattgtttagaaacctggactctggcagctgtacttctgacctcattctcctttgcagaactcagccctcccttggttcaggtaacactgcaggagtgttgattctccttatacccttctaccccttctttctctagaagattttgtttcctgagacttctgctaacccccaccaaaccaggagctccttctgagcaggaatttgtctccctcatcttatagcctcagcatatggcacagtgacctgcacagaggaggcaaccaata

SEQ ID NO: 156322 - DNA, 463 bp, Homo sapiens
gctccccctcctcagggctcaggccttagggcttggattagaagccacaccagtgactcccctggttctcgggttttcagactggaactgaattacaccaccagctttcctaggtctccagattgcacacagcatattgtgggacttctcagtcttcataattgagtgagccaattcccatagtaaatctcctcttatatgtctgtatgtattttattggtttttttctttggagaaccctgactaatcagtgttatatctaagaaaccattatttaatccaagattagaaagatttactcctctgttttcttctaggagttacatgcttttagttcttacagttaagtctttggtacattttgagttaatttttgcatatggtgtgaaggagttcaacttcattcttttgcacatagatatccaatcatctctgcaccagttgttgaaaggactattctttc

SEQ ID NO: 156323 - DNA, 1334 bp, Homo sapiens
agaggaagttgttaagggagaaaaataatgttacagcatacttctatttttgtgtgtccacgtgtttttaaaggagggcaggggggaaaaagcatagagccagccaactatggcctagcaaaacagtcacatttcaacctctgttgataaaagttataatattctgaatcttacactgcttattgccattgtcacaccccaccactatggggtatttgagtttcatttatctactataaaatgttgtcattttgtattttgctgcttggaaaacgatctcataaaatgggtttaaaatgattagcaaacaagtctattttgcatttgttgttatttcactttctaaacatttttgaaaacacctactatgatgcagatattgagctaaaataactgaaacaatctgtgcctcagagagtttattaaacaatggagtagaatacacacattattacaatacagtggaaactattgcagtagtcccaaagagagagaatgtgggctaaaattaaggcttcaagaaacatcttagacatggaactcagcctcacataggccaaaaacatgtgagtccccctagcataatcagctagccatattaaggaaaaaagctaaagaaaaatgtacaggatgctcctcattttgcgacggggtcatatctccataaacccatcttaagtttgaaaataactaagtagataaaaatacctcctgaacacaacttagccccgtgtagcctaccttaagcacagtcgcttacattagcctacagttgggcaaaatcatctaacacaaagaccattttacactaatgtgttgaatatcttatgtaatttatgaatactcaaaaaaacggaatggttgtgcaggtattcaaaatacgttttttactgaatgaatgcataccacttttgtaccattctacagttgaaaaattgtaagttgaaccattgttaagttggggaccgtctgggtttttttgtttttgagatagagttttgctcttgttgcccaggctagagtgcaatggcgcaatctcagctcaccgcaacctctgcctcccaggttcaagcaattctcctgcctcagcctcccgagtagctgggattacaggcttgcgccaccacacccggctaattttgtatttttagtagagactaggtttctccatgttggtcaggctggtctcgaactcccgatctcaggtgatccgcctgccttggcctcgcaaaatgttgggattacaggcgtgagccaccgcgcccggccttttttttatttgagacaaagtctcgctctgtctcccaggctggagtgcaatggcatgatctcgg

SEQ ID NO: 156324 - DNA, 163 bp, Homo sapiens
tctttggcaagtccagttgatctatttccttctagctctcaatatatggcttccccacaggtatgccagaccatttatgctgcttcttaaggtctgtccatcagggaacggtccatctggttgatcacaacaagacatcagcatcatcacgtgctattcgtct

SEQ ID NO: 156325 - DNA, 399 bp, Homo sapiens
gcccagattcccctaatcattctattgactttggctccctttcagggtaactcaggtatttcttcactgatgttaatgaatgcttcattttgaaagcacaattagaatttgcaatttgggggcaccgacaccctttaaaaattgtaatgttcctaacgttgctggcaataaatataccttaaaaaattcagttaaagggataagttactcaactaggatgcttccattttagttttaaatttgtgtgttaatgacttctcaaatatttcatttcatgaactcccctcagtcttccctctaattgtcttataggcaataagtgttattggtttgtttgttttaccagtgtctaagactatttgattgtggtcacgagagtcttaagtgtgacatcactga

SEQ ID NO: 156326 - DNA, 445 bp, Homo sapiens
cccatgtgatcatctcaatagatatagaaaaaggatttaaccaaatctcacatcctttcgtgataaaaactttcaacaaactagaaatagaagggaacttcctaaacctaataaaaggcatctatgaaaaacccacagctaacatcatacttaactgtgaaagactggaagctttccctgtaatatcagaaacatgatatggatgttttctctcaccacttctattcaacattttactagaaattttagccagggcaattaggtgagaaagagagttagaaatgagagaagtggaagagagaaagagagaatccagattagaagaaggaagttaaaactacctctattagtggatgacatgattttctaaaaaatcctaaagaaacacacacgtgcacacacacacacacacacatacatacacacacattattagagttaatga

SEQ ID NO: 156327 - DNA, 346 bp, Homo sapiens
atattacatggcaaaaggggctttgcagatgtaattaaacttaaggattttaaaatagggacgttatcttggactttccaggtagacccaatctaatcacatgagcttaaagagagaactttctccaactaaaagcaaaagagatgcaaaaaaaaattccaagtgtaagaggaattcaacatgccattgctacctatgagatggaggggatcatctgacaatggcacaaggaaacaaaaagaggctctagaagccaagggctgatccccacctgacaggcagcaaagaagtgggcacctcagtcctacaaccaatcacaaggaaccaaattttgccaataacctga

SEQ ID NO: 156328 - DNA, 448 bp, Homo sapiens
acggaggaggtgatggtgctagcgttctagaggacccagcactggccgactccttggaggtcatgtccactttttcacactccttgctaactgaagtagccaagaacctaggtttgggaagacaacctttcttcagataaaaccacaagtaaaccagaccagacttaagagaatctaccttattataaggaccccagagatagtaattccaaaagctactgaaaagaaacaaaaatgtttagttactgtttactggaaaatctccccaacacatatatacaaattcaattctaatccctgattttaaaaataagcctgttatacagtctgcctggcttgacaaatttgacttgggggcaccttgagtgggcggagggcaatcaaagtgataggaagtgatgtcccagcgccactaaagccaagacaccacctaactgctcacagcgac

SEQ ID NO: 156329 - DNA, 443 bp, Homo sapiens
gtcctaaccttcctctggtttggtgggtggtctgaaagttttcttcttggcaaggtcatgtccactttttcacactccttgctaactgaagtagccaagaacctaggtttgggaagacaacctttcttcagataaaaccacaagtaaaccagaccagacttaagagaatctaccttattataaggaccccagagatagtaattccaaaagctactgaaaagaaacaaaaatgtttagttactgtttactggaaaatctccccaacacatatatacaaattcaattctaatccctgattttaaaaataagcctgttatacagtctgcctggcttgacaaatttgacttgggggcaccttgagtgggcggagggcaatcaaagtgataggaagtgatgtcccagcgccactaaagccaagacaccacctaactgctcacagcgac

SEQ ID NO: 156330 - DNA, 533 bp, Homo sapiens
aaccattagagtgatgggcccacgagccaaggaacgccaaagactcccagcaaaccaccagaagccaggagacaggcctgaacagattctccctcccagccctcagaaggaaccaaccctgccgaaaccttggtctcagacttccagtctccagaactgtaagccaatacaattctgggacctaagaagccacccggtctgttactttgttatggcagtcctaggaaactaagacaaaacacatctctaaaaatataaatccctggtctcaagaactcagggtatgaagaagcataaatctgaatcttgtccaagtggcaaaccactgctcacagccctggttccttcctgctctcagcgctctcagctcacagccgtcatgcatccgaagaggttgatatgtgtgagaaagaccgaaggaaaacaattgctcatttgattccccgtaatcttcagtgatgttccctatctgtttacccatgacaagagcaaatcttatttcctgacatcttcacctacttaaccaatgaacc

SEQ ID NO: 156331 - DNA, 569 bp, Homo sapiens
  misc_feature (126)..(126): n is a, c, g, or t
  misc_feature (143)..(143): n is a, c, g, or t
  misc_feature (176)..(176): n is a, c, g, or t
agaaagaacaagctcactgaaggctcagaagattgcatttttagccataaaatatgttttaattaagatatgtacactgttttatagacataatgctatagtgcagtttaataggtatagtatacnagtatagtataacacanacttttatatacacgtggaaaaacaaaaaaatngtgtgactcgctttattggatatttgctttattgctgtagtctgggaccaaacctgcaataactccaaggtatgcctgtacaagtcaacttttccaagcttccattgagacctgcagaggagctgcttgagttcccatggccaagtgctgggattagaggcgtgagccaccgtgcccagcctttccttgctttttaatgtgtttttctgtgtccctatattgatgtctctgtattcgatgaaataatcagtgattccaaatttcctagtgtgcctgttctagaaaaagactttagagtttcattttattgtgccagttgggaatagtgtggtgattttgcttatggatgagtgtagtaatataggctctgtgcagacttttctcccttttatt

SEQ ID NO: 156332 - DNA, 321 bp, Homo sapiens
tagttcagtgggaccacaccagaggtcctcataataatagtgtgtcctctaggaatgccctccaaccaccaagtggtgggggctttttttgtttttgtttaagtttatacagagacagtttcgctctgttgcccaggctggagggccttgaccgcctgagctcaagcaatcctcctgcctcagccctccgaatagctgggaccatagacatgcatcatcacacctatccaatttttctattatttgtagatacagagtctcgctatgttgcccaggctggtctcaaactccttggcttaagcactctgcatgcctcagcca

SEQ ID NO: 156333 - DNA, 578 bp, Homo sapiens
gttcaagaccagctggcaaacagggtgaaaccctgtctctaccaaaaatacaaaaattagccaggcatggtggtgtgcacctgtaatcccagctactcgggaggctaaggcaagacaatcactggaactcaggaggcggaggttgcagtgagctgagatcgcaccactgaatgccagcctggtctcaaaaaaaaaaaaaaaatcttaatgttcttcattggctaacttcatataccaagcctacttttagaggaaagaggctgaataatcacatacccctaaagcggtacccctggaaaaagtcagactttgggaacataagaagttggctttctttaaaacgaaaaatgtttctctgtttcataaacaaaaaaggcctgaaagactactcccaggaagaccattaaaatgctgaattcacctagaactaaagttaacattttaaagctggaattcaaaggaaaaaaagcacatatatatctgacttttatagcttttccaattcccaatacaggatttttaaaatcctatttgatgcaatacaatttaacgagattccagttgtgctaaaaataatt

SEQ ID NO: 156334 - DNA, 539 bp, Homo sapiens
gcgtgtggatgtgcgtgtgcagagacgggtgtgtgtggacacgtgtgtgcagagacgggtgcacttgactccatgcgtgtgtgcagagacgggtgcgtgtggacacgcgtgtgtgcagagacgggtgtgtgtggacacgtgcgtgtgcagagacgggtgtgtgtggacgtgcgtgtgcagagacgggtgtgtggacacttgtgtgtgcagagacgggtgcgcgtgactccatgcatgtgtgcagagacgggtgcatgtggacacgcgtgtgtgcagagatggatgtgtgtggacacgcatgtgcagagacgggtgcgtgtggacacgtgtgtgtgcagagatgggtgcgcatgactccacgcgtgtgtgcagagacgggtgcgcgtgattccacgcatgtgtgtgcagagacgggtgcgtgtggacacgcgtgtgtgcagagacgggtgcgcatggctccacgcatgtgcagagacgggtgtgcgtgactccacacgtgtttgcagagacgggtgcatgtgaacacgtgtgtgtgcaga

SEQ ID NO: 156335 - DNA, 263 bp, Homo sapiens
ccctacgtgacccagcctgtttacccctccagtcttgttctcatgttagtcctctcctagttccctacatcccaaacataatagatttctgtgaattcttccaaagtgccactgccttcccaatgttcacacgttcctcatgtgtaggttcctcagcctacatagccattgtgccagggaggcctctcctgactctccagaccaggtgagctctcctgctttgcagtctgttggcaccttgctcttgctctgacattacacgg

SEQ ID NO: 156336 - DNA, 183 bp, Homo sapiens
gggaagtaaagggaatcctcctttttaaatgcatatgcgaaagttaagggaatcctttcactaggcggtaagcctctgtctagggccgtgggaccattaacaccactcgcctcgtagaaggtgtgtgtcattcaaggtgataatgcataggaacagctcagctatgtcagggccaggccatta

SEQ ID NO: 156337 - DNA, 288 bp, Homo sapiens
ttggcctggaaggtctttagaggtgactcctcctctcatgggctcttttgagagttcttctgaggctcctcctgggaacattgaactatatttcccatgacaacacatgttgcattttcctctggctgtttttcccaatggcccgcactatatgggccctctcagttggggtcagtcactttctcatggaatcctcttatgtgggatttcaaatcaatgcagtctggctctctccccagtctgccttctcttcagcctatgaaaaacactcccacattatttgctccg

SEQ ID NO: 156338 - DNA, 347 bp, Homo sapiens
ggagctgaccggagcgatctatgtggttctgtgtatttcatctcttggcctgtgtgtccccatcctaatatccttgaagtatcaaagcattgctaaataaatacccatgaagtttgctacaggggaagccagcaaaaagttcttaatttaaattcttgttttggaagagaacaagcagagagaagagaatgctttccattccctggtttaagtctcaatgaaaatggccatgtgagacattttgggtaaaaatgaccttctttggctcccattttggctgatgtgttcacttcttttccacggattgctacctcccctccctgctgcccccgcctgcaaagagacag

SEQ ID NO: 156339 - DNA, 613 bp, Homo sapiens
gaagaaggctgcaaagccgaaggaaaaatgcgaaaagggtcttgctgcatatcgagctaaaggaaagcctgatgcagcaaaaaagggagttgtcaaggctgaaaaaaagcaagaaaaagaggaggaagctgaggaaaatgaagagggtgaggagggggaagataaagagatgaagatgaagaagacaatgataatgaataagttggttctagtttttttttttcttgtctgtaaagcatttagcccgcctgtacacaactcactccttttctcaaagcacaacaaacaatggacatatggtcaagcgctggtggtaaacattgggtgttcttcaacaccaattacattctcatcttttctcggctatcaattaaccacctattaccggaaaaggttcctcttagatacgccgattcgtctcggcggggctattctttttcctcttgtcatcatctctggaagactgggagtctccatcgggtccacccaagtgctggagtgcaatggcaccatcttggctcactccatcctctgcctcctgggttcaagcgatttccctgcttcggcctcctgagtagctgggattacaggcacacgccaccatgccctgcta

SEQ ID NO: 156340 - DNA, 402 bp, Homo sapiens
taaagaaacttgttttccaagttctttaatgtttcagctccacctacctaactgcttcctccttgctggcaaaactggcatgtagcccctccagccattactcatttttcactcccaggtctcccttcccattctccagtaccagcaggcagcacaaaagggctcttggaattagcatcttgagaaaattaggttgatataatgttgatttaattttctgagctccaaatgatttcctttaaacccctgcctggcagaggagctctgtcaagctgatgggaagtcacagtgtcttttttggcttttgtatacaaatgcctccagcagctggtatctggttattgccttttgctgtcatgaaaatgaagtaggcaccagggttgtaccattcaggttgagggt

SEQ ID NO: 156341 - DNA, 545 bp, Homo sapiens
ccccaggaagccattggtccttggctctatggtccccagacacttgacaaggccaagtacatcgtgcttaaatatcaaacacccatgcctccagaatccaccccaggacccggctctaatgtggatggctgctggtcctttattctttggcccctgtggttaatatcttggcgatttccttactcttacgggaagtattgtcagtaatttaacaaggctgaggagatcagtctcccaggggcagcagaacagaccacagcgctggcccctctgggtctgcctggcacgaaagagacagaacgacatgtttacctcccattctgggctccccctaacattgaatttctgagaagaacccagggcctcctgagaggaggtctctacagcaggttaccttagatcaacctgccactgtctagtggtggctggaggccatcctggccaaaatggggactttgttttagatcagttactcaactaggtccctactagagactctctagaattcacgttggaaacttgatttcaagcctggaataggagaa

SEQ ID NO: 156342 - DNA, 432 bp, Homo sapiens
tctgaccagcttttggcccctttggccattttccagagccagtcctttttccagcaagtgttaagcactctattgtgtgtcttgagctatgctaggcaagagataccttggtctggcttctgccctgagaaagctcacggtctagaaggggagatggatcaataaactgacaaaacagtgttcgagaagtgctctgggagatcactgagtattgtgagaactctaatgggcagcttacctagatgggaactgagggcggccaggagagcttctcatgagttaggtttgagctagatatgaaagacgagcagaagttaaccacatgaagatggtaaggaggggatttctgggcagagggaacagcatgtacagagaggcacagaggaatgggaaagtgtgctgaattaagagaggtgcaaacacaagtccata

SEQ ID NO: 156343 - DNA, 367 bp, Homo sapiens
agcccttctgagacatctctattcccttctctcgcttggtcttcacagcacttatcagaaccctaaaaacccagatttttcattgtctgtctttctggccaggctgagagtccccagggtgcaggctctttgttggaaatgttcactcctctgtacccagtgtctggcacaagatgggtacttccacacatggctgcttgctggcctgacatccactccctcccttcttcctcagttttgttccagaattccatccttcctcacttgactcaggggaagatgactacagccccagctacaggggtacatctcagctagtccaagccagtcgtggtggagcttgccccaactgcagttggtttaggtg

SEQ ID NO: 156344 - DNA, 246 bp, Homo sapiens
tgagccttctagaggatcccaatcagtttacacaaaaagtagaagaagacaacgttattatttgaactaatggttaaatatttgaaggcagaaatttattcagttgaattttgatcaagatcttctctaatatatttgaaaggcaagcctcccttatttccttaatcttctagagacagattgcccaatagaactttgtgtaatgattgtacttttgtgtttttgttgttgttgtgtaaactgatt

SEQ ID NO: 156345 - DNA, 309 bp, Homo sapiens
agtgtgtgagaactaactgcaggcaatgcagcaatcagtttctgatgacatccctacctagtttacctctgtgtttagctgcctgatagagtcactgtaagatactttgttaatgcagataatgaagccagggttgtttgtgctttgccatgttaatttcctctgatcatcatctatcagacttgtattaattactgctgatgcagcccttgttagtctattttgtatgttaattactgagttaaatcacttgaagctagagtgctctctcttcttgactccttcctactcccttcctttcttcgattc

SEQ ID NO: 156346 - DNA, 290 bp, Homo sapiens
atagaggacggggattcatctaagatacaactcagtgatgccgtgtactacttgaatctcatgtatcctgtcgcagcgttgtgccccaaattgctaggatcttctagacttgagctgcagggcctcaaagtgtggcactggtcactcataaatggattctctcactatcacggtataaactcgtctatattgtgggatatggcgtgcacgtgtgtacatgcttaggcgcatgtttctccatgttttcccgagccacggtgcttcttcccccgcaggggctctggtcgatt

SEQ ID NO: 156347 - DNA, 665 bp, Homo sapiens
tgaaactcagtggtctaacaagtagcataccccaaatttacaatatttgtagccttctgctgttgggtacattcatgaaaaggtcttgcatccttaaagtgaaggctgaaagagttttatgtcattggggcgagtgggctaccaagctcccataaattctaggagctgccttttgtctaacgattaggattattgagtactattttgatgccttttgggtatcatctgaaatgtaatcattgaattggaaatggaataaacaagagaaaggctagtttactcattatttgacaatagctctttaaagtagttaatattatgaatattcctactactaaggtttataagagtttgtttttttctttaatgttatactttaaaaagtattattcattcactgggcaaataatttttttttctagaggaatacctttccaattttataacagtgaaggaaggaatgttttacttatagaaactgtactgaaactactgttctattaagcaagggttggagataagcacccctgtcccccttccctgcccaggcacacacatatacagatacagcttattttatgactgtattgttcttgtgtttcttcttctagataaagacataaagattgatgaaataatttacctggagttgcacagtaagctag

SEQ ID NO: 156348 - DNA, 707 bp, Homo sapiens
ggtttgaggtatagagggcacggggaagagtgatggtagatgaagctaaagaagtaggtagggaccaaattttgacttttcttagggtcatagaaagctaccagactgaaagtaacaagatcagattttcttttatgaaagcattctgccatggtatggatgggtagtttcttaaaatttgtctacttgcataccaaacaaggaaaaatgaagcacataccctttgatgcatttgtgtgtacatatggatgtgtgtatatgtacccactaacacagtatgtgtaccagtctttctataaatattttaggatttaaacaaagttgttataaacaatttttaaatgtcttgctaatcatgatgacttcactgccagtatcttattgaatgataatatactttagaagagtttcattaacaatgatagaaagtataaacccatatttcacatagcttccttaagaatttaacctttttttggcctgatttcactgtttttacttcatagtatagtcaatgaagagctcatactagtgatagcagtgtcagttatgcctttttttatgttgctatttgctagtgcttacatttttcatattattctcactctgtaattttttagcaatactcatttaagccagttatttatttggtgagttgctttattcaaattagatgacaatccataaatccaatagataatctatcc

SEQ ID NO: 156349 - DNA, 209 bp, Homo sapiens
ctcactcacctcctcagtacccatgctcttgctcctgctgttccgcctcctgggatgcctgccctggcccacctgaatcccatccatccctgcaggccaggcctaatgcccatttctgtctgttattcatccatgtaaacaaccattgtttgtgaaagcactttctgtccactcagttcaattcagtagatatttcctgcctgtctact

SEQ ID NO: 156350 - DNA, 415 bp, Homo sapiens
cggatggaagagctcgggaaagctaaatcattgatgtgtgcatgtaagaagaatgatatatgtacatagggagataagagtgcaaaacttgtaagaggtgtatggtagagatcctagaacttagtaaacaaatatacttcaaactataaggtaattctcagatggaataatatctcttgggaaccaagggacacagtaagcaaaatgtgtctgttttcctttggatatgcagcattcaaattagtctctcttcagcaatgtgtgttttaaccagttgaaggaaatttttgacagctaggtatcttttttaaacctatttaaaaacttacatgtctctgggcacttgatcatacctggcattttgcgctctgctttccctgtggttttcctaatggtgtattgtttgtgcttcttg

SEQ ID NO: 156351 - DNA, 557 bp, Homo sapiens
cttattttagagggcagaaagggaggaaaagaggcaatgttcttcatcgaataaagctcttcactaaagtgaagtctccctaagcctttacccatgaccatagcctcgctgactgagtggatccatgtctggtaaactgatgcactaatgtgacaagatacccaacatctgcactcatgtgtgctagatactcaataggtggatattgctagaatcagggaagccttcagagacctgcttccatagaaacatagacatctagatttgctttgtccccatctctccagatttgtctgtctcctctgagtattgaaatactgtgccattcttctctgaaccactaaagcctgaccatagattcaccaaatactctttctttggagcccttgctgatcctctagtctacttcatctttggattcctactattttgttttcactgaggctgcacaggcaggccctgattaagcccaagttccagaaatcttttatttgacacccgtatctagtttcagctagtcccctgacttatccagagctaagtccacctgttccttc

SEQ ID NO: 156352 - DNA, 440 bp, Homo sapiens
gtcagcccctatctctcctggggagtggaggctgctctggagtggggccaagatcgggaggcccaggagagaaaagggcctgcaatctacctcccagtcaacaagatgctataataaaaacatagccaactgtcactcagcgtttattacggtgccagatgaggaaacaggtgcagaaccgtggagtaacctgcgcagggtctccagtagaaaaacaggcccttggtcagatgaatttacccacttcggccaccaggggcgctgttggcacagcttgaactcgagaccagcgctgtccaacggaaaccgaacgtaagccacatttctaaaaagtacacaagaaaagtgaaattagtgttatattttctttaactcggtatatccaaaatagtatcatcttggcatgtaatcaacacgacatttattagatactttacttt

SEQ ID NO: 156353 - DNA, 204 bp, Homo sapiens
ccctaataccacacagagtttgtccattagttttattacttaaggggaatctagtgagaaagtggtgtcatgcatttttctgtagaaactattgtgtagtattgtactgtgatggaaatacacagagacattggagaaaattctcaggcagaaatgatgttactttcggacaagttatgtgtgtacatatacgttacatttagc

SEQ ID NO: 156354 - DNA, 228 bp, Homo sapiens
gctaactctggctctctctacatctttatattaaagggtcctggacctgtgattgttgaggtggcagggaaaactgctacctgttcccattcctaatagaaaccatcttttgatgccattcccattgtatttttccacaaaaaatgtatttacagatttctgggactgaaaaattgctgaatttgttaaaagagaagaaaaaggtggcccagcaagatggctcatgcc

SEQ ID NO: 156355 - DNA, 394 bp, Homo sapiens
ccaggccggagtgtagtgatgcaatcttggttcactgcaacctccgcctcccaggctcaagtgattctcccacctcagcctcctgagtagttaggactataagcatgtaacaccacgactggctaatttttccatttttagtagagatggggtctcgccatgttgcccaggttggtctcaaactcctgagctcaagcaatcctctggtcccgtcctcccaaagtgctgggattacggatatgcgttactgagccaggccgaaaccatttctaatgattttatgattcttttattgcattaaagtacaaagatacagttgggtttttaaatagactttatttttttagagctattttaggtttacagcaaaatcgagcggtaagaacagaaagtt

SEQ ID NO: 156356 - DNA, 193 bp, Homo sapiens
tgcctcattcactgaccccatttctacagaactccctaaaccatccctaaaacctgccttactccctgaacctattccctcaggagcccccaaattcttcctataacctgcctcatccattgaccccatttccccagaactccctaaaccatccctaaaacctgccttgctccctgaacctattcccttagga

SEQ ID NO: 156357 - DNA, 344 bp, Homo sapiens
aggggtcagcatttcaatatatctcttgtagggggacacaaacattcaaaccatagcactcacatcattaaaaattcaatcaaggctgggcgtggtggctcacacctgtactcccagcactttgggaggccgaggtgggtgcatcacctgaggtcaggagcttgagacctaggaaggagaatcacttgaacctgggaggcggaggttgcagtgagcccagatcgcaccattgcacttcggcctgggccacagagtgaaactctgtctcaaacaacaacaacaaaaacctcaaacaaaatcaaacaaaatctatccgtggcgttctggtaggaccatgggtactg

SEQ ID NO: 156358 - DNA, 389 bp, Homo sapiens
tcccagggttagatgtcccgtttgtcttgccctttagtattgtgatgtatctaggtgtggatctctggtgtgcatcgtattgggctatcagtaagcctcttagattcatagattaatgttttgtatttgtaattaccaaatttggagagtttttactcatcatatcaacaaatttttttcctgcctcagcctcttgagtagctgagattatagatgtgtgccaccatgcctggctaatttttgtatttttaatagagacggggtttcaccatgttggtcacgctggtctctaactcctggccttaagtgatccacctgcctcggccttaatgttatccaaaatgctggggttacaggtgtgagccactgtacctggccaaaggttcctt

SEQ ID NO: 156359 - DNA, 458 bp, Homo sapiens
agcggtctggggcgggtcagctgggctggcagagcacatgggaatcctctctggaggaaaatgcaggcgataccaggtatgtagagagtgggattggcctgtgcaacctcaccagagatcagcagaaatatacctccctccagcgagagtggaagaaaagaaggcagatttggattcctgaggatatcaggtaaggaaaataaaaaggctgcctgtgaaatgactacataaaagacgaagatgcaacaatgagcaaggactattttccaaatggtgaaatgagcaggaatgttctcaaaatgttaactgtaatggacagaacaaaaactcaatgggggccgggtgtggtggctcacacctgtaatcccagcacttcgggaggctgaggtgggcggatcacctgaggtcaggagttcgaaaccagcctggtcaacatggtgaagccccgtctctactaa

SEQ ID NO: 156360 - DNA, 455 bp, Homo sapiens
ttaatttatggaagtactgagatgaacgataaatcattaagaagccaacactttatacaactacatttctaagtttacacaaatacccatatttaattggcttaactcatatgtaatgctagaaaatattcaaaatactaaagttgacttctaaatacattttgttttcaaatgttttcattatctaaggtttctaaccaatacaaaagagcagttaataagataatgagtttatgtataacccaatacccaactctatcagctttgtcatttctaagaaaacaaaatcatagagtggatgtctcctgtttagcattctcaaacctaattccctttccctgttaatcagaaatagccaccattctgaactttagcatatcaatttaaagttattttagaacattttttacatatgtaggtaaccataaacaacgtccagcattactttgcatatt

SEQ ID NO: 156361 - DNA, 572 bp, Homo sapiens
ttgaacctgggaggctgagattgtgccactgcactccagcctgggcaacagagtaagactgtctccaaaaaataaaaaataaataaaaaaaaagggggggtggtgaaataccttcaaagtactgaaagaaaaaatgtctaaataaatttaaaagtattctagtcatgttttctggttatgatgtaattaaattagaagttagaaaggtataaggtataggaaatattcccagaatatttggaaactaaataacacacttctaaataacacataatcacaaaagaaatctaaagggaaaacacaatgtatcaaattttgtgggcctggcatggtggttcacacctgtaatcccagcattttgggaggctgaggtgggaggctcacttgaacccaggagtttgagacaagccagagcaacatagtgtgacccccatctctacaaaaaatttaaaaataaaaaattagccaagtgtggtagctcatacgtgtagtcccagctacttgggaggctgaagcaggaggatcgtctgagcccaggaattcaaggctgcagtaagccatgatcacaccac

SEQ ID NO: 156362 - DNA, 208 bp, Homo sapiens
ggggagccagtctatgcacagaatcaaggggccctctgccaccatccccctccctgacggcagaattccagcagctgagcctacgcctgattcctgctttccagcactttcccagggcagcaagggacagccactttgtgtaaaaagccatttaatactatttgatttctaagctatgtgcaatacactatgttaacatatatatata

SEQ ID NO: 156363 - DNA, 545 bp, Homo sapiens
gaaagacttaattagggcttgttcgtgctgtcgtctgggagcatttcctgtggaagggaggggcgagagggggagtgagagagattctttgtcaagctgaaaaggttatgcaggtgcatgatttgctttcagcccttgccaagtcacagcatattgaaagagactacagaatacaattttcattgttcacagcatgctgccagcatggaacactacacatcccagggaagagtctgaggcgccacaaaagctgagagccaagctcctggctgtgaaaatcgctccccactattcgtcatcatcaacatcatccacagaacttcgttacaccacactcagttacactttgctccaaactgagagaggctctggggcagaattcaagtgaaatggcaaaacctgacttctgccttctttgatatcactattaagatatttggacagaggcagaggtaggggaagggacctctagagggagcagaacaaaacagaaaagctggctgtaaaaaaaacggttgtcatccgcaagtcaagaataggccctg

SEQ ID NO: 156364 - DNA, 138 bp, Homo sapiens
ccctgtactgcccctcctctccaagcacacatagggatagaagagccccattataacacagtttactattgcacagatttaagttatgtcacaggtcatatatctctgaaaacatagcaattacattcacatgtgtat

SEQ ID NO: 156365 - DNA, 697 bp, Homo sapiens
gagttcgagaccagcctggccaacagggcgagaccccatctcaaccaaaaatacaaaaattagccaagcgtggtggtgtatgcctgtagccccagctacttgggaggctgaagtgagaggactgcttgaactcggggtggaggttgcagtgagccaagatcgccccactgcactccagcctgggcaacaatgcaagacccctcaagacaaaacaagcttatttgatgggccttaaggaatattcctgtactccaactgttatgaaaataaaagagagtagatgaaaagatcgactacacagctacaagacttaactaatgtaagatccggaaaagatgtttaggtgatcagggtggcacacttgatggcaggtagggtgcatcatctgagactgagggtataacccatgacagtcagtggggttgaacggagtccacaagctctctgggtggcctgctccattggcaagatgagggccacctcctctaagaattcttcatatctttaaaactgctctcttcacatttttatgttttttccaaatttattgtccttcctcaaagacactatgttgtgtccatatagaattgattattacatgattcatctagggaaaagcttgagtagaaagtgagaaaaatgagagaaaacaatgttaaacaactttaacaaatattaatgtttcacttaattcatt

SEQ ID NO: 156366 - DNA, 589 bp, Homo sapiens
caatctccatcccagttttaccttctcctaagtatctacatctcatttcctaatggatgacccccaggcaccccaatttcagcacaattaagataaattttcatcatttcccctaaccagctctttctgctgactcctaactcccccagtgctccaggctcaaagtcttaatgggatcttagaattctccctctgctctgccttcagggacaagccttcagtgaggacatgtcctgtcacatccccaacactcactccttgctcacccagttggccactccaaccttcccaatggtgtgaacactcagactgaacttgaggtgctttcctttcctcatcagacacacctttacagaacacctagtcagtgccaggtactgcagggtactctgtcaaactgggtttctgcagggagaagcaagcagaggcccaagtcagtgccatggaaaggtatttgaatgagggccacttcccatccaaatttgtcacccttcatcacctcacacctggatggctacagtttcctaattggcctccctgcctccaatcttccttgcctatcaccaccgttcaattttcttttctttct

SEQ ID NO: 156367 - DNA, 448 bp, Homo sapiens
cttgaactagttctttcaaagatgaatgggaatgagggttttcttagcttggactttctttgtttggaattttctggaaacggcaagtagtttggtgtggctggaaggactggtgtgagtcgtggaatggtagactcgagtgtggtcagatacgcctaggtcagtcgtgaatagtcttgtgtgccctactgatgatcagagtccttgaagactttaaaagcaggattgaggcatggcatacttgttttgagaagataataggcagcggtgtggagaatgtatcagagtcaggaagaaactgagaccaggagagattagttacaaacagggtcctacccacatggaatgcagagcctatcaaagaaggtgaaataagttgcaatattgtacaataactacctcctgccgtgctccgctttccctcgcacgcagctattcctccctcctc

SEQ ID NO: 156368 - DNA, 1058 bp, Homo sapiens
tgcgtaggcaggcatctgtgcatctgtgctgtgtgtatgtgctgaccatgtgcaggctccccccatcaacccccgcagcaatgcagggccccctccctggcctgcctgtgtcgtgggagcctcaggaccctgagggagggaagctgttgctggcggatgtggccaagatgggctggatttatttagattaaggcggtgggaaaggagtggagaattgtacgtgctgggaggagggaagtctggggctctgagaatgactccccaagcatgcttgctctcctggacttggggcacccactcctctcccctggacttggggtccttactctgctcctttgacttggggtccccactctgcttccttttgacttggagttcccagtctgctcccctggacttggggtccttactccgctcccctagacttggggccccccactcctctcccctgaacttggggttccactctgtgccccggacttggggtcctcactctgctcccctaaggggtccctctgagtcacgtgaggagctgggcatgatctccactttgggcctctgagcctacaacctggccagaataggaggaatcaggaggggttcctggcacatagcactctcttcatgggcaaaagggggacacctaggggtgccctccctctctctgctctagaggcctccctgggcaggagagtacagcagatagggggagtgcctgctctctgactgtgacatccagcttgtcctaggtggcccttccctagagtacagtcctcctaaagaggggaagttgtcacaggcaagcccactaccaccaagtcagctgcctgggcctccctgggattggctggaaccagaacagcctctgggaagcacaaagaggcctaacacatttggtggaaaatgtggggtatcagggagtcatccaggatggcctgggaagtcatgtctgggtgccctaagcccttctctgccctccctggccctccagcctcttgtccctaccactctttccttgccacctcctggggttccacgtcaccagcggaaagtcccct

SEQ ID NO: 156369 - DNA, 603 bp, Homo sapiens
ctggcaagacccaggttcagtgtgagaccaaggggaggaaagagtggatagccgtctcaccagttggcataggttggaactcagaattaatttcaccatagaaattgtgccctaatagtgattaagtgctttaccactgttaatatattatttcaggtacttttatttgaggagaggggaatggtgaggaaaacataaattgcctgcagttagaaaccatgtgctttgttgacaaaattttgatcctctgtgttgccccattttcagatactctttttcataaaattgggaaaaaatgggaataaatgaatattaattttctgcggcagtgaataactgatgccatctcagtccacttgtgcattaaaaagagaaacattctgtggttccgtgcttctcatcaatagggtcttttacaaacatgttactgtacgtggctgatttcgtttactagacaattctgaggaaggtatgagtgcttttagacttggccacgtagtaactccaatttatctagatcacaaacaataggaaagttcaacagtctgggagtttccaaagccctataccatataatggtaacctttgaatcagaaaaaaaaa

SEQ ID NO: 156370 - DNA, 223 bp, Homo sapiens
tagaatcttaagcacgttaatgctacttactttgaccaacgtacgctggatatttgtaaaatgtatacttgcccttatttagacaaaaaagaaagcccctcatgtttgttctaaaaaaaaaaaacccacgaaatacaatcccacacaagctaccctgactgcacagtaagtacttttccagctttggccagagcaaactaataaggtgcagtttttttttaaa

SEQ ID NO: 156371 - DNA, 290 bp, Homo sapiens
accagctctctacacctgccctgcaaccaagggtatcttctcaaagcacaagtctgatcattaatgaagctcttctctccacagccttcgggggctccccatcaccctgagcatggcacaggggcccacacacccatcctcatcccctccacaccttcttctcccactaggtgacagggccctactgacctctctacagaaccacttccagttctccagcactcgctggtgcatttcacatgccctggacttcgcgctgttacatcttttgagactgcctttcccctcct

SEQ ID NO: 156372 - DNA, 274 bp, Homo sapiens
acagatactcactaagcactccacagctctggcctgtgctagaagacaaggactcagtcatgaggagggcacaggtggtgccatctcctgagttacaagacagtcgagggagatgtagacaggatctgacccatgaatgaagatataattcccaggtagctcactaagttgagaatagttgtacaaagagaacacttaagggaaaggcggaattatatgctctatggaccgtgaggtggtaggatgcaagaagttttggcaaaactgaaatgag

SEQ ID NO: 156373 - DNA, 132 bp, Homo sapiens
ctgcctcagcctcatgagtactgccacctgagtagcaccacaggtgtgcaccactacacccagctaatttttttaaaaaaattttgtagacatgtgcttgctatacttcccaggctggtctcaaattcctgg

SEQ ID NO: 156374 - DNA, 330 bp, Homo sapiens
atatttctcccacccccctcaagagatcacgcagtggacgttcccgagtttcttcctgttctcagcagtcggccccattggccccagggaagggtgtcctggctccccactgtcttcctcagttgggcagctccgccgcgtcctcttcttcttggcctggctgacttctgctgtctctcctcagatttctaccacgcagaacgcgcctcatattaggcgcgttctgcgtgcgtgtgctgcgtgtgtgcgctgcgtgtgtgcgtgtgctgcgtgtgggatcttcacatcggtgggagccttcggaaagcctgtcttctgacatgggatgac

SEQ ID NO: 156375 - DNA, 305 bp, Homo sapiens
agaggaatggggatagaggggaggtctggattcagaagcagttcatagatgacttgatagttaactggataatttggtgagggagaaggtagaatccatgggtaacttaaagcttctagctttagtgtctaggtgagtgttgatgtcaccaagacagaaaagaaaaggaatagacttgttgcagaagataaagtgagtgtgcagtttagagtacagtgtgtctgaggagcttatagaacattgagttgggaaagcatagagtggtgattctcaaccagaggcaattttacctcccccaccccctg

SEQ ID NO: 156376 - DNA, 249 bp, Homo sapiens
cacatttgaacatgagtgtatgtgatggtcagggaatttcaagggaactaataaagacaaagcatcagtgagactgcattgaggacatactgccatgttatccaacagtgtttactaggaagggcagtcctccgagctggttatagatgcctggcttccatcttttgtaggagtagagtgaaatttagatctacattcatctaaatttataaagcacctctggataacaccctggacgctctcatgtaa

SEQ ID NO: 156377 - DNA, 546 bp, Homo sapiens
  misc_feature (103)..(103): n is a, c, g, or t
taccccattatgtgaacacatggtcacaaaacacaataaagcaaaggcaggaaacaagatgtatcagtctttgatagactctgacaatctctatctttgaatnggtacattcataccattagcattcaaagtgattattgatatcattggattaatatctactatatttgttactattttctattcattctcctcagtctcgattcttttgtctaccactctttttctgaggttgcagtgagccgagattgcgccattgcactccagccagggcgacagagcgagactcggtttcaaaaaaaaaaaaacaaaaaactggcaacttcagaattatgtccatgttggcgggtgttttaactcaaacggggacataaatcctagggaagtaacccatatcacggtggttctaataacggcattttactattgaccatgggccttaaggaagtcatttagctcctgttagcatcagtttgctgatttgtaaaatggttaaacagtagtatttgccgtctacaagtcacaaagctattgtgaagatcaaat

SEQ ID NO: 156378 - DNA, 624 bp, Homo sapiens
tttgcggagacagggtttcactatgttgctcaggttggtctcaaactcctggcttcatgtggtgctgcacttcagtctctcaaagtgctgagattacaggcatgagccattgcacctggccttgttgttgttgtttttttgtaactgtagttagtttatcaagttatctattgatgaatatttggttggttgtttccagtttttgaaaattataaagatgattaaaatcatttatgtgtatgttttgtatgagcatatgttttcattcttcttaggtaaataccaagaagtgcaattgtttatatgtttgacttcattatttaaaaaaactgacaactgttttcaaagtgattgtaacatttcacattcttaccagcagtgtagaagagttccagtttcagttactgatttctaattaaattgcattttgttggagaagcccggtatgtgatttcaatcctgctggatttattgagactagtttcatggcccagcatatgatgaacgttccatctgcactgaaaacactgtttagtctgccattgcagggtggagcgttctgtaaaagttaattggatccagttagttgatagtgctgttcaagtcttctgtattcataccagt

SEQ ID NO: 156379 - DNA, 550 bp, Homo sapiens
atgccctgaagattgtggatttgtcagtccctgtaattgcatgagccagttccttaaggtaaatatcagtatctacccccacccccaccactctctctctcaatctcaatctcagtctctctctctctcaatctcaatctccctctcaatcgccctctccctcttcctcttcctctccctctctccctcttggttctgtttctctggagaaccctgactaatgcagataggaagataaataaatttaagttgtttggctccagttggtattagcagaaagctgcatcaggcttctctaggtgttcttggtgtgtgcgtatattgctttttgtatagatgagaatagtgaaatatagaagggaagtgatgtacccacagtcatgcagacagttgatgggagagccaaggagaaaactcaagtttcaaacctctggtgtagttcagtcgctttcttgctatttggccctcatgtttttattagcaaggtaataaagttattgagtttgccatgcgtaattattggtaatgtttatggaatgttctctgtatg

SEQ ID NO: 156380 - DNA, 341 bp, Homo sapiens
tggccaagtacagtataggctggaaagaccttatctgaaggtcagaaacattgactcagaaaaaaggtatgaagtctttccataaaatcttttcacaatattactcctatttcttttagattttaatgagccattacttatctcttcagaagacttaagtcttcctttatactcagtgaaatttcccagaatgtaatactgtcactgttctgccaagttccaatcaccaagatcatgattacgaatcccaatctgaattctatacccatggtgactctgatgctctcaacttttgagtgcctcaaaaaatgctaaaactttggctgggcatggtggctcac

SEQ ID NO: 156381 - DNA, 530 bp, Homo sapiens
aagattgtttacacaatgttcacactgctttccaacaagaaaaagtaagattgtaaaaagaacaaattccaaaacaaaacctacccaggtctcctgtctcctcctctttgctctctttgaaaaagcacaaggtggcccttgctggagggacaggagcaatgacagagctggaatggtggggaggcggctggtagtatatgccacatcaattactagtcctcatgctcaaagaagtcaggagaccagagcgctctaagccatgcattcagagggccagggcagacagttggtgttccagaaacagccagtaatcagagttgcagcctgtgacttacacctctggccttccacagacatttctattttcctgagcctccatttccttatttatacaagttccccaatgtgcagggtcttggcgagaaataaataataaaaacgatgtgtatcatcccaggtcagggtggcccatctgtgacactggcactaaataaactccaagatggttgtgtaaactgattaggtggctt

SEQ ID NO: 156382 - DNA, 213 bp, Homo sapiens
ttttgagcttaaagtttccttcttgtaaaaaagttattagtacttgtagacttgttacaaggaatgaaaataaggcacgaggcatgcctagcacatagaaggcattaaaagccataatagcctataaaaatggccaccattattatatttaatagactggaatttcttaccaatatccaactgggtccacatttccttttccttgtatttctc

SEQ ID NO: 156383 - DNA, 468 bp, Homo sapiens
ctcagtgggaaagttcagaaaccagattcctaggtttggagctgagtttgaattcacaaagctatgtccagagtaattggtcaggagcagattcaaaggcagggaacactatagtagtcaggactaggcctcaggtaaagtggcttcagcagtctaccctgagcccaaggaaaacaccagagagagggagagtgaagggtcctagccagtgtagtttggacggaggctttccagttccaaaccatcctgccaacttgccaatgcttcattacaaacaaccctggggtcctgaagtcaccatgattttatcctctgtgttaaaatcctggtgtttaaagttgaaacttttttccttatggtggccccactatcttccaacagctgagctgaggtagattgaaaattcatttgagagtgcatacatgctgccctcatggtgcctttcttcttcttttagctccaaggcac

SEQ ID NO: 156384 - DNA, 220 bp, Homo sapiens
ttgcccaggctggagtgcactggcgctatcatggctaaccttagctttgactcctgggctcaatccatcctcccacctcagtctcccaagtagctgggatataggcatgagccaccatgcccagccagtttttgtgctttttgtacagacaggattttgccatgttgcccaggcttgtttagaactcctgggcttaagggatccacctgcactggcctcc

SEQ ID NO: 156385 - DNA, 259 bp, Homo sapiens
acagttttcacagtaaatttcaacattttatcccatttcattcttacagaaattctgattcctattttataaacaagaaaactaagtttgaagagagcaaatgactttgcccactctatggagggagaagcaggactcgaacacagaacccttgcctccacatagcagtgcccctgggtagcaccctggggcaccttcagacttgccctaaacagacacattttcctccgtggcctctcctcccttcctaggttagccc

SEQ ID NO: 156386 - DNA, 760 bp, Homo sapiens
gccaccgcgcccggccggcctcatctcttaatgggacaattgcagtcctaattagctcactgcttctattcttgcctcctctattccatttctggttttcattccaaagccagaaatgaaatcatgtgatataccccatgtataaagccttcagtggtttcccatttctagcattcagggtctttgagtctcaggtaaaagaaaaccaaacccaaactgtccgaaggaaatggagataacatgatggaagtccagggataacctgctttaggtgcagcttgagccagagctcaaataatgttattactaatgctgggtttttctccttgatctcccaagttggttccagtctcaaattggttgtcctctgatagttatgattgcagcaactctggcctgacatcaggtctggtggaaaaagagagagtgagttctttttttcttgtggaactttctgcagaaattctgaagctcactgtgagttggcttgggtcatgtgtccagctgttaaccattgctatgaccagggaggggaaggtggtcgattggcttagttagacctgggtcaggtgtggaaccccattgacacatcatgtcctgaaagtggggatcatctggattgcaaatgaaaatagtgttctttttaggaacagagacaatggctgctagggggaaacaaatcagttactctctaatatgctccagtgcttaaaataactttcaaaaatcctgaccaggaatggtggcatatgcctgtagt

SEQ ID NO: 156387 - DNA, 293 bp, Homo sapiens
tagctcaaaccgatagcttaactgaatttcaaaggtgaaattcagcaaagaccaggccgacttgtcatcatttacatttaaatcaagtttaattttccactttctaaatatctggcactttttatcagacacacaaaaaaatctctaaaatgcaaactcttcaaagaggttttctgtttctaaaagtagtgtatgcccactaagtagaatctcgttaaaaaacagaaaggtacgaagaaagaaagaacaatgaggccaggcacggtggctcacgcctgtaatcccagcacttt

SEQ ID NO: 156388 - DNA, 341 bp, Homo sapiens
agagatccacagattctttcccgcatgagtctctaagttaagcactcaaaggcaaacatgcctttccaaagccttcttgccttggctcctagccagtgttctctgtaatctcttccactaacgttcacagagtcctaaactgatctgtggactgctggtcattgcctccaatccctctgtcatttctaaatcaacatgtttaagccaaactcatcctccaatctcctatagaccatcagcctctcctgcaggtcacctcatgcctgtgaactatttcccccattcttccaggctttaaactttaaccacccacttcccaggcaggttgggaaaatgagaca

SEQ ID NO: 156389 - DNA, 463 bp, Homo sapiens
gtttcaaccaaaaggccacaacccagatcacattactcagagacagaaatcctctcatttagtgtgaacaggtacgctacgcaggctttcatttcctataatagccttaggtcgcttagtcacatggaaagtggagcagaaaggacggttagatcacgagaggcaattctctccaacattcagctctcacggcttctctcactcatgaccgcacacatgacctgcttttcccctttatctgtatttaatataaataaggtaccttaaatggatttagtatttatgtgtctgttaatacatgactatctcagaaaccccaagtcagtcttaaatttgtaaagtacccaacacagaggcacttgatgaagtcatttgattgtgatggcttgcactctccaccatgctgcccaaatcatagctttgatactacctggtactcgagagagctagtcctattttctta

SEQ ID NO: 156390 - DNA, 361 bp, Homo sapiens
tgtgtccccagacccaccatctctgcctggttgactctttttcaagccttggttcaaatatcacatcatttggcaaccctttcctaatccgcaaacagcaaacagagagtcactttttttttttttttaaagacagagtcttgctctgttgctcaggctagagtgcagtggtgtaatctcagctcactacaatctccgccacctgggttcaagtgattctcccgcctcagcctcccaagtagctgggattacaggtgtgtgccaccacgcccggctaatctttgtatttttagcagagatggggtttcaccattttggccaggctggtcttgaactcctgacctcatgtgatccacccgcc

SEQ ID NO: 156391 - DNA, 495 bp, Homo sapiens
ggaccgaatgctcttcgtggcgccttcaacaggagtggctcacctacttttgtatattggtgaggatggtaggggagtgggggcattttgcccttgctttgaaaaaattcaagagtgctatctggacttcctctctcttcagccgtgcagttcagtagaacaaactgggaacagtttgggaattgtttacaccatgggcattggcaaccctgtcccttcatagaattttggcttagttctagacacactgaatgccttgagtgtgaggattaactctgatggttctgttttaactttccgaatctttaggtattggcctggagtgattccaagctctcctggaacaggaggtgcccccactctgggcataaatatctctccctcatccctcgcagacaacgatctttgagtaccatccagtcataatatagacatggccaaggtaacggaggtaaacagaaaacaggaaaaatactaggctgtttgcactggaac

SEQ ID NO: 156392 - DNA, 580 bp, Homo sapiens
cgtctcagccctggcctgagaaccctgctcactggatgccaggcaacgtctaggagggggaacccactgggaggatccctgctcatcagaccttctgaaggtgtgtaaagcccaagagagaaaagtcagaagctgttctgcccactggaaggggtctggttgcccctgcaggacagagtgtcccaatccccttttggagtctaggtgcatgatcctttctaagagcaaggagaacactatcacgaatggcgaaggggcaggccagtaacacccctgcactccacacacacccaggaagtgtcagctggaggattaggacaccctaggtcaggtttttcaacttcagcactactgacatctggggccagataattctttgttgggtgggtggatgggtgggagggaggatctgcagattgcaggatgtttagcagcatcctggcccctacccactaggtgctagtagtatacatccataacaccctctcaagttgtggcaataaaaaaaggctgcggatattgccagatgtcttctagggggcaaaacggcctccagttgaaaaccattgccctagatatt

SEQ ID NO: 156393 - DNA, 708 bp, Homo sapiens
caagtgtgtggatgcgctgattagagagacaagggtccactggctctgtcagtacaggtgtgggccttggtttcctcatctgtgaaatgggtaatgtttcctcctacgccatacgaatgttgaaaaggttgcaggagatggtagaagggatgtggtttaggaggacagtccatggagtcaaactgcctgggtccaaatcccagctcctctacaagctgtgcacatgaaggcctcagggacacgctgatggtacctacctcagagtgctggtataaggaataaattaattgggtgggatcacaggtatgagccactgcacccggtgcatcattattattattaaaacctttagcacagtgcctggcacatagtaaggactcaataaacctcaaccatcacaacaacataacaccaacaatttgctgttatccacagtcactcagctaaacctatgccctgctggtcctccttagatgctgtggcttccacctcgggtggggtagggctgttgtagagagccaaagactggaaacacttggaagtgggttcggatgtttactctgccacctgcttgctgagcaaccttgggaaaatgaacttacctctctgagcttcagtttcctcctaccttcaatgggataatagaaaatgaggtctcatgagccaggcatgatggcacatgcccatagtcccagttacttaggaggc

SEQ ID NO: 156394 - DNA, 631 bp, Homo sapiens
ccgattatgaggaacccgggccccgatgcacagttgggaatcaagttttagctccccttggggctattattattagctaaggaacacagtcaggctcctgggtgaagaatcaaactaagtgacagtggtgtctgtgacctgggctcctccatgggcccgtgtggccggcagcctctaggactgcctggtgacccccactgctgttgtcacagcctctcatcgtgcccatccctggagcgtgggctggatctcaggactcgcttctcgtggatagaccacagactacagcaaaggtgacaatatgccgcttccgtgatgaggccacatgtcttgctcactgtcactcatgcctttgcttggtcactcaccctgaaggaagtcactggcctcgggacaggcccccatgtaaggaatcgaggtctccagccaacagctatgtgagtgagcttggaaccaaatcctaccccaagcaggccccgagatgaccacaggttgtcagcttgattgcagcttgtgagatgcccggagccagggggaccagctgggcactcccaggtccccgggccacagggactatgacataatctacttgtgttgcgttaggctgctgaacttggggaaattcattgca

SEQ ID NO: 156395 - DNA, 357 bp, Homo sapiens
gactgtgccaggcacgctccccactcagggcctttgctctctgcctggaaggaatgctcttcccccagagctaccttctcacctcctcacccgcttcctgtctttgctcagatgccactttctcaatgagaccttccatggacacctatttataattgaaaaaaacaaatgtatcccctttctgcccttccctgttttatttttctccttagcacttagcattcttgatcacaatacctgttgcttccttattatgttttttgtctgtttctgtccattggaatgtgatctacagcggggcaggggtgttgtctgttttgtccactgttgtgtcccctgcacagagcatggggccta

SEQ ID NO: 156396 - DNA, 508 bp, Homo sapiens
atgattgcaccactgtactccagcctgggggacacagcaagacttcatctcaagaaaaaaataaataaataaaaaaccattgtaaaatagaagctcccaggagtaaacctgtttagatagcagaaatttcaatctttaaaagacagagacactacaagagaaagtaaggcatatgttgtatttgtttctgtttttgtctgtatataaatattataccatcacctactaaatctctgtaacaaaaatggtttttgtccaaggcattgttggtgtgtgtgtgtgcccatgtgattttgaaatgcttaagtcagttttataatgcaacggagtacaggcaggttcatgcttaaagattcttggacccaccagttgtacttcctgaaagcaagcccatctctctttcatttggcttcagctgttctgggtatatcaaccacttcccctgtgcaccctctctggacactattcagacttcatgtcatagtttactcctggaaatccatgccca

SEQ ID NO: 156397 - DNA, 125 bp, Homo sapiens
cacagagtgtgttcttggggtgggactctgagctctgtgttcacacgggactcacctggattcatccatcaggaacagaacaggctcctatgaggagcagaggacacgtgggagctaagcttggg

SEQ ID NO: 156398 - DNA, 567 bp, Homo sapiens
atgatgctggcctgatagaatgagttagagagaacttctttgtcttcaattttttttggatggttttaggagaaaaggtaccatctcctctttgtacctctgctcaaattcagcttgcttggtaggctagtttttactgcctcagtttcagaacacattattgatctattcagggttcagtcttgtggagggtttattttgcaaggaaattgtctatttcttctagattttctggtttatgtgcatacatatgtttatagtgttctctgattgttgttcatatttccatgggatcagtgatgatatctcccttattatttctaattgtgtttggttctcctttcttttcttatttatttgcctagctagtgttccatctagtttattaatttttttcataaaaacagctcctggatttgttgacttttttttttggaagagttttcagtgtctctatctccctcagctctactttgatcttggttatttcttgttttctgctacctttctggttagttttcacttggttttctagttcttttaatcaagatgttaggctgttaattt

SEQ ID NO: 156399 - DNA, 390 bp, Homo sapiens
ggcttctttctgactgcagaggtgggcatgtaactcggggctagtcagtcacagactctatatatttgccacatgattttttttcaggtgtagttatgaagggataatcagagtgcttggggctggaggaagcataaccttttatctaaagatcataaaaatgtgactggtacgcagttctggagctgccagatgttacgttatctccacgtggagaaaacctgtcaaggggagagaatgatgtcaagctgaaaagaggaatgggtggacaactagaatatggaaaactagtagttgaagttctggaactcagccatgcctgagcctagcttacctctgaaactttatagaaatgagcaacaatacctatttacattccgacaagattga

SEQ ID NO: 156400 - DNA, 135 bp, Homo sapiens
gttaccaactttaaggtaggaccagggaaagaaagaaatactgtgtgaacagagagccaggagaatttagggtcatgaaaaccaaaagatgatagcaaggtcgtcagctttagagttgctggattagggatttag

SEQ ID NO: 156401 - DNA, 466 bp, Homo sapiens
agtatcgtttatgtcatgctgaatttcttttcagagcctgatggatagatttgagcatcattcgaacattctccttacctttgaaaataaggatgaaaatcacttgccattggtaccacctaacaaattggaggaaatgaaaagacgaatcaacaacattttggagaaaaaatttattctacttctagaatttcattactacaagtgcttagttcttggtttggtagatgaagtgaaatcaaaattggatatttggaacattaaatatgggagcagagaatctgtggaattattgctggaagactggcataaatttattgaagaaaaagaattcctagctcgacttgatacttcttttcaaaaatgtggagaaatttataagaatttggctggagaatgtcagaatattaataaacagtatatgatggtgaaatctgatgtttgtatgtatagaaaaaatatatat

SEQ ID NO: 156402 - DNA, 287 bp, Homo sapiens
gaggtcatcctgggaccttccctgtccccctacctttctctggaaggccaagaaagctggaggagtccctcataactaccatgcccttggaacctggggtgaactggatgagaaggattggttcttgggtgagggaagaggggaggaggaagcaggaagtaggaaccagacagagatgtggctgctctggctcctgggatgattcctgggttagaaatacacgtactgccaaagcttttcttccttctttgccaaatgttccattcagttgattgccagcttctggt

SEQ ID NO: 156403 - DNA, 198 bp, Homo sapiens
aatttttttacagctccttcaccagtgcaaccgccatttttctctgaatgttcattggggtatttttctccagcaccatctctttctttgcctccaccacctcaggtttcttctctgccacctttgagccagccttatgtggaaggcttgtgtgtttctcttgaacctctacctcctctaccaccattaccacctctc

SEQ ID NO: 156404 - DNA, 517 bp, Homo sapiens
aagttcttattgccattctttaatcccttggagttagcaggcagttatagcaagcctgaatccactccaacatatgtcgttgggcctcttaggccctggcactctcgtttcctccctgggtatgtacaatattaccacactttcaattccagtggattttgtttgccttatacagatattctttttcttcagctccagaggaaatgttcccagatgaacaaggccagcagatgctgcctctcgtaacaatatcatgcaaagaaaaatgctagttaaaagtttaaaccatcttaactcaataataaacactggtttgggaactcaacaacagccataggctttcccaacctactgattttcataccttacctatacataccttaatagtgttaagttggaggcttttcttcttttcctgaactttaattacttatttgatgaacacaattttttaattgattggggtatttgctaagctaccttcacaaaaatcactgttcctaattctcaaatacag

SEQ ID NO: 156405 - DNA, 505 bp, Homo sapiens
gaaaaaatagaatgtggaaatgcttgtttggagcaacctgttgattttgaggcaatgtgtcctacccattttaaacttctaaaaggaataattacaaatgttggcagtgacatacaagtacatttaatatattcgcctatcttcttgagtttccaaaattacttttcagaaatgaatataaattcttacaatgctgaatagtgattacattaccagttaattataaaatgaaattattgcctatatgcataattatatttttaagattagactcatcagtccattctttaacacagagaaagaatgcagaatcttatcagataaatttaacaaagagaaaaaaaaagaggtattgaccttaaagaggaggttgagagagaaaatgagatggaaagtttattcaaagtgaaaataacagagaactttccaaacctagagaaagatatcaatattattattatttgagacagtctcgctctgttgcccaggctggagtgcagtaatg

SEQ ID NO: 156406 - DNA, 495 bp, Homo sapiens
cattcctttagccatacattatttattgctctcaaaccagagtggaggtttggatatccttcataaaactttttataataatggtaataacagtagcctctctaatttataagtgtttcatatgaaccagctacagtggtaagtgcattgcattatctcatttaattctcagcacgaccctaggaggtaggcactatcatgattcctatttttacagatggagaaagtggaactcagggagcttaaagagcttttctagctctcccagttaaaagggtgcagaatgaggatttgaactcagatgtactcaatctagagacagtgaaactgactacaagagcagaggcttcggaacttcagtgagggttatctgaggatcttgttcaaattgtgggctctcagaccacacacaaagagttacagtttgaatggaactgtggtagagtcctggacctcaggatgactctgagatgtgtgatctttttttttcctttt

SEQ ID NO: 156407 - DNA, 593 bp, Homo sapiens
tgccccttttgacttctcattatgtaagtttgaaaattttcaaatataaacaaagactacgaaaatagtacctcccgatgtatgtgtcccatttaccagggagccatgttcccatcactcagctttaacggttcccaacattttgctgttcttttcagtgatctccctgcactgttcgttctccatcttgtcctcttccaccccttacagcaactctctgacatcatataattttatttgggaagatatcagaatataactctcacagagaaggctttgtttttaaacataaccacaatactattattgtacccaaaaagcttaaaaataattccataataccatctaatactgggtccatactcaatcttccctttaaaagtccgtgttaagatctggagattttaagtcagtatttctgagctccaatgtagtgcacaggagtaggatgtttagcccttcttacggagagcatgagcagtagaagaggaggctggaatcctaaagtgtattcaatcttctattgtcaatgggtcaataatatacctattagagaatattcttagcttaaaactgaaaaagtcagccaggcg

SEQ ID NO: 156408 - DNA, 270 bp, Homo sapiens
tgaatgggcacagaaattgtcattatttcctatagggtgtcggaaatttagtctattggtaattttgccttgactgccttaaatttacttataaatagaaatatgtgaataatgtatttttcctctttattatgtaggtttaattgaagtagtatattattttcattacacattaacatgtagtatagtactatctcaaatataactgctgggtgatgaaaaatagccttcacaaactcatgttccaaaatttctcaggcccttattcaa

SEQ ID NO: 156409 - DNA, 375 bp, Homo sapiens
ctcattgctggatattcaggctgtctctaatctggagtggctgtaaaccatgaacatcctggagtgtaaatctctgtgctgatctctgatcctttccttagatatagtcatataggtacaacgaataggtcaaagggaatgcaccttttttaacaaggggattttaatgacaaatttaagtgttcctaaatacctatcagtgcagcatctgattactgggatttattgaaaattatttttttaaagatcagagaggccaggtgtggtggttcatgcctgtaacttcaacactttgggaagccaagacgggtggatggcttgacctctggagttcaagaccagcccgggcaaacatgatgaaaccctgtctctaca

SEQ ID NO: 156410 - DNA, 915 bp, Homo sapiens
gatgtaccaacatttatttgtgtgttcatcacttgattagcatctggattgtgccaaagttttggcttttatgaatcacacaattgtgaacatttgtgtgcaagtttttacatagctcttgggtaaatacctcttttttacattgctcttttacattgctcattttagattttacattttacattacatagctctttttacattgctcttgggtaaatacttaggaatggaatttctaattcacatggtaagtatatatttaactttataagataccaccatactgctttccaaagtgtctgtacactttgcattcataccagcaaatgaggattttctccaaatcctcatgaccacttattattttcagacttttttaaaaccacgagctcatgttttattggaatagagaaacttggccataattacaatatagtatgattagtgctaaatatgtcagtcttttaaaacttcagccataccagtggctgtgtagtagaatcttactgtggttttaatttgcatttttctgactagtgattgttgagcatacttttatgagcttattagccatctgcataaagtgtggagaccttccctcagttttaattggattatttattctggatacaagccctttgtcatgtaggtgttttaaaatagtgtctcccatttggtggcttgccttttcattttcttaacagtgtattttgaagagcaaaatgtttttatcttatgaagttcatttcatctatttttttactttcatagtttttgcatctttgtgttctagaaatctttacctaacccaaagtcgcaaacattttatccaaatgacttttttccctgaaagtttaatcagttttaccttttaaatttagtcctgaaagggtagccttatatgtccaaggtggg

SEQ ID NO: 156411 - DNA, 403 bp, Homo sapiens
cacggtggctgcgtgttgagctggtgagagcgacataggcagggtggtcagtctagagactgtcgctgtaagccaggaaacgacgctgagtggtatgggcccagggccaggtcccagtctcagccccagcgcagcagcctctgccacagccctctgcagacctggggtcagtagccggcctagggaaagccagcaacccactcaggatccctcagggcccctgacctgggcgggactctcagcccaggaagagtccctccggattctctcgttcagccagcggcccctggtggccccaagttgcattacacagtctcagagatgacagcccagcttggagggtgtcaggcaccctgtcagccccagagaaacctgcttagctctagagagcccagcccggctc

SEQ ID NO: 156412 - DNA, 366 bp, Homo sapiens
agacactcaaaactcactgctaaaagatgatgcataaatatactgtcatattttttatctttctatattaaaagctgggaaatcaactttattgttagtaaaataaactctgaagccagtatttttctacttagaaagcaaaatgtaacataaagtcatggttctccacttaaaggaatacaggaatgtatacatatatttacttttcctccatctgatgtatttaaaatacttgatgaaacagcctataaataatctataacttaaatgatggacagtcataaaatgactatcgttgttcaccaccaccatggatgcctttgaacataaactcccctgaagttttaaagctaaagcaaccgatac

SEQ ID NO: 156413 - DNA, 340 bp, Homo sapiens
gactttgtactgtgcattaaacctaggaactgtcttctgtgccatgttccagaaataatttgatgtaagtttcttctattaagtgaaatcattagaaatgtttggaggctgggcatggtggctcacacctgtaatcccaacactttgtggggccaagatgggtggatcacctaaggccaggagtttgagaccagcctggccaacatggcgaaaacccatgtctactaaaaatacaaaaattagctgggtgtagtggcacgtgcctgtaatttcagctactcgggaggctgaggcaggagaattgcttgaacccaggaggcaggttgcagggagccaagat

SEQ ID NO: 156414 - DNA, 376 bp, Homo sapiens
ctcccaggttcaagcaattctcctgcctcggcctcaggagtagctcagattacaggcacacaccaccacgcccaattaatgtttgtatttttagtagagatggggtttcaccatgttggccaggctggtctcgaactcctgacctcaaatgatccacccaccttggcctcccgaagtgctggggttacaggcataagccactgcacccagccagaaacagtaatctctaccagtattgtaggaggcagaacagatatggaaagaaaacagaggtctttttcactatggtaagtttgaagaattttagttaatatgtctaataagcagttgaaaatttaaattggctcacagagaaaggtactgaattggcaacaga

SEQ ID NO: 156415 - DNA, 383 bp, Homo sapiens
ggaggcagatccaggcctcatccattcccctcacttgatagataggagatctaaaggcaggtaaatcacctcaatgcctatgggcatttttattgggcattagagtcaagactatagtgatttgtgggctcagagtccttgacctcactttctttagtacatctaagtcgatgaaaccaggtaaatcactaaacttagggccttctggcatgtgaatcaaattgagactttttgaagataaaagggcatctcctcccaagtagtcaaattagttatcaaaaagcacagattggattgattgattgattgtagagatgtggtttcactatgttgtccaggctggtctcgaactccttcgttcaagggatcctcctgcctcagcc

SEQ ID NO: 156416 - DNA, 181 bp, Homo sapiens
tacagattagaaccgagctgtaacccatcgcgaatcacacaatgtcatgtcatcactattcacacatgtcacatttcacacgttcacacacatcacaatcaacactaatccctgaagccctgaattctaaagaaggagaacaatcctgctgctgttgatcctccatcgttccacgctggtg

SEQ ID NO: 156417 - DNA, 347 bp, Homo sapiens
gcagaggcaggtggatcacctgaggtcaagagttggagaccagcctgaccaagatggtgaaaccccatgcctactaaaaatgcaaaaagttagccaggcttggtggcgcatgccggtaatcccagctagttgaggggctgaggcaggggaatcacttgaacctgggagccggaggttgcagtgagctgagatcgcatcattgtactccagcctgggcaacaagagtgaaactccatctcgaaaacaaacaaacaaacaaaaaaacactggggccaaagaactctgtgtgctgtatcacctaaccacatttcatgacacggctagagaagaatcatgcaaataaaaat

SEQ ID NO: 156418 - DNA, 359 bp, Homo sapiens
cacaccccacccgggaatactacccagcactgaaaagtaacggacaagtgattcactcaacagcatgggtgaatttcaaaatccttatgctgagggaaagaagctggggcgaggggaaaatgtagcgtagggctccacttatataaaattctagaaaattcagactagtccataatgccagaaaacagatccatggttttgtgtgtgcgtaagggaagattacagtaatatacacaaaaacctttcggggagatgactatggtgatagtttcatgggtatttacagatgttgaaactgatcaaattgtacactttaaacaatgactgtatttcaattgtacctcaataaagttgcttta

SEQ ID NO: 156419 - DNA, 198 bp, Homo sapiens
tgtgtttcaagcgtgagaacccagtgggagggttcctgacacatcaccactctgaccctcagtgtcttcatctgtcaagtggggagactgatcatcctgccctactgtgaggactaaataaataatacagtgcacccagctgttatccttattattagacggagcctaaatgtccagcagtaagagatttgccagtat

SEQ ID NO: 156420 - DNA, 117 bp, Homo sapiens
cctggcgaagaatataacatcatttatagtagtctgaaactgaaaatcacccacataatcatggatagtagatatgtaaatcatgtactgttatactgcaagaagacaaaccacaga

SEQ ID NO: 156421 - DNA, 185 bp, Homo sapiens
acctgccttggcctcccagagtgctgggattacaggcatgagccatctaataaacacttttattaggttcttgggtttgagtgtttgtgtgttattccccaaaccagataccttttgaagggaataaatctctataaaatgaaatgactgctatttgactaggattgtaatctgcagccacactg

SEQ ID NO: 156422 - DNA, 415 bp, Homo sapiens
gtggcggccaagcccctgtgaggatggccaaggattgaggacagcagctcctgggccaaggacacaatcctgtggaccccatgccactggcccagagaccagtggtccactctgaccccaagctctgtaggaaagaggtctgtgtggtcctcccattctcggctggatgacttcctgccttcatgggggaccctttaacggtagacccctcttaaccctgccagggtcagccaccctcacgagccagccactctctcctcttggcctctgctcccctccccaagtggacagacacccatgaggcaatgagagggaggcaggaagagtccatgtggtcggcttctgaggaaactcatggtcacccaggctggtctggaggaggaggaggagtatgagtgtcagagagagagagaga

SEQ ID NO: 156423 - DNA, 444 bp, Homo sapiens
gtagcaatcccccaagtgtgagctatgctctcaccgtttcactccccgattttcacagctccagcattctctcattaccagatccagtcattaggggaaatgctgttggtgtttgtggcacagacttccaatatttgaccacacttgttcccatgttttccttgtgtgtatgtttttatatcataaacaaaataaaccatgcttaggagcatactatctttccttcaaaacagcagcaccctcatataccgctaaatggaatcacgtattaaataaacaccacctccaagtttacctgtgcttcacacaagaacttcatttgctaaccaagggtattcattttaaagtgaagctctcctttcttattaaattatgcaggatagccttcaaaggttgctgtcttactgagacttggccatttttcttgcatacatgctctttgga

SEQ ID NO: 156424 - DNA, 475 bp, Homo sapiens
aatatacccagaccctcttccttctcatgttgctaagggaacattataggtttgtaacttgcccccttaaattgttgctcagccctaagaggtgttagaaaaatgctagaataaaaccacaaccattactggcagagcataccttactaccttctactagatgatatcctttctctctctctctttgtagttttaccacacaggcaaacacaggggaaaaaagtggaagggcaggatgatggagggaaatatttactgaagcagaacattagaagttagctgattagagttaaaactacagaaagtaagctaagaaatctaggaaaggaaataaattcatagagcccacagtgtaaaagcaaatgacttagttaaccaaccaagaaaactggaaggaacctgaacctctgaagtggcatagaaatgctttaggaagcaaggacaagctggtaatgaattgaacaacatgtggcag

SEQ ID NO: 156425 - DNA, 137 bp, Homo sapiens
aagtgggattatgccaagtgcctgtaggggtgtaggatgtgggaaccacctatggacggggcacccagccattcaggaaattaggtctgtgcaaccttgggacccagtggtcccactctatcccaggtcccactata

SEQ ID NO: 156426 - DNA, 247 bp, Homo sapiens
gggaggtcaaggctgcagtgtgccatgattacaccactgcactacaggctgagcaacagaatgagaacttgtctggaaaaaaaaaaaggttagcaccaagtattacggtgagaggatagaaagggaaccatgtaaattgaactttgaaagtccagaagatttctgctgggatgtggcactttaataattagttaattatggttaacagaagtaaaaagttgaaaggtgattcctaaaagaggtaaca

SEQ ID NO: 156427 - DNA, 338 bp, Homo sapiens
caggaggagctctgtgcctcgctggtcgccgagccccgcgcacgctgcctgtgctctgtgcctcactggtcgctgagccccgcgcacgctgcctgtgctcagggctgctcgtggttttagggagcggccaccaggctgggaggcgagtcttaagtccggccacacggtgccttcaggggtgtgtgtgctgcagtggctgaaccgccgtgcgtctcctgctcgatagattgcatctcagtgtgtcctcccgcatcagacatggggcgaggggcctgcgtagctgtggggtggagatgccaggaaccctggacggtggccccagtgcactgagggtccac

SEQ ID NO: 156428 - DNA, 171 bp, Homo sapiens
accgttatgtagtgctgaattgatgttaggctttaccctgagaaagccattacagagtttgagaatgagacacacttgaataggcagtcaggtaggtagattaggggaggagcttaaagagtacaggatcagaggcagaggccgggctggctcccctctgtaatcccagca

SEQ ID NO: 156429 - DNA, 233 bp, Homo sapiens
aaatggggcagaggaaaaatgcagagaatctgcattttacatatgataacacaggcaaaaatggggtaagggaataatcagatatgcatttgtgtctggtgggctgtgggtaactgcacctgtaaagataagctatcaatttgcattgccatggtgaaattttaacagaaacaccttaaaagatcttgcagctcatcaggaatttccttgtaggcaaaatataggggaggcat

SEQ ID NO: 156430 - DNA, 292 bp, Homo sapiens
acctcttttcttataaattacccagtctcaggtatttctttatagcaaattgagaacagactaatacacccctgtggctccttcctttaactaaaggggaattacaagtatcaacccaaagttctagctatgacagaattcacattcagagaaaaaatatgtctaccacatcactggattatcagaatatatagaggatctgcccaagtaaatgaggtccaaatcaaccttcaagacatccaccaccatacaggcggtttcaatgtgtcaaagacagttgcccacatgccct

SEQ ID NO: 156431 - DNA, 284 bp, Homo sapiens
agactgaatccacaggggctatgatggctaacattcagatctaccaatgtaggacagagcaaagggattcaattacagagataaatgaggatgaaggcagaggatgaaaataaacacaccaatcattcaataaatggccatttattaaaaatccaagctaagcactatgctgtgatagaggctagagtggaaaactacataagaccaccccacttctattcctagtaccctccagtttattttccccagggcagcaatgttgtgcacttaaaatacaaatctga

SEQ ID NO: 156432 - DNA, 640 bp, Homo sapiens
tccctttgtctacgctgtaatgagatgtttttcttacatgtttatatttgatttttcgtttgtttattttctccattgaaatattgtggagagttagagatggaaaaagaataccccaaagcagaggacccctactctctccctcctaattctgcttgtgttctgtaatacgggcagggggagagggaagcccttttatctgcccttggtatctaagataccacttagtaaatgatccctcagaacccccttggctgcctgcctccaacatgtgccttttaccctaactcttccagaaacacagatggcccaagacagcctgcactggaatggcccttctcagtgaaggtctcttgcacctggcggccacggaagtctcactttcagactcatggggcagactggaggtgcaggatggacttggacagcaataaccctacactgttccttttggttctaggacatattatgaggggattctttttttctggaagtaggtttaattcaattgatttaattaaatcctattggctcagattgataaaataaggggtctgtcttctctgagaatccctgaggttgaggagagaacatgtggacccaagggaggttaagtgaatgtggtaaagccttgtgactg

SEQ ID NO: 156433 - DNA, 736 bp, Homo sapiens
gtcattatatatacttcaaggtttcagagctttttggaatggcagataagggactgtaagcctctatcactcactgggaataatctaaaatttttaggttgtaatctttgggcaataagagtttgtatccatctcatacgcagtttttcataatgtagactctttactggtagaatcaggggaagatattacattttatttacagtcaaagggccaaattctaatgaggaacatcatattgaacctagaccttccttatgtttgatacacgctatagtgacccccttgagatagagttattcattcatgtcatactcttctattccaaatctagctgtaagcataaccaacaccaatggctgctatgaacattcttcacagaaactgaaattagcagggatacacattcagattattactacaccctaacaatttggcttagatccagacttatatcttaggtgaagaaaatgctaaagtaataaaatctaaatttgttatttgctaaacatgctaaattatgtgtgagagacaaatgaagaaacttattgtgtacaaataatatactttaaatacaaaatattcggtaaatatacaggtgttcatggtaaaattttcctcaaatttgctatgtcaaaagagtttcataatgttagaaaaaaggaagcaatgaaaaagaaaacgtactatcagtgctgattcccattttttaaaacatgaaataaagtttgttatg

SEQ ID NO: 156434 - DNA, 211 bp, Homo sapiens
atacacccatctcgcccaccagtggcaaagccttcttcacaagcatacatgctaaagattccagcctgttgattaaaacaggtaatactcaatggtgcaaccatcctaagtataatgaatagatacagttgaatgttgatttaaaaacatagcaagtcaaaaacaaaaataaaacccctttgttctctattgaaatgctgacaatagacca

SEQ ID NO: 156435 - DNA, 225 bp, Homo sapiens
gagacatgaaagaaatctgaaggacttgtaattattgagacttaaatagaaaaccccacgctgtaagttaacaagtacatttaggtaattatcaccattaaaaaatttgaatgcagttttaaagccctgaaatttcctagtgtggatggttgtagtctacttccctggcatgaaatattccggagctgtaaggataaatctgccagaggcagacacatgctggga

SEQ ID NO: 156436 - DNA, 299 bp, Homo sapiens
gctttgcccttgggactgttctgtccctgctggactctgcagcctgctttgtctcactaaattgttcctgtctgggctcggtttggggccatgccctttactatgtgttcccagtggacagtcccctgggttcccctctgtcccttcatagcctcatccctttgcttgacatcgtcgaagagaagcatgcatgatgtcagcagcgggacagttggaacttcttgggagacaagcttaaagactagccagagataacaattattttggttttcttgttggcattacttcactcattcatt

SEQ ID NO: 156437 - DNA, 157 bp, Homo sapiens
caatagcgtgcttaaatttccctgctccctgggctggaaagaaattacctaaaattctgaggactccattttttttttaccattttgcatttcccccaagcccaaatctaagtaatttgctaacaataaccattcatgcacccaagtgagtgcaaac

SEQ ID NO: 156438 - DNA, 389 bp, Homo sapiens
acctggcccggtcagtcggatgtgcgggcatacggaggtgtgaaaaattgttaaatcttcatctatagtatgactctaatgcgtagtgcctacaactgaaagatcaagaagcagcaatataaacatgttatttagaaatgtggataaaacaccaagagaatcagatagaattgttaacagtagttgcccctggtgggtgaggaaatgggaggaagggaatcaagaggctgttgtttttcacctcaagcctacatgagtcatttggctctttaaactatatacatgtacattgttgaaaaaaatgatgtttttaaatatttgttaaaagtccatactccccaacatagttttcaatattcttcatagaattacacatccgtactggcccg

SEQ ID NO: 156439 - DNA, 328 bp, Homo sapiens
cttgaactcctgacctcaggtgatcgtcccgcctcagcctcccaaagtgctgggattacaggcttgggccactgcgcccagccttaaccactttaaacagtacaatccagtaatgtttagtgtgttcacaatgttgtgaaaccattaccactaattccagaacatttccattaccttccccaaaacagcccagtacctccaactctcccctgacaaccactaatcttctatctctatggatttgcctttatggattttatatcagtggaatcatataatgtgtggccatttctgtctggcttctttcagttagcgtaatgttttcaag

SEQ ID NO: 156440 - DNA, 490 bp, Homo sapiens
ccttctccactagcctaatcacattattcctattttcaacatctggaatccaaatccgtaatgaaaatggaatatctaagaaataataatctcaaaagctattccatttttcttcttccttactcctagtcaagcctagggtgaacgtctccccatccaagaagggtcctctgaagcaccacaacctgtttgtctgccacgtgacagatttctatccaggcagcattcaagtctgatggttcctgaatggaaaggaggaaatagctggggttgtgtccaccaacatgattcataatgagactagaccttccagatcccagtgatgctggaaatgagccaccagcagggagacatctacacctgccaagtgaagcaccctagcctggacagtcctgtcaccacggagtggagtgagttagtctctgatgaccctctaaaccccacctctgaagagcaggggactctctggctctggggtccactcatcttg

SEQ ID NO: 156441 - DNA, 426 bp, Homo sapiens
gatgtatgttcgttgagttattgtcttcaataggggaggtgattcctttgcactgtgcaatacatgcaacctttaaggagaacgggcagtcaggtggggatgcctgcttggtaggggctcattattgaaagactacatgttgagatcatagcaaatggacttctgaacaagtttcctagagtaaaagaagtgtgggtggtggctcatgcctataatcccagcactttgggaggctaaggaggaagactcgcttgagctcaggagacagatgttgcagttagccgagattcacatgctggcctccagccagggtgacggagagacttggactcaaaacaaaaacagaaaacaaactaaatgctgtgcctcccatcagttcctccctaggaattcatcttgtagatagcacacagacaaagggaaaca

SEQ ID NO: 156442 - DNA, 230 bp, Homo sapiens
aagaaacaattgggtggagtttggaaaggcagggatttgatagagtgcacaaaagctccagaggaatggaaatcaaatgcaagaagattttggttcaagataagaaaaaatgtaccaaaaggaagacttatacattcataaaatacctgtcagttccctattagcagaagtttttacatttagaattgattggaaattttagaataacaaacatttttaacagcacataa

SEQ ID NO: 156443 - DNA, 383 bp, Homo sapiens
  misc_feature (41)..(41): n is a, c, g, or t
ttaaccctgcggattgaggtcgtaaacagaaaatttggaanccgatcaaagtgctgagaagtcgattcgcttcatccatttggtcacaggttgtgtcctgggctcctcgggaaaggttctgcccaagtggggctgggagcagttggaagttacttgcaccccatacctgaaagaaaccctcaactccatctggaatgtggaggcgagatcccggcgccgtgctcagaaccctgtgaaggtgtcctggcttgacgggagcgagaatccgccgcctgtccagcctcccagccctacacactgtctccccgtctgcctcccagctggtcttggacccctgacacggcccccagcctgcgtggccctgctgcagttttcttccccag

SEQ ID NO: 156444 - DNA, 297 bp, Homo sapiens
acaggcgtcagccactgcacccaaccttgtgatttttacaattgttttttgcttatctgaatttcttaaacatatcttattatttaataaaaataagttaaaatgttaaaagaataaatacgagtctctgcccacaacaggttgctactgaaagctgttcaaatgcagcccatcatcccttgagtaaacctctgatccttacggctgtgccatgcactgttaagctcactgtctcctttgcagggacgaccgtctttgggatgagcggctttgtgctgcaaagttaagaattgggtc

SEQ ID NO: 156445 - DNA, 363 bp, Homo sapiens
tagaaatgaatgggtttgttttttctttttcctttttgactctgtcctgatgagagagagggagagcaggacggaaaatgagttgttttgaaataggtccttcccgtctcacttacggggaagcagagccaagtgtggggaagttccatgcgcacgtggacggcactgtctcctctcaaatggggcccccatcgggatggcccctgcacacccccaagtagttacctggctctgccccagtcagcatctcaacccattcaccagtggtgccatcatctgactcagctcttagcaacaatacttagtcctacatttccttagtctgataattcccttacgtgaaggaaataaaaaatatgctat

SEQ ID NO: 156446 - DNA, 326 bp, Homo sapiens
tggacagaagcagcaaatgtcgtgagtgcagagtagagcagcgcttgggagggcctgggcaccgatgcccatcgacacctaggcagagatggtgtggaccctgagatcaacagggagaagaggcatggggagctttggctttgggggtgcaggtgcagagagggattccaggcaggagtgtgctcatcccattcccacctgagaatgtccagaggcgatgaggattgtcacacccaccccataaaggggggcccctccaggcctcctggggctttctcccttccctggcacctggaagacccagatacccatgacccagggccctg

SEQ ID NO: 156447 - DNA, 296 bp, Homo sapiens
tcaagatatatagtatggcactcctcttctcagtaactattcattgataacttatctattttcttgagcttaaaagggcaaaaatcggccgggcctgatggctcatgcctgtaatcttagcactttgggaggccaaggtgggaggactgcttgaggccaagagttcaagatcaacctggtcaacatggcaagaccctgtctctatttatttatttatttttaaaaagggcaaaaatccatacaaatcatttgagatatccaagacctgtcaatttcttaaacagacaacatttcag

SEQ ID NO: 156448 - DNA, 404 bp, Homo sapiens
ggctcactgtaatctccgcctccctggttcaagcgattctcctgcctcagcctcctgaatagctgggactacaggcacgcgccaccacgtccagctgatttttgtattttcagtagagacggggtttcattatgtttgccaggatggtctcgatcttgacctcgtgatccgtctgcctcggcctcccaaagtgctgggattacaggcatgagacaccgtgcccagcgacaagataattttaaaaggagagggaacgtctgcttttgttgcctttctcgtcttttgtggttccacatacaacacagcagtgtctatgggctgtcaatcgcaacataatgcaaacaacacaattgtctctggggtccactgaatccaaatcacacacgcaccacacttctgccttt

SEQ ID NO: 156449 - DNA, 557 bp, Homo sapiens
gcaatccagtttttaaaatatgcagagggaaacaaactagatgtttacaataattttctaggggtgaatttttctcttgtattttccaagtttactataataaaagctttgggtttctactttaaataatcgctctcctccaccatactccgctgccatcctcccaaaaccctgagtatgggtccatggggaaagcaaataaagtgggaagagggatgtgaagacaggggattaggggggtgaagacagggggctcactgttggacaagaagtgtcgagacaggataaattccaggtcctggaatttaaagaaggaattaggtaaggaaggaaggggaggaaagttccagaaacactggagacccactttgataacactatcaaagcctcctagagagagagacagagagcttctcagtcctctgagaatccacaacatagtctgcacctgtacctcctaaatgcccagcagcagccaccttcacctcccacctctgagggaggtgccagcctggggtgagcaggcctaggtaaaagtggtagaaggcctggcatgg

SEQ ID NO: 156450 - DNA, 405 bp, Homo sapiens
atctttgagctcatgctcccattctaaaaggacacatccaagtcacaaggggcgggtaatttgttccccctttagtctccctccatggtgggagaagctctttgttttttactcagaatcttagttggcacctcgttatgttaaaaatcagattgaaagaactatttcatcgctattaagcacaaatgtatacaagctacttattaaggagaacgaggttgttttgataactataaaatgttgcaactgggttgaatgaatagtctcagcggtctatttctatgttttagctctacaacaacaagaaggtcctgatttgcacggagatcagattaattttatgaaagtgtgtacatataggtctaaagtgtaaaaacccagcacagtccacagctatctgaagct

SEQ ID NO: 156451 - DNA, 638 bp, Homo sapiens
tgacattctcaccaacaacattgagtgtgcttatttccccatagcctccctaacagagagtgtaatcaaacttttggaatttaccattctgatggatgaaaagcaatatgtcactgtggttttaatttgtaattttttcattatgaatgaaattgaacatatcaaatatataaagggcataccatgctcatttattttcttcaaaccatctgatcacctatttttgcccatttttatttgggggttattattttctatgaatttctaacagttctttatctattagagtaataacccctttggctgtggtgccagttgcagattttttttcctccaatttgttctttgtcttttgatttttaaggtgattgttttaccatgcatacattttctcttttatttagctgaatttatctatctcttttcttatggcctccggattttgagtaagttataaaggtcattcacactcccaggttgtaaaagactctttccaagtttctttaggtcttctatggattgaggtttttgtttttgtttttttaacattttaatcatttagccacttagaatttatcctagtatagatgtaaggaatagaccctgctttttttcaggtggttatttgatccaacaac

SEQ ID NO: 156452 - DNA, 504 bp, Homo sapiens
agccagaggcacaggctctgcagagaggcagtgatgatgccatagagcgtgacaagggcagcaatgctggggttgcccaaggaagggatcaaagtctcccatcttgcagacagagatactgagtcccagagaggggaagtggctgtctgggcactggagactagaacccaggagtcttctacctctcccctcttccggctctgaccccgagagcttccctggggaacggtaggtgggctagggagccccataaggtagaactgaaagcagaaactcctcccctgttaactgactcctcccagagcccccgaatctctgcttccagggttggggttcatttgcttctgcgatagtctgggatgggtgggactggcacaagatgggtcctctatcaccccaagtccaaggggcgccccaagcggggtgctgctgtgccgtgtcgggccagcatggcagtaggccagggcccccggcagcgccgaggcagctggacagggcggccgc

SEQ ID NO: 156453 - DNA, 131 bp, Homo sapiens
gcactgccttccccgacactccaaaactgatggattcgaggatgagggtgacaaatatctcaaagtcctctcatgtctgttacctagtatcttcattttttcaaatttagcttcaattttaattttttttt

SEQ ID NO: 156454 - DNA, 241 bp, Homo sapiens
cctaaaggtaattttatatagtatttttaataatttaataatttgtgtccagacgcggtgcctcacgcctgtaatcctagcgctttgggaggctgaggcaggcagattgcctgagctcaggagttcaagaccagcctgggcaacataatgaaaccccatctctattaaaagtacaaaaaattaaccaggtgtagtggtgcacgcctgtagtcccagctactcgggaggctgaggcgcgaga

SEQ ID NO: 156455 - DNA, 302 bp, Homo sapiens
tggtaaattacataggttatttgctccaaagtaagtgttattatatcctgtttcctttacctgctttgtatttatttctaccttaaaaaattccattattctcctgatgtttactctgaaaagtcttaaaaggcactaagtttctaattccttgttcatttttgcataagctgtatgatatctattttcttaatagatatcatgattaatgtatctcacacaatatacattcctaaatttttttaaattttattttaggtttggtgctgcatgtgaaggtttgtgacacaggtaagcatgtg

SEQ ID NO: 156456 - DNA, 393 bp, Homo sapiens
tcttttggagtccacatctaagtgaggtcgtgcagtatttgcctttctgtgctgggctttctttattagcataatgttttccagatgcatccatgttgttgcaagtgccaggatttctttctttttaagactgaatagtgttcaatttttaatacataaaccacattttctttatccattcattgttgatggacacttagattgattccatcttgtgaataaccctgcagtgaacacggggtgcagctctcccttcaactactgatttcatttcctttgaatatatatcttggaagttggatatatcctttggaagttggattactggattcgatggtagttttgtttttaattttttgaggaactcctatatgattttccatagcagctgta

SEQ ID NO: 156457 - DNA, 411 bp, Homo sapiens
caaggaacccaattgctatgtcatatggtcacaatacgtttagttttgagaaattgccagatggtcctccatagtgcccatacctttttgtatttctttttttttttaaattcataatcagtgtttttattattttcgatgatggctcatttctaagttaagtgatgtatactgtctacatttcccatctataagcttttgtttttcctggacttttgttacctaattttgatttgcttaggttattattttttttaatctatggcatgtcttcctatcgctgtgtacaatggctttcagtagaactttttacatcttcaaactcatcagataactgtgttttaatatctttttctgaggacattcctcccaaatccctctgttctgctccacttggggctgataggtcct

SEQ ID NO: 156458 - DNA, 417 bp, Homo sapiens
tgcaaccccttatgttttgcgttaaagaaaaaatggaattcaggctaccaaatcccttttttaatggcataccagcaggcaaatacagattttccagcaataagcaatttctactatcactgctaagggagggaaaagaaacaaaaagcaaaacacagcctttcttttttgctgctgtcaggatggacaattagagactagaataatgcatttttagtttttaaaaaagctttatcaggaaaaagctgccataaagtaattcatctacgaagcaataagagatgccatcaattttaccttacacttgaatcacactcttgattcctattcagctgtatttcaattatgccttttatttgaagacaagcccctacaaacacataatgtcgcctaaaagtgatctctcccgccccccca

SEQ ID NO: 156459 - DNA, 399 bp, Homo sapiens
ttgccaaatgtttctgactctattccttctgtacaatatgagactgcacattctaggcccctgggctgcatgactagttctgaccaatgagctgtaagcagacagcaatgtgccattttagggatacatcatctaattactagcttgatacccatcagtgttctcatttatatctaccacaatgattgacagtgatcaagatgttggctatttctgctaagcacagtgagcagagaccctccttccaactagtgttgaacaggtaaaggaagcaaaaaagggaatagttattattttaagtcattgaaatttgggggtggtcattaccaccatataacctcctgactattgttataagtaaaacaaaaaacaaacaaacaaaacaaaacaaaaaataaa

SEQ ID NO: 156460 - DNA, 280 bp, Homo sapiens
ctccatttttgcctgcactctgcctacaggaaaaattttgacttatcactagactcaggtaatgtgtctctcctgcctgggcctggaccacagagagcattgttatccattgctgggctcagcacccaggtgatgtgactctgctgcctgtgtcctgctttcagaggaagtttgttacatattcctggctaaatattcaggtgatgtgatactcctgtctggtctctgccctcagaaaagactgtgacatattcctgacccaaaacgcacgtgatgcgac

SEQ ID NO: 156461 - DNA, 248 bp, Homo sapiens
caggcgtcagccacgtgctcggcccattgaacctttttgagtttgtacagcccttgttgccttcaacagtgctccagagacccttctaggcagtctttgtgtgatcttctagacaaaatgtccttaaaggacatgtttgggtgtgtacggtaggcctctgggtggtgtgccacaacctacctctgtgtctacactccagaatcatcattgaactcaccaatactggtgttcctactggactttgttag

SEQ ID NO: 156462 - DNA, 657 bp, Homo sapiens
tcccatgcaatttaatagtactccacatcaaaaaggaacagggtattaatacatacagcaacatagataaataatgaaaacattgtgcagagtaaaagaagccttacgtagaagagtacatattataattccatttatacaaaattctaggagaggtaaaactaatctatactggaaaaaatcagaagagtggctgcagggagctggggattgactgggaaaggacatgagggaactttcagggatgatagttatggtccctatcagtggttctaaaggttaccagcattacctggagttttattagaaatgcaaattcttaggccctactccagacttaattcatcagtaactctgagggtagagcccatcattctgtattttaacagtctctctccagatgattcagatataagttgacgattgagaacaactgttctgtatattggtgtagggacttgagttacagtggtgaatgcatttgacaaaactgagcaaatgtacactaaaaatttgtgcattttattgcatgtacattttatctcaaggaaaaaacggggagtatactgaagtctccagtttaccttgaaatgcattgaaagtaaaatggatataggtgtgtgtgtatgcatatgcatacatgtatacgtgtgtgtg

SEQ ID NO: 156463 - DNA, 626 bp, Homo sapiens
aattggaacaagtggagataaggttctttctacacaacaggccggttcagttcaccgtaatcagcaggacaattcctccttcccattttgtccctgtttatgtgcttgggtgaaggggttatggaagggaatggatcaccctttgtatatcgcatgagttctttcaaggtagctaggagccaaaagacttgcttttctggttttctcattgtttccagtgccaacaaggctccctggaacctccaagctatgacatgattatgctcattatgaagggcaaataggaccagccctccagacactccaacaccaaaactatttttattaaggattttctccacttacctgggagtggttaggttttggagctttttggaggtatttcctctcacattcctaccatcctggcatacaattgttggacacctgcctatttcacatcctccttcctccttttcttatcgctccctgaggtgcagtttaccctcccctgcatcccccaccatctggaccagagtttctgcctctctgaacctaattatttctcttattctcttgaactactgcttcccttttgcctatgactcataaccttttattaacaaacaaacaattctttgctctta

SEQ ID NO: 156464 - DNA, 412 bp, Homo sapiens
tagtttgatggagaagagggaaatcaggtctgcccagcacagaggaaaccaacctaccctgtgtgaactatagagacaggtgtgggtgcaaggataggcgaatctgagcacagtaatgccaaggaccctttctttgcaaaaatagcagaaacagagcagatgggacagaacgcgggtgcctcagaagcaagtgacctgattgccagcacactggccctaccacctagaaaatcaaagcaaatttcttcttcagcacttttatgtgtggcctttgaccaaatgccacaacatgcagttaatgatgtcagatgacagggtgatactgcaattctgtgcattgcagacaccatgtgtaaatcacacatctgaaacgtcagacttcctgcccacagtcggtaactcatgtccagac

SEQ ID NO: 156465 - DNA, 118 bp, Homo sapiens
taggtcagttttacagatgaggaaactgaggcacagagaagttaattcagttgccaaaagccatgcagctaataagcggtgaagctggaattcaagcccaggcaatgtgccctggagc

SEQ ID NO: 156466 - DNA, 241 bp, Homo sapiens
agtctccaccaacttctgctcggccgctcctctcagccccttcccttggcccagggcgacctcggcagcccagagggcgtggaccctccggagtgcccagaaagcccccggggtggccctgcgcctcctggctctttctggatggaggcgcctccggaaggagccggctgcacgccgtggccttcacctcgcagcctctgctgaccacacctccctagcgcagaggctgcccgggagcagg

SEQ ID NO: 156467 - DNA, 399 bp, Homo sapiens
gaacaaggggatccaataagatctggtcctcactggcttttggtttctctccataggcacatcccctacactcagcttaaatcatttctgaccccttcctaccagtgctgaggattcttcccacctttttccagcccctacatctgcagtctggtgacctcgacctcaaagaaagtctcctcctctggactgggatagaagagatggagcctgggcccagttaggctttcagacatgtccaggcccggatgttagggtcagggtggtgaccccaggaggcagagtcacacgggaatcttcacagagtacattccttggcactaccacttctggcaggaggccaggcagcatgtccctatcccctccccaaaggcagtggcactggctgccctgaaggag

SEQ ID NO: 156468 - DNA, 172 bp, Homo sapiens
agtccgtctagtcacatagttcacccaggacagaaaaatacaggagtttcttaaggccaagaacagctttaagagacttcaaaaggtagtaggcagggagtggaggatcagcttgcaaggaaaacagaggagtgaccagagatgtaaataaaagaggttgtaccccagaagc

SEQ ID NO: 156469 - DNA, 567 bp, Homo sapiens
tctgcctcccgggttcaaatgattctcatgtctcagcctcctgagtagctgggattataggcgcacgtcaccatgctcggctaatttttgtatttttagtagagacggggtttcaccatgttggtcaggctggtcttgaactcctgacctcgtgatccgcctgcctcagccttccaaagtgtattttttacactttttgtatttttagtagagacggggtttcaccatgttggtcaggctggtcttgaactcctgacctcatgatctgcctgcctcagccttccaaagtgctgggattacaggcgtgagccaccgcgtccagcaagccaaacttcttagaagcgtctgtattcctgtctttgtcctgcaagctccaatgtggcttccaccctgaccttccacattcacatccccactgagcttcctggagactctgtgttgccttttccaggggaggttttccatcctcatctgctgcgctgtctctgcagtactggagatgctgattattcttgtggacactctctcttcctttgccttctttgccaccgcagtgctgattttcct

SEQ ID NO: 156470 - DNA, 698 bp, Homo sapiens
atgcttaatatctagcactggaaatcagtgatgggaaagtgcaaggggaaggaacattttatatgctttacacttgacaagaacacttcatcctctcccattatttgctgtgcatacagggcagacaaaaatattgataaaagctggaatatactcacaagttgtatctttgataacagttcctataccagttaatagaattttcttggactttatgctgtctatgcttgtgcttaatgtaagtctttgtgtacatgtaaggagataatatgttgaaggaaagatcgttagtttggaatcccagataatccttgacttttagtaacacagttacttaactttctaagtattagattactcattttgttattttttttagatgatctgtggtctaccttcatataagtatagaatacatattctagtagggaggcaaatttggagtttggtgggttttttttattacaaaaatacagtagtgcttatgcatagggtaaaattttatagaatatgtggaaaaataaccatctccaagcccatcagtgttaatattttgacttatttcctcctaaacttttgtttttatgacctgcatatgtttaaaataacataggggccatctgtattgcattttatctccttcagctaatttgttagctggatctaatgtaccaagtactgtgtaccagatctgaatt

SEQ ID NO: 156471 - DNA, 426 bp, Homo sapiens
ccacacttcttttccatcttgaagaccagttaaaactacctctggccaaaaatgttagtgttactagatattatcaaggtgtgagactaaaaagttagaaggctttaagatgtaaattatataagttaatgttttctttccctaaaagttctgacccttgctgacccctcaatcaaatgtttttaattgaaaggggaaagaaaatatcagagaacttaaagatggccttcgtgactttgactcaaaatcaatgcatttcattatgtatgggtcctacaccttgcttcctcaagtggccatgaaaaaaaatctcacgaccatgcaaactgatgccaccccaaagtcatggtaacgatttgaattgctctcagtattgatgtcaaactccctcctgttgtcagcagcttattgcaaactggccattct

SEQ ID NO: 156472 - DNA, 773 bp, Homo sapiens
gctttttgatgccttttgttcccagcactccagcttcaatcttaactagaaatcacccaacaaactgaaaaagctcccagttctggaaatggtactttgcagctttcattctgcccgtaatacatttgaaagcaccaagtttagggtctcagcaaaaagccaaagctgtctccatgtttcatttgaaggtacttttgttttcagttgtttctttgtgcatgtaagagcattttttgccctgtttttgtttctttccttcttattgaatggaacaattctttaaaaccttgtacctatcctgctttcagtttcttctgtttatttaaagcctgagtatttcttgtttagttataacagcagtagtacatgctaatgggaaagaaaatggagaagtgtgtaaactggaaaataaataaaaatgtcctgaataccacattccttccctcccctggagggaaaacattatcttttttttcccgcatccttccagaaattttctgcacatatatgagcattttaagcacacccacacgcacaaatggtttcccgctatacgtactgttctgccagtatatcttggataagtttccgcatcagcaaatgtagattgacttcatctgttaacagctccttagtaattaggggataatttctcacaactcccctattttttctgggtttccaaacaagccgccttggatctattcccagggttctccccaaatagtgctcttccagttctgcttcctttaggaaggagtttcatcttctag

SEQ ID NO: 156473 - DNA, 114 bp, Homo sapiens
gggtaagggctgcattccagacaaaggaggcaatagcctgattcaagacaatagaggtacaagaccctatggaatatgacgcagagcttaccaagggggtcacttaatgggata

SEQ ID NO: 156474 - DNA, 217 bp, Homo sapiens
ctctcacttacactgtaatgattcaaatcgatttgcaaccaagacttctatcccaatctcagacttgatcatttaaaggctaagggacaattctatctggatgttcaccggcatgttacactcaacgaacactaaatggaacctaccttccctagtaaatctcttttactcttccctttcctccattggtcaatgaaccactttctctctgattctc

SEQ ID NO: 156475 - DNA, 382 bp, Homo sapiens
aatgaggctattgggttaagttatagtttccaggcagtgggtgatgagaaccaagatgatggggttcagatcctcctgagaaccccttagaggcagctgttgttttgctatgttaattgtaaacgaggattctgcagctaataaaatgcttgaaactcacgaggccatgtaacttaaaggccttttgaccattaaattcagtgttttcctcctctttctgtctcctgcttctctccctcccctgaattccttactcaaatccctgagtttgctggcagagacttcatgattcttcagggttgcagccctaagtctatcttgctatctctctagaggctggactctgccctttcacttgcagcatgggagaagaattgtttct

SEQ ID NO: 156476 - DNA, 102 bp, Homo sapiens
aaatggttcatctcccaaggtctgctgggtggttttggcttataggaaaggaatgcacaatctaatagcccttctaaaacccccataaaaaccatcattaga

SEQ ID NO: 156477 - DNA, 249 bp, Homo sapiens
tctagaggatcccagttcccatttacctctgggggaagctttctatgaggagcattgtttggggtctctggagagcacagttcttggatatggcccccaggcagagtgagcttgtaccacaggggtgagggccttgcttagagctacatgggctggggctggggaagtgtgcctcatggcacataattgcgaatggtcttttctcagagacccttcatctgcctacctcatgcttatgagcctggtggt

SEQ ID NO: 156478 - DNA, 228 bp, Homo sapiens
tgggccttctcctgggagagtttgattcattaggtctataatttaacagactccccaggtgattgtgacacagcccgtctgtcacagggaagttaggaactactgcgatagagagtagaaatagagctcaacagagaaggatttgaggggaactttagcaccacaaagggtctgtgttgttctttgtgcgtaggcctaaggttgaacagggaagccattaagctttgt

SEQ ID NO: 156479 - DNA, 411 bp, Homo sapiens
ccctggaagccagagttcttggaaggaagaaatacacatacagaatgggagaaggccttccttcatcccctcaaccctcagctttgtggcctctatcttggactgtcaaaggccagtttaaacaatggtcacacagagattcacacttctcgcaagccccaactcaatctcctgccatgtttttcaggaaagcgttaacccagttgtcctgagttgctccaactttgcagttctcaagaaagccctattctgtggtgaggccttaaacagttcttgggaattgagatcttggaatgttctaacttctaggaatgctttaaacacttgggaccttgagccatattatgccaggctttctaaatagtttgtatgaggaatgtgatttatgaacaaactcatttcctttgggga

SEQ ID NO: 156480 - DNA, 477 bp, Homo sapiens
gatgcacagccacgcccagtgtctcaggatgagtgaggcgcagccatcgccttgggccagggtcaccctctctgctctctgcagagctggctgtggcggggccaagtgaggcggttctggggatcgggggccaggctaggacctgtccctggggaaggagggaatgtggatttcctacacccatgccgctgagccaggctggagggaacccccaacgggagaactttctggaaagatgcagttcttccctcctaatgtctccttcccctgcgccctcctgcagagccaaccgcacctcctcccactaagcccccagcttctctctccccactcaatggagcaggaggggctgctgccttggggacaagactgggggagcgggacactcacctccaaggccaaagaactcagccatcaagggccaggatattttaatcaatattttaaaaagtaaagttatgcagagtccatgctgat

SEQ ID NO: 156481 - DNA, 180 bp, Homo sapiens
tacattggttgacttgaattcagctctgttgttatacagtcattatatacttattcagtgaagcagaagtcctattaagaactgtagctactgaaaactttgtaacagcatccactcaaattggttttggaataagtagatcatacataaacctctgaaatagcggtagtagattcattt

SEQ ID NO: 156482 - DNA, 425 bp, Homo sapiens
gggagttgaggtctccctcaactgtgtggttgtctaagtcatgttgtaggccaagaagaacttgtgttatgaatcggttgttccaacgttgggtgaatatatatttaagatagttaagtcttgttggattgtacccttcatcattatataatggccttcattgtcctacttaatttttattgctttaccatttgttttatctaagaatagcaatgcctgggctggacgcggtggctcagacttgtaatcctagcactttggaaggctgaagcaagtggattgtttgagcacaggagttggaaatcagcctgggcaacgtggcaaaaccccatctctaccacaaaatacaaaaattaaccaggtgtggtggtgcatgcctgtagtcccagctactcaggaggttgaggtgggaggatcacttggga

SEQ ID NO: 156483 - DNA, 393 bp, Homo sapiens
taccgctgggtagggcggatgtggacattgcaagcgtgggtactgtggatgaagacacggctggacagtgtaggagtgggcactggggatgagctgggcagtgcaggtggaaggacctgggagtgaggaaaggctgcagcccctgcactgctgctgccagaggttcccacctagcaggaggtgatttgcattcttcttgcagtgcctgtaacagtgtatacagttgtccctcagtatccttgggagatccttccaagactcccaatctgcagatgttcaaataccttatttaaaacaaattttatttgcatagaacccaagcacatcttcccacatacttgaaatcatctatacctgaaacaatgtaaatgctgtgtaaataggtattctagt

SEQ ID NO: 156484 - DNA, 485 bp, Homo sapiens
attccagctactcaggaggctgaggcaggagaatcgcttcagcccaggaggcagaggttgtagtgagcacgagatcgtgccactgcactccagcctggtgacagagcgagactccgtctcaaaaaacaaacaacaaacaaacaaacaaacaaaagaactctagggacaaggccaccttaggaattgcaggaaggagccagcccagagactagcggccctgtcccttgtactgggacaacttcgggtgggatttcccaagactgcaaaggtcccaggtagcttagagtaaagggcacctaattaggaacaaaaagatccctgttcagccaggcacagtgattcatgcctgtaatcccagcacttcggaaggccaaggtgggaggatcgcttgaggccaagagttcaagaccaatctaggcaacatagtgaaacctcactttacaaaacaaaaatgaaataaattaaaaaattagccaggcatggtg

SEQ ID NO: 156485 - DNA, 204 bp, Homo sapiens
tatggcaatgcctactggggacatggcactttcccctcctgagttctggggttctgtagaacaaactgacttgcttctcgtgggcaccgtccccctcgggcactgacgccatctttcatcccagcaggtcagctgtcattcttttgcctgcgaggtcttcacctcctcctcgtcctcttcgagccgtcagacccggcccatcct

SEQ ID NO: 156486 - DNA, 653 bp, Homo sapiens
cattattttaagtaggctatagagccttagggagatttaaaaaagatatccacaaacttaagtagtggtcaagataggtcctatatagaaggttaaaagaagtgcgattattgaagctagaatcaaatggctatactttgggagagcagagtgaacatgggtagcaaatcaaattttagtttatgagggatttttgaagggaataatgtttttggaaggaaaattaccaataagatggcaaaatgtggactagatgaccagccagcgttggctgattattctgaaatatttcaaggtgagagaagatgctgattgattctatgtaggtttgttttttatttgaccgagagcaaggtgctatttcaggtaatttttaatgcagattgctgttcctggattctgcttgtctcagtgtaactttttttactctgcccagcttctaaatcttagctttttgttctactatttacctctgtatttctaaataacatcatcatactgcagttccttggtttccaattttatagctgtctcttgacttcctagtatgagaaatgaagatttagccatctaaaacctcttctctacccttatttcacttgccctattatctcttaatgcaattatattacgttttgaaaattgagtcatct

SEQ ID NO: 156487 - DNA, 148 bp, Homo sapiens
tagtttactctctgtcggaagggaccctataggctgctccttctttgatacactgttttcctctcaactaaattatgttctttgtatagctgaacagtgttgcctaaacatatctataaaaagtcaggaacatgttagtatgattatg

SEQ ID NO: 156488 - DNA, 406 bp, Homo sapiens
tattcatgaacttggcacttatggtctgcatgagagttgcataaccataactcgcaatgggagaggtgaattgaattcacctctcccattctttcttgaaatcactctgattagactttgcctccaccactgtacttctgtgaagttcattacagcagtgctaagtgcacaagtctgttcccacatcgcatcttacgtggctaacagtggcgcttgattgagcagtttactctttcctaccagaaaccctttctccacctggtttccatgtcactgaccctcttggcttcttcctttattcctggtgctccttctctatttcttttgctaggccctctgcacctgctcagtctccaaaagtcagaaggtctcagggctcggtcctgcgctctcttttcttttctat

SEQ ID NO: 156489 - DNA, 543 bp, Homo sapiens
ataccacttgcatgttctccagttttggcccgcccaaaggggagccccgagtcatccacggcagggtctgccacctgagtccgctgttcatcacaccatactgcagttctcctctgtctgagtttcataccaaggggtacagaggtggccacgttgaaagcggcccatgtgacagtgcatagcagacagtggacgggctgggcaagaacaccaccgagagcaagtgcagggagcattcagaaataacagtggggagctggaattccttaagcctcggggaattgttctccatgttttaggtgatcagccccaagagacacagcttgcaggtttcattaagatggtatataatgggggttcatgtcacaacataagagtaatcagaaaaggggtacagaggtggccacgtttgaaagcggcccatgtgacagtgcatagcagacggtggacgggctgggcaagaacaccaccgagagcaagtgcagggagcattcagaaataacagtggggagctggagttccttaagcctcggggaattgtct

SEQ ID NO: 156490 - DNA, 376 bp, Homo sapiens
  misc_feature (14)..(14): n is a, c, g, or t
ctactactactaanttcgcggccgcgtcgacgggaaatatttctgcaaaatgaaagccaaaggaaaaaaaaacctgatgatgttaattctgcaatttaaaaaatacactttcaaaacatcccatgctttagtgcctagtgcctttaaatacccttggggaaattactttttgcttaaagaaagggacggaaattattaataggagaagtagaaaaacagatggcctggagttgcctatgcaatgcagtgtttcttatctctggtgaactcagctgacccaaagtttccatagaataaatttcataaaacatgacttttaaaagatgaaagttctggtcgacgcggccgcgaatttagtagtagtaggcggccgctc

SEQ ID NO: 156491 - DNA, 598 bp, Homo sapiens
ctcagtgacctgcagctgtggaaacaaggacatattttattgtgcccatgttgtggcactgtctttataccgcatccgcaagccagatcaggtcaaactgcatcttcctatttcagagactctctttcaaatgaatagagaccaactgcaaaagtttgtacagtatttgatcacagtgcaccacacagaagttttgccaactgctcaaaaattagcagatgaaattctttcccaaaattcagaaatcaaccaagttcatggtgctcctgatccaacagcaggtgctagtatagatgatgaaaactgctggcacttagatgaagagcaggttcaagaacaggttaaactgttcctttcccagggcgggtaccacggatcagggaagcagcttaatttgctctttgcaaaggtgcgggagatgttaaagatgagggactccaatggggcccgcatgttgaccttgataacagagcaattcatggctgaccctcgcctgtcactttggcggcaacaaggcactgcaatgactgacaaatacaggcagctctgggatgagctgggtgctctgtggatgtgtatagttttaaacccccactgg

SEQ ID NO: 156492 - DNA, 489 bp, Homo sapiens
agcattttttcttcatatggattctaacatataattcaaaataattaatggtcatttctttgattaaattgctatttagggtagggagtggttttaaattttatattttgtttgcttaagagggctggtgtgaaggcttgacatctccccgcctatcctccaccacacacacacacacacacacacggagagagagagagagaaacagagaaaagtggtggtttgtctcttgtgttgctgtggggttttgttgtgttttcgttttgaacaattttctaaaggtctgtttttccccattaggtgcgggagatgttaaagatgagggactccaatggggcccgcatgttgaccttgataacagagcaattcatggctgaccctcgcctgtcactttggcggcaacaaggcactgcaatgactgacaaatacaggcagctctgggatgagctgggtgctctgtggatgtgtatagttttaaacccccactgg

SEQ ID NO: 156493 - DNA, 330 bp, Homo sapiens
ggaccccaggggtggagaaaaggaaaaagtctagcgagtacctaagtaattgacctcgttcctagcatggctgctatgccacacaattacagagtgtgatattgtaaaggatcagagaactgtgggctctgcttgaggcactttcaaacctcactgctctacctgaattgaagctgaagcctgtgggatgattgacttctgactttctggcagtgaataggcagacccagaagggaagtgggtaggaagtagtgctggcctggccctgtttatcttccccactgtaggcagggggattgtacacttgaaatcagcatgagagtggccccc

SEQ ID NO: 156494 - DNA, 449 bp, Homo sapiens
atgggagtcactccagagtactggggttggttaaaatggctggaccctgtctctccagagacctccaacccctcaatcccacatggccccaagcatcccacagcagctctggggatcaggtgggcagaggaggagttagcatgagaaagcaggggctccaaagcctgacctcagtgggattggtgaggtcctaggggtcagactcacagacggggaagacactggcatctgtgaacaccgaatgggtgtcaccaactcgtacatcaacaagatccaaacagtgtcagggaagtggcaggttcagggactgtggtaaacaggggaactcccatgcccataccatcctcagctcaaccaattgttgccactatcttctaatttttatttgaaatctcccaatttttaattgttggcatctaattttaaaaagaaaaatcactgtatgaacc

SEQ ID NO: 156495 - DNA, 444 bp, Homo sapiens
cattctgactggaagggccagagccgtgtctaagggcgggggccgggaggtggcccgcggtggtgtctctaccaggacgaggcctggggtatctgaagaggggatgacgtccaggcgctttgctaaagggaagccagaagggtatgagttgctagggtcagagatggggctttcggctcgagtctttccctgcagggcagagagtccgaagagcccgagaaggcagggaggacagtgggcctggtccttccccggccggcagagggagtcccgagatggaacgtccagctctcctctaacgaaaagcgtttgcatggctgtctcgccaattctgtacctcccggggctgaggaagagccgaggtgactagaagctagcgacaagtgccggccacctccgacgccaggcgccgggcttggagcccgacgggccgaattctcgcga

SEQ ID NO: 156496 - DNA, 214 bp, Homo sapiens
gatactgagcataatgaaaagtgagataactgtgaaacatccaagcaggtatgtagtgatacacatcatataacagggtttagctgatgaaagctataaatactgctagtatctgggctaagaacacaaggaatctttacatgaatgcattcgttgtttcagatggttgcaaacatgctacttttctgaccaggcccccccttattgctcccgt

SEQ ID NO: 156497 - DNA, 185 bp, Homo sapiens
tatctgtagtcaaaaataatattcaagaaaacattacagaaataaaagtagatctagatctacatattgaaagggcacaccaagtcctaaaaactgacccagaaaaaatcaacacaatttcaaccctagttgataccggtcataaaaaagagttctttgggcattctggcaaaaagactaagtca

SEQ ID NO: 156498 - DNA, 459 bp, Homo sapiens
taacccagggatgtatcatctctccagaatgaaggcatcattaaccttccagtggactcaaaacttccagatgaatccttaatttgaatattctaagatttggttctttctctgctttctcatttcatcagccttagaactggtgaattctaaaagctataggcttttagaatataaggaaacaagattttgcagtaaattaggctttgcattttgaggagttattacttaccaggttatatcttaaagcattggtgcagaaaccgcatatttaaaaacctttcctctcttggagcaaatggtgtttgtctccaatatactactttttctctccactcccgggagtggagagagaacgggggagagagaaggaggcttggcacacttaggggcttacctgcttctcaggactctcacaaatgtctaaccttttcagtatctttatgttctctctgtgca

SEQ ID NO: 156499 - DNA, 370 bp, Homo sapiens
taacccagggatgtatcatctctccagaatgaaggcatcattaaccttccagtggactcaaaacttccagatgaatccttaatttgaatattctaagatttggttctttctctgctttctcatttcatcagccttagaactggtgaattctaaaagctataggcttttagaatataaggaaacaagattttgcagtaaattaggctttgcattttgaggagttattacttaccaggttatatcttaaagcattggtgcagaaaccgcatatttaaaaacctttcctctcttggagcaaatggtgtttgtctccaatatactactttttctctttcattccttctttctttgcatctatattatctgcatc

SEQ ID NO: 156500 - DNA, 250 bp, Homo sapiens
aactccctatactatttctgcaactcttccgtaagtcttacattatctcaaaattacatatttaaaataaataaatctggccaggcgcagtggctcacacatgtaatcccagcactttgggaagccgaggtgggtggatcacctgaggttgagagtttgagaccagcctggccaacctggtgaaaccccatctctattaaaaatataaaaattagccgggcgtggtgtcacatgtaatcccagctacttg

SEQ ID NO: 156501 - DNA, 405 bp, Homo sapiens
ctgacgggtcttcaggctgcctggctgatctgtctcggggcctctagagtagctgcttctccaagcggttccaatggcaggtacgatttgttctagggctctaaaccccagtcggggaaaccctggcttaggcagagtccacccagtcccgcacattttcgcggatctctgtgcctggcagaaggcaagtgtccctgcagcctgttgtcatgttcagaaacaccttccgctggatggcactgtggctccacagatgacagtcacgtcttttccttcccttcccttgcctttgtctttctccatttgttgcgaacagaataaaacaaaaacacacacacaaagcgaagaaacaaagaaagaaacgggccaaagagcacccacctcatctacagcagggctccccac

SEQ ID NO: 156502 - DNA, 283 bp, Homo sapiens
gggccctggccccgggctcagggtggtgaccgccagcagggggaagtccctcttcctgccattcccccccgaccaaccctctgtatttcctctttggaggggcagtgagtgggaagggaggacccacaggtgtgcagcggccatggcccgcatcctggctgagcacctttgctggtgtggagggactccctccagtcactttcagacctcactccccatgctgctcccacaccagggcactgttcccacgccatcctcctttgaagggcactacccatcttcc

SEQ ID NO: 156503 - DNA, 354 bp, Homo sapiens
taccgcatctgatttgatattgtgctgtcagcatgagtccctctcagcttcccaggcaggccttcacttaccttaagccatttcccccatgtgaagaggcagaaggcagtcatggagtaacccatgatgagccagtggatggtcagttgcaccagagtagaaggcttggaggatggtaatggaggtcaggttgcccaaggcaaggctctctccaattagcctggcagcctgaggagggaggagtagctcatcagcagcttgtccctcatttcccctttcacctccaccctggaggcctgcctgtctttccacaataaaaatgaggaattccgtctggaagcaggccaggcatcc

SEQ ID NO: 156504 - DNA, 364 bp, Homo sapiens
agtgctggtaatgtgtggccaaaaacagaaaaaaatgactcttctgtgttttatttttctccaagaacccgagtttccagactcttagtgatctgtgcctctgtcgctcatttctgaagcaggaactttagtgttgctggcaatgtcagtgtcatttgtagactcactcagtaaagagatgtctctttggggctctgttatagcaccattttcttcttagaacaaatatcaagatgaatttctgatatttttcaactccatattgctaaaaagtggaataaagtcacctaagatatggatacttctgaatttggcttttctatctcttgatcatttctagctattgatttccattgttttggtt

SEQ ID NO: 156505 - DNA, 276 bp, Homo sapiens
ttgccatgtcaccattccgaggcagtgttcccattcctttaaatgcacagtgggccaggtagacatagagtctgattatttgttctctctctatcaggtagagtacagttcttctctgtggctagccttgaaatcatttcaggctatctgatgtgtgtgagagatagaatgacattaaaatagcaaaacattatcagctcttatagaaagcgttttctttgtcctttagacagattttttaaagcctttcagtaggcaatgaagaaaaaccccaaa

SEQ ID NO: 156506 - DNA, 311 bp, Homo sapiens
ctgggtggggacttcccagagcgcctgtaatgctgagatctttcctccaggcaactcctccttggtttagcctctgatacagccaaacctctggattcagggaaacctaaggaagccaggcaagaagggtcccgcagcctgtgcctagtctagccccagcctcatctggattaagatgggagggaaatattggctgagggcacccagccagtatgaagacagctagaatgtaaacccagcacagtaagggagagagtatcaaggcccaggactttagagtgcctcaccaccaccaccccgccgctgggcag

SEQ ID NO: 156507 - DNA, 230 bp, Homo sapiens
  misc_feature (216)..(216): n is a, c, g, or t
aaagtcacattgaaaaagacatcaaaaacaaagttaataggtaaatgatgaacttgaacaaaaaaattccagcagatgacatatttttctactatgtaaagagtttttacaaatgtctaagaatatcccaataacaataatggacacagcatatcaacaagaagacttaaaaatcaaaaaagaaggtgtgagccaccgggccgggcaaaatttttntttttctaaattcc

SEQ ID NO: 156508 - DNA, 435 bp, Homo sapiens
tagaggatccccgaagcgcacgaatgggcgtcacagatgtgactttggtcgtgtcatttaaactgactgagtgtcagtttcagtttcctccgatatactaaaatggaaacaatactacctagtatgagagctttaagagatacatacataacttcggtgacacaggcacttggtcatgtaatttgttatagttgttgggggtagcaggatctgtgcttctgcttgatttcctttcatgagtaaacaaagagtaggggaattattcaagaatctctcggcagggtgtggtggctcacaccagtaatcacagcactttgggaggctgaggtgggtggatcacttgaggccaggagtttgagaacagcctggccaacatggtaaaaccacgtctctactgaaaatacaaaaattggcaggatgcggcagcatgtgcct

SEQ ID NO: 156509 - DNA, 421 bp, Homo sapiens
atctcactgacttctcatgagcaccccgtggactggcctgctccccctgtgcagcacacacacctgcccgtgtaataggtctgtggcagtgctcgaacagtggacgtgttcatccagcagtggggacacctaacactcatcatgcatggcatgtgcgtcaggatggtttttcagcatcaggaacatgccactgattaagtaataagagtaatccttccacttgatgaagcagaatgcacagcatttgagctgttgacaggcggccacccaacctgatgtgtcattctgatctgaagcaaagaacctctcccttgtcaccgtgggcagaggtctttgctttgtctcctctgctcactacatccccacacgagaatcaggaacgccctgcgtatctgtgtggtgaacgagtaagtcccgggag

SEQ ID NO: 156510 - DNA, 435 bp, Homo sapiens
cgtatgtgtccaccactaatctatatatacatatgctatgcactgcgctcatgatgtaaagtatctctaattatgggttcgaaagccacaattacaaaaattagccaggcgtggtggcacatgcctgtaatcccagctactcaggaggctgaggcaggaaaatcgcttgaactggggaagtggagcttgctgtgacctgagatggtgccactgcactgcagcctggacgacagagcgagactccatctcaaaaaaagacattcagttggtaatctgaaggattaccaactctccctattggaaacaaccagaaaataaacataaaagtgtctgcaacataaggtagataggtgggatgcatcatattgagatgatactaagtaccatttctactgtagaggaaaatatatgacaattatcactgtcactgcctga

SEQ ID NO: 156511 - DNA, 396 bp, Homo sapiens
gagggcagctgataccttgaggtcgcacagacctgaccctgaccctgtgcagccaggtgtgactagatagcagagaaccctaactgcgtctggccatgtctgtccagcactgcaggggtgtctcaacctctgagagtgctctgcccacagtgggtgacaggatccttaggtcagagcctcatccttgtcccttcaggccaagccagggagctggtggcggggagtgaagaggcccctgagaacggctagtgcacatctcagcaggaatgtgggagggatgcctgggccagagagagcccatcatcccttggcccaatggggaacccgtgaggatgcttagcttagctatccagcttacctggccacagggtaaggatgggagagggtgactgggtg

SEQ ID NO: 156512 - DNA, 681 bp, Homo sapiens
cgtgcggtgtaggcgcatcttcgctctgttggccgtggctttagtaagcacacacctgcctgctactctggttatcgtggcgacggcaggtctggattgccagacaggtttttctttttacctcgaggctttctctgaagggagtcggagcatttaaaaggcggcctcaaggtggattgagtcgggggaggattagcagtatttgcttaggttgtaaaaccgcgactttatctaataaatcgccattcaaggtgcaaatacaaacttggaacagaggtgcgtgacatgtaccccttttgtcctaaagtcaagaatcaataatgtgacttagccctattatcttgcctctaattaagcgattctcacttattctttctctattgctaattctcacgttacatttccccttttctgtgtccacctttctcttttgcgcattgatataggaagtgttttgtaataggctgtagctttttctcttactgttataaaaaccaggacatatagcattactacaaaatgagatactccgtaaacactttaaaagtgccagctatttaatgacccaagaaaatactcgtgatataaaagttgactaagtcaggatattagagtagtgtagcgactatagaagtacaatatagagcgcaactaaaaagtgaaaatggtaactctgctgac

SEQ ID NO: 156513 - DNA, 386 bp, Homo sapiens
gttgcattcaaatggaataaatcatatattctatttctgcccactaacatctgggcaattttccaatgcaataagaattcaataaatttataaactattactagagcatgcaggcctcttgtttttaagtgtgtataaagattgtttactagctggaagaggtaactcatgcctgtaatcctagtattttggaagggtgaggtgggcagattgcttgagcccaggagttcaagatcagcctgggtaacatggtgaaacctggtctctacaaaaaatgcaaaaactagctgagcatagtggcagacacctgtggtctcagctactcaagaggctgaggtgggaggactgcttgagcttcaggaggtcggggatgcagtgagccaaga

SEQ ID NO: 156514 - DNA, 420 bp, Homo sapiens
ggttcccccatactgttctcgtggtagtgaataagtctcacgagatctgatggttttttaaggggtttccacttaacttcttcctcattctcttctcttgtctgtgccatgtgagacgtgcctttcaccttcagccatgattgtgaggcctccccagccatgtggaactgtgagtccgataggcctctttcttttgtaaattgcccagtcttgggtatgtctttatcagcatcatgaaaatggactatcacagctgccaaggtagaataccagactgatctattagcctgttgcattttcactgctaagcatttgagacgtgtacagagcttcaggatatctattaatggaagggaacttattgctcacttgtgggattcagagacgtgcttttgagtcagttagaactaaaaagatagt

SEQ ID NO: 156515 - DNA, 216 bp, Homo sapiens
attgaggaagcatcctaaacccagactgaggtgatgctgaaagggtgggggagggtcactgaagagctgatatctaagccaagtcttacaaaaaaaaaaaatgagagtgggagaagagaatagtatgtatatcaattgggagacgaatttggctagctccgggtttctcaatcttggcactactgacatcttaggttgaacaattctttgacactg

SEQ ID NO: 156516 - DNA, 403 bp, Homo sapiens
  misc_feature (15)..(15): n is a, c, g, or t
tcacatcgagctcgncccattatgtggctcaagcgcagaggaaaaagaaaggataccactttgaaccgtaaacaatagtgaaaggcacctttccgagaaggagcccaggaaacccaagagcccctgcagtttcaggacatccttggagaaatgttttgaaattaagcctagctgtggatgagtctgtctgtggtatcttgcaggtttgcctaggacggaccctcttatttgtcatctgtagcttacaggacagcagtaggagtctttcccgagtctgaaatgatcagtaccctcctctgtttttctgcattccctatggcctatagcctattacttcatttcactccatctccattatttaaactaagctaaatgtaatcttgtattcgatcatctgaaactt

SEQ ID NO: 156517 - DNA, 507 bp, Homo sapiens
accccaccagctggcctgcccagaatctctggacaagctgactggtgaagggctttccctgctgaagccagcgtgcaaagactgaaagagatgcctacttcttcaaacgcacagacatcaacacaaggcaatgaggatcacgaataatcaggaaaacatgacaccaccactaaaggaacaaaataaagcaccagtaactaactctaaagaaacagagatctatgaactgcctgacaagaaattaaaaatagtaaattttaaagaagatcagtgagctacaagagaacacagacaactaagcaaaatcaggaaaacaagacataaagaaaatgagtgagatgttcaacagagatagaaaccataaaaagaaccaaacaaattctggagctgaaaaacacaacactgaactgaaaaattccacatacaaatttcaatagcagtttccatcaaacagaagaaaaaaatctgtgagttcaaaaacaggacatttgaaattactaagccagg

SEQ ID NO: 156518 - DNA, 494 bp, Homo sapiens
ggcaaaatattggaaaagtgacaagaaagggatataattttgatacctggttcacccatgtttcccttagaaaatggaacataggttcatgtttttttaaaaaaaatttactgagtacacattaggtaccaagcactgtgttagaagctgagactacatatgaaaataaaatatctctaccttgagtgagtcatatctccagcccctgctataaagaaacaacatcagtggaacatcagacatttgcatgatggcttgtttccagggcttgggttgaaatactaattatttattttcatttacttcactggaaatctgcatgccatactctcataagtgtcacctaggtgctccactgaacattgaatggtaaaagaggatcactaacagcaaaaacctggaacagggccagctcaccagcactcaatcaatactcatcatgactccactcctgggaactgagcttgggcccagagtgggtcacagcagcacat

SEQ ID NO: 156519 - DNA, 384 bp, Homo sapiens
tttaaaaaaaaaaaaaaaaaaaaaaaaaaaaaaaaaagaatgtctttcaagtgatatttgaaattgaaacatataaaaacacccctattgggaggcattttttatgagtatagtaaataatagcatttggttataaagcaaagtcagtttactttcttgtatttacattgtatattgacagttccaaacatataaatgcttttattgtcattctgaatggaatagaatgctccagtgactggctaatcagtgcattgcagtgatgattgatgcctataatgaatactttgctgcagccctccaagagcctaaagtaccatcaacagtgagccgagatcgcaccgctgcactccagcctgggcgacagagcaagactctaaaaaa

SEQ ID NO: 156520 - DNA, 554 bp, Homo sapiens
gtcagttttcttctccctctgaattggttcttgcttttgaatatatctgctccagcctgaactgcctgaattgtcttacccagagttgtagagtccacccatttacgttctgctgtattcattcactgtatagaagagttatttaaaacctgaacgtgtaaggcaaaaagttgagtggcatgctctttcaatgtcacactggagaagtatttaacaagtccacccaaggatcatttaattttctagaagaatgtatctgtgtttgactttgctatttagatactgtgaagttacatgttaattgtattttcatttctggtaagagagataactccaaaggttatgattttattagcctgcaggacattaaccagtttcatccgtaacctagcaatctaattttaacttttttcattttgaaaatattttttcctggtggattatataaagcccttttcctcgagtgctcttgcaagaatcagctttcccagctaatggctccatcataagctaacgagctgaataaaacctctgacatgtgaaaaaatattttc

SEQ ID NO: 156521 - DNA, 1073 bp, Homo sapiens
gtgttgtatgataatgttttagtgacactgtcctcaacctgaatgtagtagaaattgttacatctttggttcatttgaatttgacatgtttattctcctgcacaccttgtgttacctcagctctcccaccacttttctctattgcatttgctctcaaactagggagattttgtcactctggaggcacttggcaatgcctctgtacatttttggttgtcccaactaagggtgtgatactactggcatctagtaggttgaggccagcaatgctggtaacatctacaatgcacagaaaagctccttgaaacaaagaggcaaaatggcagttaatagtgctgcagttgaaaaccctattctatcagaattaattaaaaactttcgtatatatatgatattgtggtgtcatttgaccttagtacaaacaaattattgtcattttaagtcccaagttatgttgtaaacatttataaagtgctcatctaggtgatccagaatattcacttattactcttctttagagtaccatcaaaataaaaatacaaaattaagggttacccatggagaactcatggactgcctgttcactaatacagaatatatatctgtgatccctggtctaggaaaaatctttagctggtatgatgaatgaatgcatgtgagtttatttcttcatcttaaaagctcatcttacgcattaaaaaaaaaaaaaaccatgtagtacaagtttggttttggttttgttttttggtgaaatgttcttcatttgcttgaaaggtaggctttttcacctttcttcatactgctgttctaatgcaaacagtaggatctcaaaacagaatgttataaatatataaacaaaagaagcacagcactaaatttttcatagttcgtctcttccctgaacttggaatgtctgaggaacccactgggtgcagtggctcatgcctataatcccagctactgaggaggctgaggcaggaagatctgttgaggccaggagttcaaggctgcagtgagctatgctcgtgccactgcacctcagcctgggtgacagagcaagactctgtctctct

SEQ ID NO: 156522 - DNA, 294 bp, Homo sapiens
ggtaaaaggacatgggactggggcactgtaggggggaggcaaaggaacggagtccccacactgggcctgtgttagctctgagcccttcacgcttgttctctcaccctaacttctactcccgccctgtgcaattggcatagccctctccaggcagggcaggctgagtcaaggcagtagagcctagtggttcagggttcctcctccgaatcatggaggaatcacactgtccatgtctcagggttattgggaggataaagggcccaacacttgtaaagctctgagctttgtctgtca

SEQ ID NO: 156523 - DNA, 484 bp, Homo sapiens
tgcacctcctggggtactggctatggccggaggggaccagacaacatgcaggtggtatagaggcaaactgagacccagagggtgccggcgctgtgcccacccctacacagccagcccaccctggcctcagcagctgccctgttcaccagggcccacgtgcaggaccaggatcttggggtgcagatggcccagacctggcagcgaatgccgtgtggattcctggagaccacaggagccccctgcctggcccccaacccagccaaggcagcatcccagccccccactcataatcacattggaaatttttgattagaaaacaaaatctaaatgaggcgcatgaatattcattagacttggagattaatatgcataattatgcaaatcagacagcaattaaacaccaatactccccggggggaatgattaacacaaaggcaccgaaatagaaggatgcgatttgaaagaagtttctggtgtggatgag

SEQ ID NO: 156524 - DNA, 168 bp, Homo sapiens
agaatgataactactgtatgtacttatacagagttcaaacttataatggctgatctatgtataccctgaaaaatataccagatgcataagaacatcataaccattggacatattttcttatgctaaaatatgctagtcttcaactagtatcttctttcacactataca

SEQ ID NO: 156525 - DNA, 186 bp, Homo sapiens
tgtgaagtaaagcagaaagcaaatgacaaaagtatcatataataggacagggaatggcaggcacagagtccagggaccagaataccacatctttggggatagtgtcagtaggaggaaatcacaaatgatctaagacaaacaagaatgaaaaagcagaaaaccataagcatattttttgaaattatg

SEQ ID NO: 156526 - DNA, 1765 bp, Homo sapiens
cagggaggagaaaggaactgagtcaggcaagagctggggatagaaaggaagagtgaggaaagcagcgtccaggaggaagccacaagctcagaggggacaggaaagggtgagctggtctccccagggagcagttgagtgcctgaccctactctctgtcctaaaacacacgcgtgtacacacactcacacttgcctcaaaccaagaccctgtgacttgtggtaccccaccgccacgctcccttagtaaagccggccagtcacacatctgaaagagtccagactgaccaggtgggccactgccgaagtcctcactgacccctgtcctccataagagatgttttatacaaatggagtcttgcatccttcctagttattagccctctccaaaactgccccagcactgtgattagacctaacctagtcttcattctttcttgaatccaaatcccatcctaaccatgggcaaagcgttatacctatctaagttatttctgcctatcaaagcaacctatgtcattatagaaaaatctgagagtataaaatatgaactataggggtggtgggaagagaaggtggcagcaaaaaaaaaaaaaaaaaaaaaggaaaaaaaaagaactataggaaagaaaccactcatgacctcacacctattcaagctgaaaacccaaactagccctgctcttcataacatgacaagcagcgccccatctgatacctaaaccgaccaagtcacagccctccaactcaccctctgcctgcccagacctcaccacatccttgctggactcaaacctcaaccgcactaaatcaaccaaatcccaagtctaaactaatctgaaacttttaaagtaacccagtccttaaacctaacctagcccaatgccaattatatctaccctagccaaaccctaactgcctttgccagtccaaagtgtccactgaatcctcaccttggtcctcacttaaaatcccagaaaagcatatttccccactgcccacatccctccttacagcacccaaccctggcctctggactcctggtatcctgggatgtccaaactctgcagtgccatcagccaacaagcccgactcgtcaaatgcacctctctcccttcctgtccccacccttgcaggctgatggaaaggcctcattgaagtccaacttttccccacctaacaccaagaacggggtgaacctccacactgccaccgttccctgagagtgagcactaaatctccttcaatctaaccccaccctacacttcccacactcaggaatcacatcctagaatatacccaaaactaagccccataaggcagcccgaccctagtggtctaaccctataccttgcttcctatgggtgagtctgttcttggcggccgcctctctcctgcttcctcccttagggctgactgtgctcagcctgccagctctgacatgtgctgtctcccaccctctgactcccctcaagctgcagtgggactgaagactggcaggaagctagggtacaactggaacacaggcaggtcgacctgcagtccctaggcctggccccgtccctccatgtacacacatatacatgttggcacacacacagtggcacacatgccaaagactctctcagctgacactttgcatccagagacactttgcatccagagacactttgcatccagagacactttgcatcgcagagacacttgcatccagagacacttgcatccagtagacacttgcatccagagacacttgcattccggtatct

SEQ ID NO: 156527 - DNA, 513 bp, Homo sapiens
gcggccgcctctctcctgcttcctcccttagggctgactgtgctcagcctgccagctctgacatgtgctgtctcccaccctctgactcccctcaagctgcagtgggactgaagactggcaggaagctagggtacaactggaacacaggcaggtcgacctgcagtccctaggcctggccccgtccctccatgtacacacatatacatgttggcacacacacagtggcacacatgccaaagactctctcagctgacacacagatccattctcaagtatctactgatagacactcatgcgtgccaagtcctcatcctcaaacatacacatgcctctctttctctcccgtcttgccaggagtgtttcccctcctccatcccctctgcctcccatctggtgtcccaccctcaccccccacccagcccaaggtggggacagacacctgaggggctgccagctgcttccccgtgtgggcccgggccgcgctcatgcttctcgtccatcctgcccacaggg

SEQ ID NO: 156528 - DNA, 557 bp, Homo sapiens
ctgaaaatgcctgtttttcacttagccccttgccttcctccctcgactgcagtccccatcttttctcccgctgaaaaggaaaaattaataaaaataggagccaaagaaaattcagaagggaaatgggtgtcaccagaccaaagagaaatgttatccaaacccctcatgagggaaatcctctttcatctgcatcaagggactcattagggacctcaagctaagtgtgatgcagtcctcggggtctacagatgtataggaatttacattttggcaagacaagttacagatagttgcctagtatgtaagaagactaataagcagatcctcagaaaaccacctgttggagggagaaatccaggattaaggctgttccaaattgtccaaattgattatgccgaaatgcccccaattggtcacttaaaatatttattagtgatagatcaccttactcattgggtagaagctattcccttttcaagtgcaactgctagtaatgtactcaaggcattagttgaaaatattatacccaggtttggattaatagaaaatgctgattc

SEQ ID NO: 156529 - DNA, 166 bp, Homo sapiens
ctgccttagcctcacgaagtgttgtgattacaggtatgagccaccacagccagcctgtattctcacatttttgagtgactacatatgctacattgttgtaacttttgggatgcatcagtaaacaggaattcctcactcatggattccatattcttacagggagaaa

SEQ ID NO: 156530 - DNA, 558 bp, Homo sapiens
catgtggcaggagctgtgctagatgctgcgtatgtgtcaatactcctaaaatccccttcaaagtagtagcattgcctccaccttacagttagactaggctcaaagaagttcagggtcatagtcacaggcccagtgagtacaggggctgggatcccaacacagattcacctggccccaaagcctatgcttttctcaccacatcttatcctttagaagagtttagacttttggggcagggtggagaactactgaatgtctttgtgcaggtggggtggggtgtcaggagtgcaggaacactggccgtttgtgctgggcgaagcacaatgctgggaggcctgtaacggtcaaggtcagtgccaaggcctgtccaggttgagcagaggcagcacgtgagggatggactgtgtctttcgcctagcagccggctgagtttcaggccctggggggcactggagagggcgggcgcagtactgtgaaggggcatgccaggagaacccagcatctgtgtcacccactcagcacaatggaaacaacagagagcaagagcacagccaacag

SEQ ID NO: 156531 - DNA, 341 bp, Homo sapiens
tccctccccaggtcttcctggccacagggcgctgtccaggcaagcctgggcccctgggaaccagcgccacttcaatgtatgactgtgtgagtctgttcttgcgttgctataaaggaatgcctgaggctgggtaatttataaagaaaagaggtttattttggctcatggtcctgaaggctatacaggaagctggtagcagcatctgctcttgctaagggcctcccagaacttccaatcatgtgggaagacgaagggggagcaggcatgtcacatggcaagagaggagcaagagagaagtggtggggggtgggggtgggggcaggctcttttaaacaaccagg

SEQ ID NO: 156532 - DNA, 286 bp, Homo sapiens
gggatatgaagcttgtggtaggtgccctgatggtaaccagagcaacagtaaggctcaaacccagtccagcttctaatgaaattaactcgattcttgcactaatagcttagcaggagggaaaaacctgtaggtctattagtaggaattacccatgctgaaatacaaagagaaagaagagtgaaaacaagacaaaataaacagaattaagtatccaagagctatgcaccattatcaaatggtataacatatttataattggacttccaaaaagagaagagagaacaga

SEQ ID NO: 156533 - DNA, 159 bp, Homo sapiens
tagatttatgaaaaatcatcaaaacatttaaggagatattgtagcatccatcactctgtctttttgtttagtaggatgagggctgtggaaaattaaaagccttccacaattaatatgcaattagcaaaatgaaaaagctacgaacaaaactgctttaag

SEQ ID NO: 156534 - DNA, 117 bp, Homo sapiens
gagcatgtttgttgattaaataaggcaggcctctctctcatagcttgaatacattttttaaattcttggtaagtagtattgtatgtcataatttttattgcaggctaagaggaaaga

SEQ ID NO: 156535 - DNA, 240 bp, Homo sapiens
cttcattcagaaggaaccaactgagagtgggtaagatgggaatagaagttctcactctggtcagggactctatctggaactggcagctcagttttcaggctttaaactgtctttggcttgaaggttaggtttcactgggaatctgtctctgtctgcctatgaatatgtctgtctcctgctgctatcaatcccccatctgaagaggtacatctagctgttaggatagggacaatgaccgtt

SEQ ID NO: 156536 - DNA, 526 bp, Homo sapiens
gcttggtggagagtcatatagaggatgattagcaggctcctaagagaggaaggtgctggggagctgagagtggaatgctgggctggaagtgacagtggcgagcacatcaggggaaaagggaaggaagggaatctaggaagtaatgtggccttggtacatcaggaagatgaaaggagtattttctaagggagtagttgaggtagatgaacctattcatgttagaaaaggtgtttctctgggcacagtgggcaggctaggaaaggaggaatcagggctggtgtggaggacagtggggtttagaattgggagagtgggaggcattggagtgcgggtaggagtttatatagtggaagataattccttaatggagtccaagcagatggtggttagggaaggatggaaaggagggaagcctcagccaaggatggcagaggaagaagacaaaaagttcctgggtcctttatggaatccttgagtggattccataaatccactccgctctgatactgcctgcttctagtttctt

SEQ ID NO: 156537 - DNA, 240 bp, Homo sapiens
acatattcctttgaataataccttctcttaacatcaagaaattcaaatttcagagaagttttccacatgccccgggtctacttcatctgctactcactcttcaccctgcactagtcaagccttgcccacactgacaccactgaaacagctctggccaaggataccggcagctttcttactgctaaatccaatcaccatgctaggccctcaacccacctgactgcctgactgcgtctgaca

SEQ ID NO: 156538 - DNA, 1028 bp, Homo sapiens
atctaccccgattatagaggacccccggtccccgatgcacagttaaaaagtcacgggtgcactgcttgtggaagcagtgcagcttatattcactcagtgggggcctcaggaggtttaattgcagaggattgtggagctgttggaagtccttaacctcaggtgtgaagagccaaatgtgattaagtgattggaaaggaaccacaagttggactagtctctgtcctgggcacagcgcccaggagatgggcttgcttgagcagctcccactgtccctttgaaaagtgaggtgacaagagagccaaccccagcctccagggacacattggagataagtggggtctccagggtgggcctttcacagagagtgccctgtggcgtcaaggggaacccatggttttggccaatcaaggccttaccatgggccacaagtaggagggacagataaaaagggtaaaactgtgggtcttgacctcaagcaactactaatgatgtcgactcacccctaaagcaattaagggctggctgtgggggtgctcatacctgtaaccccagtactttggaaggcggaggtgggaggatcacttagaggccaggagttcaagaccagcctgggtgacaggaggagaacctgtctccaaaaaaataaaaaggaaaaatgagactttaaagaagttttggccttttggcgagccatgtgggattgcgccctgagacccccgggaatgcatgatcactctgttgttagaggcaattctttttaaattttttttctttttttttctttcacgtccatctgtgatccaagttaggggcaattcaaaggaggagttgaagcattatcttcctaaagagaatggaacctcacctgggaagatgaaatggactgctggggaggatagaccggtgaggaagtggggccagtattggggtagagagggtgacgtgtctgatttaggacactgttctaggactcatggggaactttggtactttagggaactgtgctgggaccggggatcctctcactc

SEQ ID NO: 156539 - DNA, 240 bp, Homo sapiens
ctgtgtcagggcttcagcagggacgcagagcccctgagtgttcggaacaagggcgtcattgcaggagttagactgtgtgtgatggagggaggaggggcaggaggaaaggtcagaaggagagttcctgggaaggtccctgaggagcctggtgaggtgctaactggtgtggaggacactcagggcctgtggggacatctcctactgctgggggccagccacaaagggaactggccgaagtcc

SEQ ID NO: 156540 - DNA, 500 bp, Homo sapiens
caaaaatatcaactgcaaaagtacggttttaatttcagttaaatttaaaggtcattagacaaagtataatcaaacattgggcagacattttatattgtcatatatttagctaaactaggtcttttaagaaagttcttatttcatacacatttttatattactactttctaattattctcacctttcaatggaatatgtgtatacaatacatagatatcacttaaaatataccttataattgaattgcaaattgacaggtggattcctaaagtgaatattataatatataagcacaactgaaatttatttgcacagaagtgttaacagttgttgattctgtgaagattaccaaatcaaaagatgttagtgaattggctactgagactttttggtgtaatttattaaattcaacaccaaatctttaatgttcgtgtcgaatacttaaaatgctgaagactaaatgaataagacgtttatattatatttgaattataaatggg

SEQ ID NO: 156541 - DNA, 574 bp, Homo sapiens
atagcataggggcctgcttttaaaagagggataagcaagcaaggaactttcagtgcttaagggcacaggtggggcagaacatcaaagacagattccatctgtgctaacatttcacctttactccactgaaaattttctaagatgtcacctttgagacacactaaagcttatttttctagacaattaacaaataaattacatttactccaaggacagtgtaatattaatctataaggatattttagattttagaaagcatgagttttgaattctagtttattatgcagtatggtctgtgagccatgaattgtcttcatctttatgtccagcagataatgtggtaaggacttcttaaagctttttgaataattgaattaatgaataaaatttataaagttttctatcatctactaaacatctgcttgtgaattttaaagaagctcattttctataacattaaaaagaggctgtaaaacatcgtttttactaacaatttcattttatacattgcagttgtccttattgataaaagagaactttgtggtttgatgcataaaagaaaatttactattca

SEQ ID NO: 156542 - DNA, 572 bp, Homo sapiens
ttgaggttgcattgggatgtgccaagtcctcaggttctgttgtatgctattcatggctggcattcctgtggctaagttaccgagttccaaaccatgaaggccataaacaagtcttcctctctaggttttcctttatctcaaattgaatcatctgatagctgcctggatccctctccacctttttacatcatgtgatgtgattgtagcacactacagtgtcgaacttctgggctctagtgaccttcccacttcagccttccaagtagctgggactacaggcacgtaccactgagtccagtgtacttgtataagattttaaaaaagattacacattctaaattatgacgtccacataccatttacttttctgtgggacttataaggtgatattttaaatgatgggaatgaacaacttgacatgtgtatcagtaacctctaaacatctatttcaaacatctattaaccgaaagtcatgatccttcagctcttatactaagaacttccatacattagagcaatacacatattcaaattgacctagttcaatttgacaagtagacaatcacatcatg

SEQ ID NO: 156543 - DNA, 322 bp, Homo sapiens
  misc_feature (14)..(14): n is a, c, g, or t
ctgctctcctcctngtctccgtgttcagaatcacatctgattgttttccacctcagcctggagctgtcttcccacactctctagctccttccttaggtggttagtctcatcttgtagctgctccaccttagatggccctgctgagagagttcatcttgaatttaggtggttgagcaagcacagcgatttacttgagcccacgagcaacctctgtgagagatgtgagcctcatccccgtccatttcacagaccaggaagccggggctcagcactggtgcccacaacgagccaggccctccccactgccctgcaccttcctcct

SEQ ID NO: 156544 - DNA, 517 bp, Homo sapiens
aagctccaggcaagaacctttgttcagcagggaactggcctggccagaggcagttgtaaaggcaaacaagttttggttaagccattgacatttttacaggaggagcagatagacttttagaggcagccagctaacgtcaacacattaatgcacttgtcagatatattgtgagcacctactacatcccaggcactattggccttatctgagtcatcccatttagtcataatgacctattgttatttattcttgttaagaggataccaaagcccagagagaagttaagcccaatgtcacataaaactggaacccagaacttaagctgttagccactctgcctcctggagcacagccttggccccatgcccctggcagtccccagcgggtatgagctgtgcctccctgagagcccctctcccttccagcccccaaagccatgccttcccctccactgggaactcagggagaaaacagcccagctgaaaaattaggccatgctgccgagcacactacttat

SEQ ID NO: 156545 - DNA, 584 bp, Homo sapiens
tgtgtcaaatataagaaaaataaagtcacttttgcataagaacaagcaggccagtgccttaaatgaagtccttcagcagactgcctattctctccttctttctcaataatgaagacttccagttttatttcccagtctcccttacggctaagtgtgaacattctccagccagcaaggtgtaggtaaaatgtatgatgcacaggaaatgtccttaaaagtaggcgacatgcccttctcatccccttgtctcctctctgttaggtaaaatgtagaggtactgacaagagtctggaacaggtatcttggaatacaaaggtaacttggaaatggaggcccacataatttaatgaacaacacggaagatgcctggacttcaagagggcatacaagccctgctccacctacccaaatgtgtccatgagagaaataatctatcttattgaagtcaacacttaacagactttgtattttctgttatttaacaaccaaaactaattccaactaatgtaattcctaatgcatatgggcctagattcatgaagcaattatataaaataactaatacctgtacctacaatcttgaa

SEQ ID NO: 156546 - DNA, 739 bp, Homo sapiens
atttgctgagtcttgaccatgtgctaaaccagaggtccccagcctttttggcgtcagagactggttttgtggaagacaatttttcaaccaacgggagagttggggggaatgatggtttcgggatgaaactgttccaccttagattattaccaggcattagattctcataaggagtgcgcgacctcgatctctggcatgtgcagttcacaataggttcatgctcctatgagagtctaatgccactgctgatccaataggaggaggagctcaggtggtaatcctcgcttgcctgccacttacctcctgctctgcgatccggttcctaataggccacggaccggtatgggagttggggacccctgtgcaagacagtaggtgctggagatataacagtaaacaaaacaaagcccttattttcatggagttcaatgtattctagtagagggaggggataagggcagggacagataataagcaaatgaataaataacatttggtggtgaagagcgctatgaagagaagcggtatgtgtggtggtgggggtggtcagggaaagcctctctgatgaggggacactgagcagagaactgagtttggctgcagagttgatacagggaggagagctttcagatagaggggaccacaaatacacaggaagtcaagtgggagccacaggtgacaatgtggctaataagacaccttcctccctgggatgaatcacattccacatcagcagagg

SEQ ID NO: 156547 - DNA, 328 bp, Homo sapiens
aataatccaaggagccctgcaataatccaagaggcgcgtaggacactagaccgcgcgacgtgtgtgtaaaaaactaaggcactgctaaaaagttacaaatagactctggtttccaggtcagcggaggcacagaggaaaggacagaatgaaaatgagtcacagtagagcagaaaggagaaaccagtgaaacctagagcgctgcctccatgccttttgctgccaaagcccctgattgcaggaccgtgtgctcacagagtgctgggcaggctggggaggtgaggtccgggtgcttcataccgacagccacggctggcctgtgacagaggag

SEQ ID NO: 156548 - DNA, 387 bp, Homo sapiens
aattgtaagtaatagtgccgatttattgattgagtgctctgtgtgccagacagcatgggaagccctgcgcctgcatcacaacactccacgaggcctgagtgctgttattaccccattctgtagatgagaaaactgaggctcaaaccgttaagtcatttagccagcatcacctggatcggaatgcagacctgtgtgaatgcagagattctgtgagtgacgcggcagttctgttccctttgcatttcatttcctgttacattcctgaagactgatgatgcttcagtacaagattcaactgaaggctgcattccagcatttgcattggccttggagtgccagagtaatatgttctgtcaattatttgaccttttaaaatatgccttcttt

SEQ ID NO: 156549 - DNA, 522 bp, Homo sapiens
gtcagtcggtaccaaatccatttctactaaagtacaaagtagcaggcgcggggccacacctgttatcctagctattcgggagcctgaggcaggagaatcacatgaacccaggaggcagaggttgcagtgagctgacatcgcgccactgccctccaacctggatgacagagtgagactccgtctcaaataaatgaataaatcgatgaacacaactggagattaattattgttaattttcttcttgtctcttcttatcctctagaattagactttcttgtacctaaggctggattcttctgtccaatttgttccctcttctactcagggaaaaatcaaagacaggatcacaaaaattgaaaataataattgttgctgcagagactttagggagttgatttaaaaaaaaaaaaacactcctttcttcctctactaaattaggaagtagttgtgggggtctcacagaagtcagacaagcaaagatcacagtgttttgtgaccgaaagggggtctgagatcatggct

SEQ ID NO: 156550 - DNA, 482 bp, Homo sapiens
ggttgtgcagcctctgatgtggcccctcctggaactcacattctggtataatcgcctaccctttgagtgtgtgctggacctagtgacttgtccctaacaaacagaatgggcaagagtgaggggatgtcacatctgagatcaggttagtaaagacagtgacttccatcttgtttgccctctcctgttccatcacctgctctctttgttgaagctagttgccaggctgtgagtggccctatgggagaggcccacctgcaaggaatagagggcggcctctggccaacagttggcaacaacctgagacccttagttcaacagtccaaaagtagctgaatgtagcccacaacaactgagcttgctcacaaatggatcctgccctggtcaagtcttgagatgagaccacagccccagccaacatctgaattacggccagtgggaggccctgaagcagaggatgcagttcagccacaccagcatccctg

SEQ ID NO: 156551 - DNA, 597 bp, Homo sapiens
ccagttgactaatttcagcttaagtaaactaataatttagttattgacatgtaagggacttaatgtcaactctattctagacatttttacattttctgtaaggcagttagccacaacagcccaccaatagcaccagctggatctcagttacaagaaaaaacagctcagaacattctcaaaaataatttttttttaagttgtggagtcaaataaccccagctctaccatggactggctgtgaaccttgggcaagtcattaacttgtttcctcagttataaactgggaatgaaaagagtagccgtctcacagagctatcatgaagatacagcatgtaaaacccttagcacatggctggtcacacagccagggctcagtcattagctattacggcttttaacatcagagaatgttcctgcccccacttccaatcctgagaatgctgagccagtagatgtttaagagtaggctccccaagacttcagttgggcagaggacacactttaaagaaaaaagggactgatgctcctttgacagacctgtgcttcccaaggtacaagccacatggtgtcatacatactactgcttacacatgcata

SEQ ID NO: 156552 - DNA, 279 bp, Homo sapiens
tgtttctgtgattaacacagcacatcgggggatcaacaaaatcactggaggaaataccctcatgtcatgcgaacctcttctctggattcatctcttgattatctcccaccttcgatgcaggagcctgccacacctaccacacgcgagcacacacgcatgcacacacacgccatgctgtcgttaagctcagtgggagggcgggaaggaaggcctgagtcagggtttttaggaggagcagtaattcaaacatttcaggatatgccgcctggaggttctttg

SEQ ID NO: 156553 - DNA, 493 bp, Homo sapiens
ccccccttcccccccgggccaccgggccaaacacccctttccacaaaaaaaaaaaaaaaaaaaagaataagttacttacaaaaaagaagcaaacttacaaagaccagaggctctagtcagtccactgctcctttatgttgttatctgaccattcattatctcagacacttactactgacttctataagaatccaaaaaacagaatttcactagaaggtgacagtcttgtttcagctaaccattcatgcccaagagcttaattacagggtggacctcagcccccaccttagtgtctctcaggtgggtgggatgaagtcagagaaaaggcagtgcagcaccagcaacacaggtccatcaggaactggagcttttcctactgtccctgcttcctcctcccgtgaatcccaacaatcacagccacagaaatagtaagcaggaaaaaacaaggaggtggcagtagaggagcctatttgtcttatcacagttattcatc

SEQ ID NO: 156554 - DNA, 531 bp, Homo sapiens
attccaaagcccataagcttttcaatgttttccgcaacttcagtccatttgttagcattttcatgattttcttcacatctgccatcacctgtactattgtttacttaatacttactttctctcttttgagacaggattttgctctgttgcccagactgtagtgcagtggcccaatcacagctcattgtaaccttgaactcctgggctcaagtgatcctcctgcctcagcctcctgagtagctgggactacatgtgcatgtcaccaagcccgccttctattttggtggggggaacagagtctcaaaacaacaacaattaaagaaggaaatgaacattttctaggtatgtcagatcattatattaaattttctcatcaattttgagagccatcgttttatcctaattttgcgcttcttttggatgaggaaattaggctcacagagattatataatcctctcaaattcattccaaagtcagtatggatatagttaagactgtagtctaccccagatttatctgattccaaagca

SEQ ID NO: 156555 - DNA, 281 bp, Homo sapiens
tttgtgggtgctttactaacattatttcacttcatcttttcttcataccacctctgtgaggttggtattattcattcaattttacagatgagaaaatttcgcagaaaagtaaataattgtataaggactacattgggattcaaactcaggagtgtctgattctaatgcctgtgctctgtccaggacacctcactgtacattatccaggaatttttattcctcgggtcctcagcagcagtagtgtaaaatgctttgtataagataaaccttaagaaaatttc

SEQ ID NO: 156556 - DNA, 321 bp, Homo sapiens
gtgagaaggggtaagatccagagggcaagtggaggaacaggactccaatttttttaaaagtgacatttttcttttttctttatcttttttgagacggagttttgctcttgtcgcccaggctggagtgcagtggcatgatctcagctcactgcaacctctgcctcccgagttcaagcaattctcctgcgtgtgcctccgagtagctgggattacaggcgcccgccactacagccagctaattttttgtatttttagtagacatggggttttgccaagttcggcaggctggtctcgaattcctgatctcaggtgatctgccca

SEQ ID NO: 156557 - DNA, 527 bp, Homo sapiens
  misc_feature (27)..(27): n is a, c, g, or t
gaggtgatctagaggatcccaatcagnttacacaagttaaggctcttttcacttcttttgtggatctttagttgcttcaggccatctggatgtatacgtgcaggtcactgggaatatgatggcttagcttgggctcagaggcctgacagtaatatgatgggttgagggaaagttatcagaagagaaaaagaacaaaaaaatttctagctttactggagaatgttgaagatggggtaagcagaggtttacgctagaaatggattcaagtagacaaactgtattatttcatcataaatgcctctactttgttctttcctcccattaccctgctcaattcttgtttttgtttttttttttttccattctagttatgaagaaaaacaaaaagagttattttgtcttgacccaatgcaaagatgaaagcagaaatcagatttaccctatgtaatagcttattactgggcaaagaaatgaagtacattagggaggccttttttttcctccaatggctgttagattgtgtattg

SEQ ID NO: 156558 - DNA, 908 bp, Homo sapiens
cggagtgagggtgaggacaggggactggtctcccgaaggagtcccgctgacctgggtcttcggcaccaaatgtctcacatgtgcatgtgaagagaccacaaaacaggctttgtgtgagcaacaaggctgtttatttcacctgggtgccggcaggctgagtcagaaaagagagtcagcaaagggtggtgggattatcattagttcttacaggttttgggataggcagtggagttaagagcaatgttttgggggcagggggtggatctcgcacattctcaagggcggggagaattacaaagaaccttcttaagggtgggggagattatgaagaaccttcttaagggtgggggagattacaaagtatattgatcagttagggtagggcagaaacaaatcacaatggtagaatatcatcagttaaggctcttttcacttcttttgtggatctttagttgcttcaggccatctggatgtatacgtgcaggtcactgggaatatgatggcttagcttgggctcagaggcctgacagtaatatgatgggttgagggaaagttatcagaagagaaaaagaacaaaaaaatttctagctttactggagaatgttgaagatggggtaagcagaggtttacgctagaaatggattcaagtagacaaactgtattatttcatcataaatgcctctactttgttctttcctcccattaccctgctcaattcttgtttttgtttttttttttttccattctagttatgaagaaaaacaaaaagagttattttgtcttgacccaatgcaaagatgaaagcagaaatcagatttaccctatgtaatagcttattactgggcaaagaaatgaagtacattagggaggccttttttttcctccaatggctgttagattgtgtattg

SEQ ID NO: 156559 - DNA, 451 bp, Homo sapiens
tgcatacctaggagtgctgcggccgaaagacatcccattggggcctaagcaagcttccatctttgactctagtttacagaaaataccagtggtggagcaataggctaaaggacaccatggggaggccgccagctaaagccaggaagggggaagctctaaggacaggtgacctggtttctttccaaaataaactgcaaggaaaaggccaggcgcggtggctcacatctgtaatcccagcactttgggtggctgaggtgggtggaacacctgaagtcaggagttcaagaccagcctggccaacatggtgaaaccccagctctactaaaaatatgaaatttagccaggtgtggtgctacatgcctgtaatcccagctactcaggaggctgacacaggagaatcgctggaacccaggaggcggaggttgcagtgagccaagattgcgccactgca

SEQ ID NO: 156560 - DNA, 371 bp, Homo sapiens
cagaggtgaggcctaatgagtgtcagtgaccaccctcctctcttctgacacttttcaacagtaccctttgaaacaattctaccgtttcccaaattgtgaacctactatgtgccaggcactgcatcaaaggtagtaggctggggagtgcaatgttgagaaaaacacaccccttgccctcaagctgaccaacttagaacctggggagagtacgacaaagatctaggtgacttgtacacaatcagaatatacggacaatgtcctccagacgcaggagagggagaagttggagaaaccagaggagtcttcacctggaaagactatgggggagcccagaggggccactgtctggcagggggagggggaggaatgtg

SEQ ID NO: 156561 - DNA, 276 bp, Homo sapiens
attctctccttcctcttctcacagactaatgaaatgagtacttatactggcacttgagtacttatactcaagctccagtccccatctgggcttgtcacagcagaggctgaggccgaggatgacttaggatcctcagcacaagtaaaaccaaaggtaccgaggtttacattcacaatggaacctcaagaggaccctcagctacttttccctcccacctccatgctcagtctcaactccatttgttttttgtttttgaaatggagtcgagttcttgtc

SEQ ID NO: 156562 - DNA, 452 bp, Homo sapiens
ggatccctggtcatctggatgttcctcctcaatccaggctcagctgcagacaagtgttagtttcagttatcctcatagctttgcccacagaggcccctagggtgctttggagtgcaactgtcattcttcttggcccaatacaccctcttgaacctctcacctcaaaggtaggactatggaaagtctggccagaaagcccgtgtctgtgacatgtctctgaatgtatatacacatgtctgtttgtgcatgtctctgtgggtaggcctgagtgtgcacctgtctgtgttcatgtctgtgtctgtttgtacatggtctacacttatgtctttaagtatggctatgtgtgcatgtctatacacatgtgtgcatgcattgtgcatatgtctgtgtatgtctgtgcatgtgtctgcatatgtgtgtgtatgagtgtgatggagtgagggagagtagaa

SEQ ID NO: 156563 - DNA, 577 bp, Homo sapiens
tatacccagcaaaaccgtctttcaagaaaggatgaaacaaagatatttttcagacatagaaaagttaaaagtaatatattatcagcaaacctggactatgagaacagtgtaaaagcctttcaggaagaaggaaaataaagaataatatctttgtgcagatagaaacatggatccatacaaagaaatgaagagcactggcaatagtaacaccataagtaaatatacaatacctgcccttattacttaaatattttttaaagataattggctgtttagaaataatagcagtgtcatgtgagttctgcagcatgagtaaaagtaaaatatatgacaacaataacctagagtaaatggaaatatagtttagtttgtaaggttcttagactgtgtgtaaagtcgtataatgcttattaaaagttggctattacaagttatctttaagttaaaacatttgtatggtgtaatccctaaagcaaatgctagagtaacaaaaacagtgataatattacaatattacacaataatattacaatgcagcgatgaaatagaataaatttttaaatgcttgaaagtagac

SEQ ID NO: 156564 - DNA, 560 bp, Homo sapiens
cttgctctgtcgaccagcctggagtgcagcggcacgatctcagctcactgcagacctctgcctcctgggttcaagcaattctcctgcctcagcctcccaagtggctgggactacaggcacaagctgccacgcccagctaatttttttgtattttagtagagatggggtttcaccttgttgcccaggctcatctcgaactcctgagttcaggcaatctgcccgcctcggcctcccaaactgctaggattacaggcatgagacaccgcacccagccgggaactgaattttatgtgagcaccttgtcttctgcctccatgagggttcccccaaggcgcttggcaacctccctatggtgtctcacacctgtaatcccagcactttgggaggccgaggcaggcagatcacttgaggtcaggagtttgagaccagcctggtcatcatggtgaaacccagtctctactaaaaaaaacacaaaaattagccaggcatggtggtgagcgcctgtaatcccagctattccggagcctgaggcaggagcagtcgcttgagcctgggagcca

SEQ ID NO: 156565 - DNA, 121 bp, Homo sapiens
aacaaatacatcaacaaagtctgacttctctaaaggtcaaaagccagctaagtatagactgtcagcaagccactcctatatataactgtcccggtctcagccagctgtcggcctctctcag

SEQ ID NO: 156566 - DNA, 167 bp, Homo sapiens
ctatttcgatcgttaattcacacaatcaacttttttcacttcaaatagtcaaattacattaatagatcgtaagctacaaaaccaaggtaaagcttccttagaacttagtcatggccacgtacaggggctcataccggtaattccagcacttcgggggaccgaggcag

SEQ ID NO: 156567 - DNA, 319 bp, Homo sapiens
agcctggagaaaggtccagcttccagagttcacctgctagagttttccataacacctgggggagaggctactccatctgggacctgccccacctctgggcctcagaaactatgagagagggattgagagaaaacttgccccacttctgctgcagtgggaagggagggggctgctgtcaggcttctaggcagtgagcggcattgtttattctctcagttctaggaaggggagtttagaagtactggtgaagaaaacaaagttacaagatcctataaggaacagctgaactactccaaacactctcactggacccccattg

SEQ ID NO: 156568 - DNA, 138 bp, Homo sapiens
tcatggccctccctaagcctgcccatgatggccccttggccctcagcttaacaccttattttatctagtagctcctacctctgaacagatgaggaaactgaggtccaaccaaattgggtggtacgggctgagttcaca

SEQ ID NO: 156569 - DNA, 603 bp, Homo sapiens
gaacccgctgtgaatactttctggtagatccagccagacatcctgcctcacgccaggcacaagtgtgtacagacgacaggacacagcacatgtgcacacacacactcccaggaaagaaagtggtcctcggggcacagtggagaaggcaggctgggatcagcctgcacgggttctggccctggctccaccgcgccagctgcgtgactctggacaaaggcttctttggcaagcctcagtttcgccgaacctccctgtggggctgccagcagccaggtggagactcaggggccgccttcccctgctgggctgaggctggctctcctgtccttgccacacggcccctttcaccgccagtggaaacctgcctcaggctgccctgtcccgggccccaccgactccacagagacgccgggcctcgcccactgttctggcagtaggccttcatgggcagggcttgctgtgtgccaggcaagctgggcggctgcttcctgtacaccacctcccctgatatcctcgccctgcctgagcccattctgggacagcctcaagtcctgtctctcctgccatccagcccagggcacgctgctggtatcccgtagccct

SEQ ID NO: 156570 - DNA, 400 bp, Homo sapiens
gaaatttgaccctatctttaaaattcagtccaggggatttcattacatgggattacagagaagggtgttccctgaactgaatttttaaagatagggtcaaattttcataggcagaaagaaagggtgggaagcggacattctcaattaaggggaaaaatgagatcttatggaagctttaaagcctgagacatttgagggaacagaatttgagaattgagtctgcgatgagacaggaaaagcccacaggcagtaaaaaatgccggtggctgagtgcagtgtagcttccactgaactctgtggatgtttatgcttatttgaaccttgttggaatattcctggtttgttttatgaagggatgtctctcactgaggatattgactcagggacgtttcctctttca

SEQ ID NO: 156571 - DNA, 302 bp, Homo sapiens
cctcccactcctgcaatctcagtctgagagggactagggtgctctgtgtagaagcactcctgaacactacccctttcagaaatccattttacaagcattctaggtgctgggtccagctctgtctgcaatgtggcttactttcttaagtgtatcacatctgcttagaacttccttccagttaatgagtctttcttgaatcaagcctgaagggcttttgatctcagtaccaaacgaagggggatggacacaccaagggggatggacacaccaagggggatggacacaccaagggggatggacac

SEQ ID NO: 156572 - DNA, 287 bp, Homo sapiens
taagcttgaattacaggtgcccaccaccatgcctggctaatcttgtatttttagtagagatggggtttcaccatgttggccgggctggtctcaaactactgacctcaggtgatctgcctgcctcagcccctgaaagtggtggtattacatgtatgagtcactgtgcctagccccagtctagagccattttgcatactttatttcattgttgtttttagagacacagtcttggtctgtggcccaggctggagtgcagtggtgcaatcatagctcactgcagcctccaa

SEQ ID NO: 156573 - DNA, 373 bp, Homo sapiens
aggagctagatgtgggcctggaaaggctgattttagtgcatgaacatgcacttggagcatgtttatgggtcaaagaaaatcgagaggagaagttgaagttataggagagaaaagaaatgattaatggggcaagatgaaggaaaccggaggggtcaggatgggatcaagagcccaagtagaagaatgtatcttgaaaaggagatatttgaaacagcagggaagaagaaaaaggatagtgagatataaaaaggctactgggctttttggtctttgaaggacattttactgatgccctctattttctcagggagttaggaggcactattagtttaaatgtggaagagtgggggtttaaatggcacgagtggggaat

SEQ ID NO: 156574 - DNA, 381 bp, Homo sapiens
aacaaaacaaaaactcccaaaataatgaaatcatctaataatccaatcaacttatttaacagacgaggcaaacagaggccccagggagatggaatgatttgaccaagattatatacagcttaggtttctaactttaaatccactgctgtctcaccctcattaaaggctgccaatgctctgaaaaagaccatccttatgacctcttccagaaaacacaacatcatcctcaaatatcaaaccccaactttagtttttgatatcaaaataattttcaaggccgggtgcaatggctcacatctgtaattacaacaatttggaaggccaaggcaggaggattgcttgagcccaggagttgaagaccagtctgggcaacacagcaag

SEQ ID NO: 156575 - DNA, 367 bp, Homo sapiens
cttggctgtgacagtttctcaggcttaactagtttttgatgactgttaagggctgacttgtgcccctctaaaattcgtatcttgaagtcctaacctcagtaccccagaacgtgactgtatttggagagagggtctttaaagaagatgaggtcactagggtggaccttagcccaatatattaataactgctgtccttataagaagagagtaggatacagagggatgatcatgtgaagacatagggagaagacaaccatccacaagccaaggagagaggccttagaatgaaatcaaccccatagagcttacactatacgcctccagaacagtgaggaaataaatttctgttgcttaagccacccagtct

SEQ ID NO: 156576 - DNA, 114 bp, Homo sapiens
ctgatgttgtggggcaggggaaatagtctaacatcttaactacaaaatattacttgaccatatttcacttactttagttgagctagttggaatctatgttcagaaaaatctgat

SEQ ID NO: 156577 - DNA, 301 bp, Homo sapiens
tgcttctgctaataaataatctaaaatcgatgctgacagcagttaattggcacagagattttattttgtaaagctcttggctaacgaccttctttaaattaatagcattaagtgctatgaggaaataaatctgaggaattgcctgtcatttgcttgtcatgtctaataacttccaataatgatggctgatagatttttgcacattccattattgaagttggtgcatgtaattattctcctcattatatgtaaacaattagcaatatttggtatttccttgcagtaaaactgttaagtacaa

SEQ ID NO: 156578 - DNA, 228 bp, Homo sapiens
tctgtctcatatccttccctgtttttacccatcacatacagtaacccccaagacctatcaaacattttcctgctacctttctccccactgccactgcccttgttgtggacttcatcatattttgtttcatcgattttcactcagaatttccaatgaaaccctagaaaggccatgtattaaaataaccacatgccaggttactggctatgtcctaagactaagggcaaa

SEQ ID NO: 156579 - DNA, 150 bp, Homo sapiens
gccaccgtgccagccctattttcattttggatctatagaatccttggagtgaactagcagtagaaattcattaaaatagaaaggggttatttgcttgtcttagagccagtcttttggatggaagtgggggaacctgtcccatgctactga

SEQ ID NO: 156580 - DNA, 188 bp, Homo sapiens
tcttaccacacactcaggcacaaattcggtgtgctgagaggctggagtccatgtcctgataggtgatggggaataaaggatgaaattgacaaagaaacagtgacacgaggtcacagtaaagctgtggtataggcctttgagggcatgaacagaataagatcaaaaagcaacaggaaacttgaagagag

SEQ ID NO: 156581 - DNA, 350 bp, Homo sapiens
gtcctgtgcattggaggctgttgaacagcatccctggcctccacttagttggtattagtagtacccccatctagttatgacaaccaaaaagtctccagacatggccagatatcccctggggggcaaaatcactgtccttaatgttggggatgtgatgactaatacccattccctgttctctaggatctcacagtcctcggtgaggagagaaccattgcacagttagttacgatacctcatggaagcacactgatggtgctatccatcacagcatattttgggagcaatcagccagggaagtcccctggccgagccttcacggatgagtagggttaaccaaatgaagcata

SEQ ID NO: 156582 - DNA, 616 bp, Homo sapiens
tagccctctctccttcaacagcctggtctgtagaaagagtccatacatggcctccctccactccctcatcttccattcattccttgttccaaggccctcccaacaccactgaaacttttttcaatgccctttttttaaattattattatttttttaaaaagcaaattctgcccccatcttttcattctttcagttgaaccactttttccaaaacactgtgcagatataaaaaatacgtagttaaggccagggtgcagtggctcatgcctgtattcccagcacttcgggagtccaaggcaggcagaacacaggtctggagttcaagaccagcctggtcaacatggtgaaaccccatctctactaaatatacaaaaataagccaggcgtggtggtgggcacctgtaatcccagctactcaggaggctgaggcaggagaatcgcctgaacccagaaggtggaggttgcagtgagccgagatcatgccactgcactccagcctaggcgacagagtaagactctgtctccaaaaaacaaacaaacaaaaatggacaaaggagccaggcgtggtggtgcacacatagagccccagctactcagaggctgaagtaggaggatc

SEQ ID NO: 156583 - DNA, 630 bp, Homo sapiens
cttcatgggtcggagttaggttttcttaatgtcttctgctcctgagtgcattggtacaactgggttggaccagattacaggtctgggtggggttagctgatccattgagtgcagggtctacaaaatgtctcaagcactgatcttaggttttacaataatgatgttacccccaggagcaatttggggaggttcggactcttgaagccagaagccgcatgaccctgaaagtgtaatttctcatcttgtagctaatttgttagtcctgcaaaggcaaactggtccccaggcaagaagggggtctttttgggaaagggctgttatcaattttgtttcagagtcaaaccatgaactgaattccttcccaaagtcagttcggcctatgcccaggaatgaacaaggacagcttaagggttagaagcaaaatagagttggttaagttagatttatttcactgtcataatttcctcagttataattttgcaaaggtggtttcgtgtgtgtgggggagcggggggagagagtaaccaatactccaatttttctaagaggagaatgcattactattttttaattattttctctcttttgctccatttctcccattccgactccccacccggtacggcgact

SEQ ID NO: 156584 - DNA, 497 bp, Homo sapiens
acaaatctatgactcggagatcaggagccaacccttctcttttatttctctcacaatacggggtccaagaattagttcaatagccttgatgaattagattttaacccagggcatcctggatcaaattatatccactgatataaaacttcatgtagtcaatatctgacaaaacatgactgtcttataagtctatgttttctttccctttataactactttataaaggatttctatgatatggtttatttttttgaaaattgtacttggaaaattattgtattattgcattaattttattgtattggtataacatagcataataaagtatccaaacaatatttcaggtaggtacaggataaatgtacccaataatattaataatatgaaaaccattagaggccagtataggtgaaatccagatatcttatttgcccttctagtatatagaaatagcctcacagtatttggtggtcaaagagaatacagtaataattgac

SEQ ID NO: 156585 - DNA, 390 bp, Homo sapiens
caacaaaccggattccagatccactgatgttctaatggaagaggggggtactgctgctgctgtcccaggcataagttagagttgagaatcaaagtgcccttgagcccttatttgatctggtagcttcttcagtttaaacttaaaatcagctagaagggaaaggaaagcttggtatgagagaaatatagtggttagtacacaggcctgcggctttttgaggtatccactaaaagacagtgggtgagtttggcctcaagtctgcgtgcaaaaggatcatacagacttcagttaatccagactctcagccccagctaggatagcacatctggttcaactttacacaccttacttgggagagttatgactttttttttttagcattttattttg

SEQ ID NO: 156586 - DNA, 135 bp, Homo sapiens
tgagtggtaaaatcagtgtgaaaaatagacaatgtttgagaagtatagatgggaggagggggagctggtccagaatggttaaggaaggcttcatgggggttgtgtgatttgaccaaggccttcatgggtgagtag

SEQ ID NO: 156587 - DNA, 490 bp, Homo sapiens
ccctcctagcttcctgaaacaaccttctctatctagagcagattctgcagagaggcccctctttaattcatattctgaaacgtgcttgttattgttgacgtacaaaaacttatgaataattcaataaatgaatcttgaaccatcctatttatcattcagtggtctaggtacccaactctagaggaaagcttttctgaaatacacggtaagtatcccccaaccctccctcaaaggaaccaattatgaacactatacagtcttctctcccttctcactccccatgtcaaagttcattgtgttcctcctgcagctgatttaaaagttgatcttttcaaggagctggattcctaaggtagttctattttgagccttcttcctgttctgaagctaaagttggaagggcttaggtggtgatgtcatggaagggagactgttggtttttataggagggtcttctctggcaactctggggatgctcaaatggggaaaa

SEQ ID NO: 156588 - DNA, 408 bp, Homo sapiens
ccagtagtcccgtttgtagtctcatctttatgccgtttctccttttgttccttaagctatttttaaatgttcttttggtatttcttatgtttcttcttacttttccctttcttaacaacttcaacttttcctagcacccttctccatttacactgtcccccaaaagaaagcatttcctttctaccttcatctcattctgctgtttcttttaaaaatattttaggacactgaaaatgtcagatatactcagtatttattggaaaacttagacacagagatttatcatttgatctgtgcacagtgatctgtgtgtttctctgggtttgttcttctgtaaaaatattaatacatttattccttggatacagttatgactaacatgtatataggatcttatgcgtttattca

SEQ ID NO: 156589 - DNA, 564 bp, Homo sapiens
tggggatccaggaaaataggcacggggatgggcacccaggagggatagggactgcaactctgctgcagggagaggagaatggtccccagcgcctgagtctccccttcctacttgggctaagaggaagttagaagtccaacgtgcctggctcggagtacacattcacacaatcttgtgggattaataaacagatgaaaaagttgggaacaagaatttgaatgccacctatataagtctatgggggaggggtacagtttctcccagaatcgtgagaagaataacggcatgttggggaacattcctaattacatctgcaacaatcagtccaggtgccaaagggtgcagagggaaacatcagcaatcattcctttccttaagaagtcaagggagaagaatatgggcagggcagggccctcaagcctttggcctcatgccaagtaaattgttagcccacatcacctgtctggtatgtttgtccatgcggagaggggttgagaggaggtggttggaagtacattggttccactcttttgaccggaaatgggtatcaattctcatcagtct

SEQ ID NO: 156590 - DNA, 309 bp, Homo sapiens
ctctcaaaaagtctggtccagtcaaggggacaatggtcttaggtaggcccttgtctgcccaactcatactgttaaggacaacctaacagtaccatcccactgcaacaaatcttttgcccatggagcaaaccccaccagaagtttgaacagaacacaggtcatgaattctcatactgccagcctggtagaactccctgccagctctgcaagaagggcaccatcaccaatagagccatcttgcacatctgaagggcccacaatacatagcctctgctatccagaagagaagcaagcaaagatggcacttaa

SEQ ID NO: 156591 - DNA, 386 bp, Homo sapiens
ttggggtgtccacgcagcatgcatggctggtcctagctcggatgttgtctgacagtcacccatgaggaacaggagtccctcccattactcagccaagggcacagagtgattatgcccggggtgtagcaaatgctctgcaaatagtagctgctctgaccatgtgatttgactggcattgcccagatgctgagtggtggtgccaggattggacctgtatccatctcatgcctccacccaggccctccacccggcagcctggccgccttctcctggtcctggtccccttgcccccaggaattgaggcgtgcatggtgcatttccatctcccaaatcatggtcctgtctgtgccctcatctgctcctcttccacaggcctctcagggagg

SEQ ID NO: 156592 - DNA, 486 bp, Homo sapiens
tttctattgatgaagaaactgaggctttgagaatataaggtcacagagcaagtatagttaagtagtgaaggcaggattctgaacatctctgctttaactataaatcctatattctttttcggttttttttcttattttacttctcttttacatgataacaggataaatcctatgttcttaaccactaaattgtattttcgtctttgcctagggaataggtagatgggaagtagtaaggtggaaggaaatagaaatggtgtgccacctggaactctgcctggtggtttgtttgaaatcttggtaatttgcctaggtttctttccaaagtaatttcccctctctgttccatttacccactctgttcctgtattaaaggttatgttaattccatgtaccttaggagtaattatagcagttaagtagaatgactgctgacaggggatgaagtagagttgtgacagagtctaggtggacatgagttaattg

SEQ ID NO: 156593 - DNA, 124 bp, Homo sapiens
tttggttgcaagcaacagaaccatcatggttcattggagattttattctttggtacagaatttaacttaaatgccttgtggatgtacatgaaactgagtcctttatttcagagtcatagcagca

SEQ ID NO: 156594 - DNA, 461 bp, Homo sapiens
tgggaggatcacttgaggtcaggagttcgagaccagcctggccaacatgcgaaaccctgtatctactaaaaatacaaaaattagccgggtgtggcggcatgtgcctataatcccagctactcaggaggctgaggcaggagaattgcttgaacctgggaacctgagaggcggaggttgcagtgagggaagatggtgccactgcactccagcctaggcgacagagcgggactttgtctcaaaacaaaaaaacaaaagattgtgtaggcaccacctcagttgattattctgtgtaatctcatgtctgtagcgtacatgtgactagggcagaaataattcagaataatctcagattaggtcaaaatggaagtctcctgtttaagaatgaggagatgtttatgtggctactacagagttaaccacatgtcattgcaaagacagtgagttttcaagttaaagggtta

SEQ ID NO: 156595 - DNA, 417 bp, Homo sapiens
acatgcacggtactcactaaaaatgaaaactgaagtggaaactaacctgtatggctcagcagcgctggagcaattcttataggattagcttgactgttggtcacagcaatgggtttatcaacaccaaccactgtcctgcagacatctgtttaatatttaagtgccggtgcagcaggggtaggtaacagatgacacagaggacaagcctgcatgtgcctttattttttctattagaagaagcaagaagaggatttcagtcacatgcctgagaattacaattctccatttagtctttggaagccctagactagtacacgcttcctccgcatactgcacactagctcacaataaaagcaactaatagttgataactgaagcattcatattatttactccattccagtattgccagcaagt

SEQ ID NO: 156596 - DNA, 655 bp, Homo sapiens
agaagagattgtgacttgccattttgttttctctgtggcctttgtgtagtgctttgcttatctggaattcaattaagaaataaaaattagtagctcctggcacagaagaaagaaataacatttgggaaatatttgcttcttgagagatgatagttgaaccagagaagtaggtgaagtatttgcagacccccacaatttcttggttgcagatccgccaagcatgggttaaaagtacaggggactagggattggcagttgctagtatgtttattcctaaactgtagggtaagacacacaattgattctcctgcctacctgctatgcctttgtatacttgtttcctccctactctgaactgtaggcctgcactgtccagtatagtaaccactagccacatgtgactacttatgttgaagttaaataaagctaaaagatcagctggatgcggtggtgcacacctgtggtcccagctacttgagatcaattgagtccaggagttcgaggctgcagtgagctatgatcgttatcactgcagtccagcctagacaatggagcaagaccctatctcaaaaacaaagatgaaagcctgtctgtactatccaaatatggtaagtgattatttagtttaattaacttcaacagtcctatgtaggtg

SEQ ID NO: 156597 - DNA, 789 bp, Homo sapiens
agaagagattgtgacttgccattttgttttctctgtggcctttgtgtagtgctttgcttatctggaattcaattaagaaataaaaattagtagctcctggcacagaagaaagaaataacatttgggaaatatttgcttcttgagagatgatagttgaaccagagaagtaggtgaagtatttgcagacccccacaatttcttggttgcagatccgccaagcatgggttaaaagtacaggggactagggattggcagttgctagtatgtttattcctaaactgtagggtaagacacacaattgattctcctgcctacctgctatgcctttgtatacttgtttcctccctactctgaactgtaggcctgcactgtccagtatagtaaccactagccacatgtgactacttatgttgaagttaaataaagctaaaagatcaatctcacagtagcctcatttagccttacttttcagatgctcagcactcttggcaggcggctgctgtaggggacagcacagatggagaaggatgtggtcattgtacaaagttttgttggtcagtgctggtcaagacctatcacgtagctgtagttgtgaatggcatgacaaatctggcatttggatttggtttagaagtttaaaaaaattagacagttcaggtaatgaatgttttagttactaaagttgccagtttattcctgatttaatccagaacttcctgttacagaggctaaggatgtgacctaatattttcttcttactacaggattgcttggttgtgaatattctaa

SEQ ID NO: 156598 - DNA, 446 bp, Homo sapiens
gcctcgaactcctgacctcgtgatccacccacctcggcctcccaaagtgctgggattacaggtgtgagcaactgcacctggcccaatatctatcaatctatatattttaagtggaatgtttaattcatttacattcaaggttaatgttaatacatgaggttttctttctgccatattgctgtttgttttctacttgttttataagttccttggggttattttgttgttgttttttgtttttctttctgtgtgtctctttgtctttgtggtttggtggaaatctgttgtgttgctatttgattgctcgtcctactttgtgtgactgttttacaagacctatgagtttgctactttcatgtgttttgatgatgatgatgaatgttgacctttcatttttgtgtttgggacacctttgagtatttctcataggactcgtttggtggtga

SEQ ID NO: 156599 - DNA, 4778 bp, Homo sapiens
caaatgaggacatctctacaactgtagtatatagaatggaaagtctgggagagaaaagctaaagaaatgggttctagtttcagaatgtttcttcatttaatctttcaaacatctttagcttttttttgcaagttataaatatttatttgaggtattttttgttctcaatcttgggtgctggagccataaagcttttttttccttttaatctttgtataaaggcagtagattaagaagtgcatttgttggtcttaaaaagtatttacaagtacataaatttgctttatttttaaaaatacaaaaaggtaaaatttaaattttttttgatgtaattaaaatgttaactatgtggtcagataatcccattttacaatagtaacagaaaattgtaattcttagttctaaaattcacaaattaaactcataagttttgttgcattttgttttttcttttccatttttaaaactaatgtgatgtctttagtggcaatagaaggtacttctatgctaaatacaaaactaaaaaggcaaaataatgaaccccaaattattttatttaaaatagcagtggattataaaattagcttgtgtttacatttatgccatttttggtgatagattggctttacattttaaaaaatttatttaaaaatttatcaaatgctttaaaatatgactcctactttttttattttgcaactcctctgttctgtcagagttgttatatacaggagtgtcttatgttactaaaacattccagccaaagaatttcagatgtgagataatgatgtttcatcaataaaaagctataatggttagttactcagaaggagaaacagtgagtgtcttcaagtgaattgttcacctaaacaattttattttcatattatccacataactttttctatgttatatttaaatatgaatggcaaattttggtttttagcttttacattttattatcttaattttataaatgctaatatttcttttgtgataagttatagcatctcataaagtttgttctatttgaagttttttagagtacttgagaaatgaatttagtctgcaggtagtaagtatgctactaaaatacgttagatctaaatccttttatttggtataaaaatgcaatattgagaatcaaaacttgtttttaagagaactatagattctacacaacctgatttcaagtaattattcatagtatttatagttgtcttggcaaagtgattgtaaaattctgtaggacctattcacacttcttccttcttccatatacttctctggttttccccatagttcccctataatttcaagtttgttgaaacctgttaattttagtgggggattagaagaaaaacttggtggtttcttagcatgatggtgtatgtatgtggtaatggaaagtctgtaaaagtaaatatagtgtagcaaaaaagatttcactgagtattttagatactagtgcaaataaagatagaaaatcttgatcataatgtcttaagtttgggaactgtgatattaagaaaagaaattcccttctagaggtgctggccaaaaggccttttgggctaacttaagtattaaatttatatatttaaataattatattttaagttgtagaggattttcccaaggattttatgcttacttgaatgttctttgaatgttcagatgcatatcctaactggatgcttctcaaggccttactgcatatttgtgttgcatatttatgttagttgcaccagggccatttgtagtttgggcaaccgaatgccttaattggaaaaaaggcattatggtttcccctatgatctaaattgttacattttaccatttcattccgaagttggttttactttattaaatgaagatttagttttcatatcgtatacatagctgtatagatttcaaaattaggttgttaatttgtgtcacttactatttttgtgttggtaatgctttaaatgcatacttaaaaatgaagtactgttatctaagctactgtgtttagaagatgttaagaatgagcagaaatttttatagaaaagtataaacggaagaagagataagatactgcgaataggccctcaaacttaaaaaagaaaaaactttgccagttttaaggacatattttgattctttcagtattcttaacacctttttaaacaaagttcttgatagtacccactattattgggtttgttttatgccattattgattcttgatattcaagcatttacaatgtagcatatttgattttcttttttctttctttttttggcatcattaacatttcatttgaaatgcatattgttcttgaagtactttgtttttagcataaatgttgtgcattttatcttagtgtttggatgaaaacatttgtgttgtttagctttcatttgctttgtatatttaataatgtacctttattttccagtatgcctacattttgtattgcacaataaatttattttaagctgaaaaaaaaaaaaaaaaaaaaaaaaaaaaaaaaagggccacccaatcagtacttaccaggatatttgttgaccacactcatgagaaaatggatggttggattaatccatggtaggggattgactagttaagaacagaagattagagaggactggagagtattgttggtgaatgtctcacccatagaaccagctttcataggctgctgtgaaaggtcagtctaagaaggactgacatttgggagccactgcgctagagcccatctgctttaagttcttagtccattagttgttccttggagctccagcctccctacatgaactgcttcccctaagaaaaggaaaatatccggccaggcgtggtggctcatgcctgtaatctcagcactttgggaggccgaggctggcggatcacgaggtcaggagattgagaccatcctggctaacagggtgaaaccccttctctactaaaaatacaaaaaaaattagccgggtatggtggcgggcgcctatagtcccagctactccagaggctgaggcaggagaagtgtgaacccgtgaggcggagcttgcagtgagccgagatcatgccgcgccactgcactccagcctgggcgacagagcgagactgtctcaaaatatatatatatatccaagttacatcttacatctttctttttaagaaaatctttatatgtacctccttctgtcgagtgtccttactttcaatgaacttttttgagatataatttatatacagtaaaatgtacctattttaagtttacaattcagcggatgttgacaaatgtacaacccccagtatctgtcaccccagtcattatattgatcctcccaaaaagttctctcatgtccctttgtagtctcttcccccacattgatctactttttgtcactatagatttgttttgtgttctagaatttcatataaatgtttttgtttgtttttttaagagatgaggtctggctgtattgcctagactggtcttgaactcatgagctcaagtagtcctcccaccccagcctctcgagtagctgggactacaggtgcacacaccatgcctggctaatgttttttaatttttttagagatggggtcttgctgtgttgcccagactggtcttaaactcctggcctcaggcagttctcctgcctcagcctcctgagtaattgggactataggtgattatagggactatacttctttcacttggcatgattttgagattcacctgtgttgcatcaattctgttacatttcattgctgagtgctatctcatccatcctattttttcacctttattgccaagtctcctccaaacagaacctgtattatctccactgcttcacctctcatttactcctcaatcactactatttgtttcagcttttattatttccatgagactgctccttgctaagataactcttatttgtcagatttcatggtcactctttggaactatcatttgacttttttgaaggattcacctcagatttgacagttctaaaattaaaatcattatctttcctaaaaaccatttcatcttcccatatttctaatcttggttgatgacacccccagggtacttgtcattcacacgagaaacctggaagactttgactttccttcccttttactcagtcatttctttgctcccttataaataactcccaaatccatgtcccttctccatccctacttccagtgccgccttttgttcaggttcccatttttcccctaccttgtatattttcagaggcttcctaattaatcttgccctcctccatttcagtccattttttcctcattgtgctactatagtggattttctaagctatatctaatcttaatggttctccacttaaaaaatattttctggctggacatgtggctcacacctgtaatcccagcactttggtaagccaagatgggtggatcacttgaggccaggagttcaagaccagccaggccaatatggtgaaacccctgtctctaataaaaatacaagaaattagctaagcacggtgacatgtgcctgtaatcccaggtacttgggaggctgaggcatgagaattgcttgaacccaggaggcggaggttgcagtgagctggaatcacgccactgcactccagagcgagactctgtctcaaaaaaaaaaaaaaaaaaaaccttttctgacttctattgtctgtgagataaattccaaaattcttttcatggcataattcactacttcttaagtcatttgtttaatctattagagactttgcta

SEQ ID NO: 156600 - DNA, 475 bp, Homo sapiens
gcaacagcacgaaactctgtctcaaaaaataaataaataaaatttaaaggccaaccaaggctgtaattatatatcagtaattaaaccaatcagtacttaccaggatatttgttgaccacactcatgagaaaatggatggttggattaatccatggtaggggattgactagttaagaacagaagattagagaggactggagagtattgttggtgaatgtctcacccatagaaccagctttcataggctgctgtgaaaggtcagtctaagaaggactgacatttgggagccactgcgctagagcccatctgctttaagttcttagtccattagttgttccttggagctccagcctccctacatgaactgcttcccctaagaaaaggaaaatatccggccaggcgtggtggctcatgcctgtaatctcagcactttgggaggccgaggctggcggatcacgaggtcaggagattgaga

SEQ ID NO: 156601 - DNA, 312 bp, Homo sapiens
ttcaccgagagctggtcgaggtcctcaggtaaattacgagtataaggggacagctgaaacagagaatctgtagaaccacgtgcttttctatcatttggtcaccataatgacttgaagcaaacgactaatatgagccaagagaaagctggggtagcagtttgctgttagagcctattgttcgcgagagggagtctggctctgttgcccaggctggacttcagtggcccgatcttggctcactataatctccacctcctgggttcaaatgatccttccacctcagcttcccaagtagctaggatttattttttt

SEQ ID NO: 156602 - DNA, 360 bp, Homo sapiens
tcaggctgctctcgatctcctgacctcaggtgatctacctgcctcggcctcccaaagtgctgggattgcaggcgtgagccaccattcctggccttcagtgggttattttcaaacccttgtagaattttaggagctagcagaagggaccatggtggttactgactaggagccagtggttgcttctctttttaccaccaaggacccatctaatgatttttcctctcttttggatcctgtatctgaaatattttggcatgctaatattttattaagtaacaatatttttcaataaaacaaataagtctgtataactgaacacaatgagagttcctgatacacacacatatactagaatgttcc

SEQ ID NO: 156603 - DNA, 401 bp, Homo sapiens
tcgtggacagctgtcttctcactgtaccctcacatggtggaataggtgagggtctctctggggtgtcttttattaggacgctcatcctatccatgaaggctcttccctaatgacctaagcacctcccaaaggtctcacatcctaatgccatcaccatgggggtttaagatttcaacacaggccgggcgtggtggctcactcttgtaatcctagtactctgggaggccaaggtgggaggctcacctgaggtcaggagtttgagaccagcctggccaacatggtgaaactgcgtctgtactaaaaatacaaaaattagctgagcatggtgacgcaggcctgtagttccagctacttgggaggctgctgaggcagaagaatcgcttgaaccggggaggcggagg

SEQ ID NO: 156604 - DNA, 301 bp, Homo sapiens
taaggtgaacctgtatgtcattcagtcctcacttacctccaggcagcccccggggtctgcttgtggatttagctttcatgcccacaggtagggaaatgtcatccttcttgctgtgcttgatagtggtcaggcaagactgtttactacctgctttgattcagcaaaagcaggaaaaagcaataaaattgaataagcactcattgtcaacattttttagtaatttgctttgccatatcaacctgacaggagaggcgtgtgatctgtatttgggggagggagtgtgaagaaagaaaagctattc

SEQ ID NO: 156605 - DNA, 432 bp, Homo sapiens
aactgatgatgctgtggagggggtgctgagaactgaagtctttgaggaggtgagaaggatctgaggtttaagttgaggtgctggcatttcccaggagcatcgtctggtaactctgaagtggagcctaaccgtttagagcaagattacccctggactcaacttctccccttcgccatcccccactggcctccagaggctccactctgctctccttctagccctcttgctaaaagatagctggccaggtgcagtggctcacacctgtcatgccagcactttgggaggccgaggagggaggatcacttgtggacaggagtttgagaccagactgggcaacatagtgtgagacccccatctccacaaaattcaaaacttagccgggcatgatggcatacgctgtagtcccagctactcaggaggctgaggccagag

SEQ ID NO: 156606 - DNA, 432 bp, Homo sapiens
tggcctttaccagtttctccagccacatctttccctatgcttgttttttattccctgtattttagccacagtggcttcctttccttttcttgtatttgacatcttttgtataggactttgtaatgctctttcttctcccttgaaacacttcttcccctctactcttctggatttcaactcttgtagcacttacctagggaaaccttttgtggcctcactctgattgggtccagtccattgtagttctgtgtagtacttttcacagatgtaagttttttgtagttgtatttgataccacttctgttagaccataagcttattgaggggatatattgtgtctttacataactttttgttttcccagtgcctagcatattgtctaatgtgtgtagtaggtgctgaataaatacttttgaatgaataaatgttaaa

SEQ ID NO: 156607 - DNA, 345 bp, Homo sapiens
cccaattccttggataccagctgcttgtataatctatactggttttgttaatgaaaattgttctctgtaggactggttgctacttgaatctttgctcactttgctgtgtagttttcagtattcattattgcaagtactatgttactctgtaaactctccagaaaattgttgctcaatctttgctatttctcttaacaaccaggaatcattttctgtcagtttctagcttgtattgtttgaactgatacttctataattgagtaaaatctgtctgtcttctttagttaatttacctgcctctactgcctagttagtacatgcttcctatccctgccttagaggggg

SEQ ID NO: 156608 - DNA, 450 bp, Homo sapiens
attcataatgaaaaagttgaatggatttagtcccataaaaacatcaacatttgtgatactgaaaaagtactataaataaaagtaaaaccaaatgaaaactgaaattaaaaataaagagctagggctagactacagtggctcatgcctgtaatcccagcattctgggaggccaaggcaggagaattgtttgaggccaggagttcaagaccagcctgggcaatgtagcgagaccctgtctctaaaaataaaaaaataaaaagttgttgtagactagtaagaaaaagaaacacatcaatagaaatataggcaaaggacatgagaaggcattctggccaggcgccatggctcacgcctgtaatcccagcattttgggaggccgaggtggggggatcacttgaggtcaggagtttgagaccagcctggccaatgtggcggtgaaactaaaagtac

SEQ ID NO: 156609 - DNA, 1277 bp, Homo sapiens
ctatgggccgcttgaagttgcttttgctattctctttgctgatgtgaagcagaaaatgaacaaggtaacagttttgatggtgagattagaggtagccaggctgactgtctcctggctcttagagacccttataagctcagggccaccccctccccttgtttagatattacttgctcttttgagtttcagattacaggagcaattggtctgcatgacctatcttaagaactttaactttgcagtagaaacttaaaccaaatgtatatcctcaagagacaaatcatcttaaaactaggctgttgtcattttgatgtactgtactgctcactgaggaacagtgtggtggagagcaccacctagtggatgggacccatacttgatgggctgtgtaggagatttcgtctacattgatgtaactcttgcccttgtcttgcaaataagtgatttttaatcgtcctagcacatatttttaagtagcgctaggaccccaggagaatgagattgggagtagttgtgagatatgtcggttttctttgtagttttcgcacttctataggtgtatgtactggtgcttgacatctccacattcttataagctgatattataattcaaacaaaacttttttttttaaatgtcagtagggtagtatttagtctttgggaattttgtgtttttgagtgcttatgttcaacctcggtagtaagagacggctttggatagaacctgtttgttgccacaaactttatactatgctgctaatctgttcacctcacgagaggaggagttgctgctgattataaactgtaggtcataaattgttacctgcttgtcatagagactatatgccttttgagtgtactaaaatatttgcaaaaattagatgaaacaattccacatttaaaaaaaaaacaacttttaacacatcatgaccacaaattttaggtacagccattccttgatatttattttagaatgtcaaattcttgataaaatgtatcacctcttcgtttgttgaatgttcctagacatttgttgagctaggaactatgccaggctttgggaatccaaagtgaagaagacatagttctttttggacttagaattttttaaagttttaaaattcttcaacacaaaaagagtgagcgtattcctgggatgtgggatgtattatgttggggtataaatacatttttttgcttaatattttctgacatttagcaaatgcttttgaagaaactgctaaataaaattgatgggtttgttttcatgggtttgg

SEQ ID NO: 156610 - DNA, 440 bp, Homo sapiens
gacaagctcggcccaagttatagaaaaaaaagaaaaatatataagtaaataaatagaaactatcaaattattttcaaggataaggaaggactaatcagtagtttagtcagaggcctagatcaaaacataacatgtatttttaaattaatctctttaaatgcatggttaagttacctgtatatgtgctcagtaaaatcggtcatttgtggggaaaaaaatggctatttggttttctatgcataaaattaagatagaagtctttttcctcctaacagccttcatcatagtggatttaaaaaaaccagtgtcacttaggctgtgtcttatttgtttctaaaacaatggaacaagtcagatgtttgtggaatacattttatatttgcaaataaagtaaaaattttttctgcctttttttttctaataaactttgtgtgaagatt

SEQ ID NO: 156611 - DNA, 503 bp, Homo sapiens
caatgtcactgaattatgcatgtagaaatggttaaatggtaaattttgtgttgtgtgtattttaccacagttgaaaaaaaaagtcacttccttcgctccatctcaggcatactaaagtagaatttctagtggtcgggcccagaatcctgcatttaaaaaaaaagaaaaaagcttttcagtttattgttatgcatggtttaagaaccactgatagcactttcggctgggtgcagtggcctgtgatcccagcactttgggaagccgaggcaggaggattacttgagcccaggagttcaagaccagcctgggcaatgtggctaagccccatctctaaaaaaattttaaaaattagctgggcatggtggcacacacctgtagtcccagttacgctagaggccgaggtgggaggacctcttgatcctgggaggagaggggaggcaaaggttgcagtgaaccaagattgcaccactgcactccaacctgggttacagagactctgtctc

SEQ ID NO: 156612 - DNA, 540 bp, Homo sapiens
gaaaccacagtctgatgcccatatattcctatatacaaaattgtacattatacttaatatacagaagtgtatattaaacctaaatgttctaatactatttttacatctacaacataaaaaagaataatgtaggctcaaatatcagataaatctaggttgagattgtggcctcatcatttacttaaagtgtgttcttgggcatattagtaggcattctaagtttcagttccctcttctcttgattatataataattactacatggaattgctatgggagattaatacaaataaagctcatagtactgtggctgtctaactttttagctgtcattattctaacagttattactatcctattctcaactgtttttaaatagtatcttgctgttttttaactttatgtccattttactgttcactcttatgagccacagagtctggaatccaccttggttctctcagaactattgattttctttgttcttgttggaacaattttctgctttagaaaatctgcatcagtcttcttctttacagat

SEQ ID NO: 156613 - DNA, 234 bp, Homo sapiens
tatgcatttcgtacttaatattaatgctgacctcccttcctcatccaagaaaaaaatgaggtgatccatagcatcctacaaaagtcgctagtgactttttggtttgtttttatctttttaatattgttatgaagtcttaaatgtaaacattttgtgtgtttcattccattgaagttatgatcctcattgatccttacattgagtccttttgacatgaccatagaaaattcctcg

SEQ ID NO: 156614 - DNA, 156 bp, Homo sapiens
ttgctagccagtgcaatattttggataatttctttttctttattttgaatgaaagatgaatcaggacttctttattcatgaagggtgaaaagaagtatgtgttcagtatatttatttatttagagagagagtctcgctctgttgaccaggctggag

SEQ ID NO: 156615 - DNA, 467 bp, Homo sapiens
ccaggagtcattctttttatttatttcctcttttaaatctgtaatttaaagtttattttagctataatgcatgcttctctggcatgcttcggagtccattgctaagatattctgttgtgctcatctgtctgatttatggatctatgcgatttctggcactaggacatcatctgagtttgggctatatagcagtgacaaaatgagtagaataactttagaaacaataaaagcaagagaccactgtgattctaagatgaatgctcccattattatttaatgtttgagtgatatattagaatcattcacatttaaatattatttaaaatttaatattatgccaatatttggatgatgaattccagttataatgcaacattgtgtcaaaaagaatatactgccttgataagggctgtcattagggcctataattgtggtttgccaatctgtaacaggccaaatgtttaatt

SEQ ID NO: 156616 - DNA, 281 bp, Homo sapiens
gttgaataaagaacaatctatgccaattaaggaaattggtttctggggctgagtcacatgacaatataaacgacactacttcctagcggcccacaaatcagcccaccagaataaagctcaagcccctccttcctcacatagcaaggtggttttctgcttcttctgcaggtcatttctgaaagctcaggcttgtccttcctttcatgttcttgtttgaaaatccttaattctgttgaattagattcagatgagcagtatcaagagtcactattccctttccc

SEQ ID NO: 156617 - DNA, 496 bp, Homo sapiens
tttatgtgactttccttcatgagtctttccaaaacattcatcttagttttcaaggaaacattcccctttttattctttgcttatgtaataaattttgtaattatcatgacagaattgtacaaacagatttgggaacaagcacaagtgactcttggtaagcatatagcttacctaatggacacagaagcacttagtctgcttgcctggagtgttcaatgcattaaggagggttccacacattttacatggtggaaaaacactaggttccatcattccccttcttcggctaactggtggctgtttatgcctgatttagtgactctagtttcttgttctggccactagatggcatctattttataggaaatgttgaagaatttatattggaaaaaatatctgaaaagactaaattctttctagatggtattttttgtttttttaaccatgtcaattgcgagggaaaagggcaacatcaatgcaatgtttttcttttttt

SEQ ID NO: 156618 - DNA, 400 bp, Homo sapiens
cctaacgagcgcgacagcctctcacctcacctgctgcacccctgcagccaactctcaacactgccacgagaaagacactgttaaaacagaagtcacattccgccactcctctgctcagaatctcccagtggtccctctaggagaagcctatgagacaatcacccctcttcagctgagctggctgccccacgccttgctcctgctgcttcctcaagactgcagccacacgctccccacaccactgcccatgtgcccttccttgtctacaccggccataacacacaagttccgtctgttttgttcactgctacaccccccagaccacagcatggagcaggtaccttgcacttgcaggatgaacagacaaaagtaaaagggtggccaggcacggtggctcaca

SEQ ID NO: 156619 - DNA, 225 bp, Homo sapiens
ttgaaaggaactgaacaatggtagaatctcagcttaattttgtgtcttcagactcccaacctttgagaaatagtgtctaattccttcctttatttagatgaggcgatataaaccaattcctgatgttactgacacttaagtaagtttcaaagaaaaaaataaaaaatacacataattttaccaggcaaatatagacagttttgtcagatgtggtggctcccagca

SEQ ID NO: 156620 - DNA, 236 bp, Homo sapiens
cagggaagccgtcagtgcaccctccagtctgcagctgaaggcctgagagcccctgggaagtcactggtacaagtcccagagtccaaaggccaaagaacctggagtctgctgtccgagggcaggaggtggggaagcaagcatccagcactagaaggaaaaatagagccagaagactcagccagcaaagctatccctcttcttccgcctgctttgttctagctgccctggcagccgac

SEQ ID NO: 156621 - DNA, 412 bp, Homo sapiens
aagacatcttttgtaatatattcagggcatcattgttctattgctataaggttactaagtttccattgcccatgaaggtttgactaaatgggtcaaacctctctactgtgaatttctatttctatgatggttacaaaagtagtcttttagaatacctgttttttgtaactaactttgaaatccaaactaggagtgaaaatagatttttttttcactgcgtccagaaatacttgatagggaaaagaagaaaagagatgatttctaatttttaaagtgatttttgggaagtttgattagttcgtaaatatcttgggttatctagagagttatacataatatctgtaggtgatacagataaatttatttttatttttcttttttaaatttttttctttttttgagacaggatctc

SEQ ID NO: 156622 - DNA, 291 bp, Homo sapiens
attgagaagagtatgaggagaaagggagaaaggggtgaggtgaggggagactagagaatgtgaggagagacaagagagatgacagagagaggcaggagagatggggagaaaccacaagacagagggcaggagtgtagggagaggaggcagggaaaggcagggccacactgacccaatgtccttcagcaggtggatggagaaactaacggcagtacagtcatcagcaaagtcctgctcggcaatgaaaagggacgatctgacacatgcaacaccgtggcttccacatccatc

SEQ ID NO: 156623 - DNA, 378 bp, Homo sapiens
ttataatatgtaactttatggaaaattaagatgaaattttttctaactgaacagttataggaggacaagtaaacttgagtcttactatgaagtctattatgaatactgagttcaaattgtccaagctttaagataggttctgaatgtaattctctgaagtttaggattaaacagtatcatcaaaattgggtgttctggttgagagctttttttgagataatcaaatcttactcctttaagagatgaaacttaaaagtcagaattatttctgaactaattataaattccataacccagctatccaccttgtaaacaaagaattcaatacacaatttttctttttcttgttttcttttcttttttgtgagacagagtctc

SEQ ID NO: 156624 - DNA, 584 bp, Homo sapiens
agacaaatgtatgacagaccagcagaccagccaaacaaactccacaaagaagtaaaaggagatgctcctttcagcacctcttgtgtgccaggcactgcacttcacattctcacatacatgatcacatttaagttttccaactgcgaggtagctattaccatcccattttataattataaaaactgagggcacagaggctcagtgacttgccctaggccattcagtgaagccaatatctaaaccccagatgtttctaaacactatgcttcattctagacagtacacagtcgttggtcaggaaacatgagttcctttgaaaaaggtatgctggagacataaaattacaacaagttaatattacctagaacatacacagctgctgttccagtccctcagctcaccgcagatccaaaacacccagcttcatttccaatttcccctgagcctccatcactgactcatttttctcatgcctttccctaagcacaaaagaaaaaaaaaccagatcaacgggaacaattcccaactcacggtaacagggtagggaaattcccacataacgtgtatctagaggcacaccagac

SEQ ID NO: 156625 - DNA, 342 bp, Homo sapiens
ggttatagttgtcctaaaggtgggaagtggtatcttattgaggtttggtttgcatttatttaatgattaatgatgttgagcatgttttcacatgcttattagccatttgtatatcttctctggagaaatgtgagctctgatccttggcccatttttcaattgggtcatttattttgttattgttgagtgggaagaattctttatatattctggatactggactcttatcagacatatgctttgcaaatatttctttcattctgtgaggtattttttaaactttattgataatgtcctttgttgaaataaaaaataataattttggtaaagttcaatttctct

SEQ ID NO: 156626 - DNA, 377 bp, Homo sapiens
cattgctcgagtctagactcagtacactacacaccagccctcagccctgtactagacatgtgacaccatttagacgagttttatgctagaaaccggttccggttacatttgaacttttccaactccaaggtcaacagaactcagccaatccacgaggaagtagcctgggacttttacctgaatgtccttgatagtctgtttttgtagctgttttaagaacagaggacataagaatgtgttaatctcaaagccgcatgatggtttttgtgttgtgaaaggttagcttttcaattgtaagacttaattacctttcaaatgaatatttcatagagttactttgtcattgaatatacagctacataagtattctcttccct

SEQ ID NO: 156627 - DNA, 281 bp, Homo sapiens
ccatgcactggccccgctgccagctgtgaggctcagcaccgtgggcctttgaccaagctgtcaaatttgttccccagccctagggtagtaactgtggctcacagttctgccacctccctgacacttcacagttctttttaccctttggcacctcatcaactttatacctggttaacaatccttgctattacatcctctgctcaaataactggcatggtttctgtctgttgactgacacacatatttaactcaggaagacaagaaattctgggctatccaga

SEQ ID NO: 156628 - DNA, 487 bp, Homo sapiens
atcaggatgcatatacaaccaaggattctgtgtgtattatataatggtctatactatttcactctcttagtgatatcttttgatgaacagagttattaattttaacatagtccaaatcatcaatcttttaagggtatgaaggtttccttctatgtccggttaaagaaattcttgcccatcaaaaggtcattaagatatttcctgtgactaatacacaaataaatgcccatgtataaagtattaaactatcatattagaagggaatatgcttaaaacatcacttcttgattgccagaaaattgtcttaattatggttaatagttgttttgtttgcactaacatatatagttcatatgttttaccatatgccacaaacattacacaaaataacagaaaatgtctcagctactatgatgcactgaagcttctcactgtcagcatctaagatgcatacatattcacccattttgacacttggcatcctgat

SEQ ID NO: 156629 - DNA, 273 bp, Homo sapiens
tcggatgcaagtgtcttcttcttcctcatcactatcatattagaagggaatatgcttaaaacatcacttcttgattgccagaaaattgtcttaattatggttaatagttgttttgtttgcactaacatatatagttcatatgttttaccatatgccacaaacattacacaaaataacagaaaatgtctcagctactatgatgcactgaagcttctcactgtcagcatctaagatgcatacatattcacccattttgacacttggcatcctgat

SEQ ID NO: 156630 - DNA, 359 bp, Homo sapiens
acaagcaaggaggcttcttttttgttgttgttttgagacagggtcttgctctgtcacccaggctgcggtgcagtggcacagtcacagctcactgcagcctggaactcctcggctcaagtgatcctcctgcctcagcctcccaagtagctgggactacagacatgagctaccaccatggctggctaacttttaattttagtgtagagatggggtctcactctgttgcccaggctgggcttgaactctgggctcaagcgattcttctgtctgggcctcccaaagtgttaggatcacaggcatgagccgtgcccaaccatataagaaggcttcagacaaaggaaggagtgagtcactaacac

SEQ ID NO: 156631 - DNA, 339 bp, Homo sapiens
ttcttctttcacctaggtgttaatcagaaccgcctgtgtgttatttgaagcttcttccttggctgtttccaagaaaggcaattggtctaccctttatagagccctcactactatcagaaccccaggcctactgcagctgaggcccccacccccggatctagcaattcaatgggagaggaggagaaaagctgaggctgaaccgggggttaaaccttttattctgccgtgcacaacgtctggttgcagggcggggggaaggcgccttcgtgggaatgagacttcttggctccaggactgtgagtgacacatagcaggacacagggagctacaggacttctg

SEQ ID NO: 156632 - DNA, 459 bp, Homo sapiens
agccattttcaaaataaggactatttttcagaaaaaaatgggaaacgtccatcctttgaaacatcctgcctcccttctttgctttaaattccacataagctattttgagcttactgctttgatcagatttagctgtaagtaactatacttagtcatagacatctgatctataaatagaatctactagaggaattgctataacttccttgaaattggcaagtagcagttccatttgatgtgattctaggaaagctttatactgaaaagaaaatgcagtaaatttacctacagagaagacatttgctttcaaaattacaatgtctcaagagtaaatttgcacatccatgttttgaagaaagaattgccatttaacagtatcttaaacaaacatgtattaattactcaataatcaccctcaatttggggaagtaaacagtaacagaaaaattatgtttttcc

SEQ ID NO: 156633 - DNA, 147 bp, Homo sapiens
gccaattacagactccacagcctgggtttctagcagagcggttactgctttccagtggttaacctgactctagaggttcttccacttcctatgacctcctaggcagtcctacatgcacctcagactccacagacacctaaaccaaac

SEQ ID NO: 156634 - DNA, 391 bp, Homo sapiens
tgcctggcttttatactctcccagttagtaagaatggtgtctcaatgggacagaatgtgtccggcaggtgaagacgaccccaggtgcatctaccagcccaattttagggtaagtaaggccagctgtggttgccgtctacctgtagccatccccaaggggagggcatgggcccctacgtggagacagttactgtgccaccctagccacatattattggctatttgaagggattggttgcattgctgtgggggtagccaccccacattaagagtttagcttgtgacatgctattatcatgcctttcagtacataagggtgcatgacttactacctgtatctgcactcttgttactcacccttgtccatcgtgtatggaataccccacagctgg

SEQ ID NO: 156635 - DNA, 475 bp, Homo sapiens
tgaattactttccttttatgattttccttttttcccctggatgcatgccattcttgaatgtcacatagaatatgaagggtgcactttacattttccgtcaatgccttctttgaacgcagccttgagctgttaacttgaagcaaggagccctaggccttccttataaacaagtaatggagcccttagccccccttgtaaatggctatttattaacatataccatcaccaaacaacattttataattccaggcccccacaccattacaccactgtctgctccattgtaaattaagggagggctttggccatctgtttcattaaatgccagaggcagcaaacaatatctgaactttataaatcgagagttagggcttctccctccacaaatctcccccttcttcggctgccaccaccactaccgccaccatatttttttgtttgaacgctcacattgtaaactagcgtattcacacat

SEQ ID NO: 156636 - DNA, 170 bp, Homo sapiens
catctctttcatttctgcttaaatttagtagctaaattaatctgtagcaaacttttctatggatttttgcaggtgggaaaatatacataaattcacaatggatggaccttgccttcatagaggttaaaaggaaaatagacatatatgtgattatatatacaacagtaaaa

SEQ ID NO: 156637 - DNA, 147 bp, Homo sapiens
tacagggatgagatagtgcacaaagtattttatgaagagtttagtctgttaccctaatccccccttccccctatttaggcccaccccccagaagtaagcagttttaactgttttggttttagttcttcaggaggcttctaccaaaat

SEQ ID NO: 156638 - DNA, 305 bp, Homo sapiens
tcaatggcttagagatgtatcctgtgtctaagcaaagaaacctccatttttacagggccgtttccatagtaattcttgcatctgacgtttttacatgttttgctgaaattctatgactgaggcctccgctgttctagaagctcatgataatagctccttcaaccacagcctaaacacttaactaagtacaaaggagaccctgatggaagtcactcactctcatcgaaatgcaggtaaccccatggcaggcccctgctcctgtgccatggcacgcatttcccactgccctccctactgatggcatg

SEQ ID NO: 156639 - DNA, 997 bp, Homo sapiens
  misc_feature (997)..(997): n is a, c, g, or t
attatccctcattgccatttagaatgggtggataattagtttggcattaaccttgaatgtgaaagaccctagaaagtccagctccagggggtgctgttatttttcagcatattcttctacagccactttctgacatcttatgtaagggaaactgaaaatcttaaatgattactcatataaataatcttgggggaagatgagatagaaagaattgtagagaatacatcaccttctctaggaaacttatttttcagtagtattaatcaatcatgaaaaatataaaatatggatgcaagacccaaatacatacatggcatacttctttcattattttattttaaaaacactatttaaatgctataacttagtactttctcttttactgacaaagtcacaaagaataattgttaagtacacactacatgtcaagaaatgaaagaaaatatacattttcggtttctagtagatctgatactaaaatttagaaatatacctgggactcaggtgaattagtacaactttaatttcaagtgagtgccttcacattaagtttccattagcctttcacttaatgagtattttcacatacattgtcacatttgatcattcagtgaggtatggggtgaattatatgaaatcgtgatatttgaccattgtggagtcacaaaaagcagcaatttatgtggttgaatatggcattattaaactacttttgggatgcagaaaagtgagggttaagaatgtgattaaaaaatcataagcttcagaacagagtaaataagtttaagatggaaatttatgatttccatattgcactatgatggggcgcaccattggttcctaaaaaggatggatcaataggaggataactggattatggcaaagggggtaagtggttggtgaggcctttccaggaaagggtgtgaatgggcgggtggcagggattataaaaagtggacaaaaagggtgaaattgggttctatatatggtgtatcgn

SEQ ID NO: 156640 - DNA, 513 bp, Homo sapiens
ccggtggggatagagaatctccagaatgagaatccatcagactccaatcagtccctaaattccacaaaggcagaaataggagctttttatttattcaagtaattttgtttctttcactaagcccaaaacatagtttaatcatgtgctgagtcctctgctctgttaaaagccaaaattaaacctctctctccctttcagacagagagctctctccccactaaaaatcatttgacggaaaattccaaacaaagattctgcataagaatttgccattctctatccattcagctctagagaaaataggtttaggacatccttgacaggaaatttgaagttctcatatcccagacctccaatcacacagagaatgatgagaggtatcaaaatgctacaaaataataaagaggctgcagaaacagttgtctgatgaaacagctgccacctgtacatgaactgtctcatacattatgaagaacataggagagcaagaaaatcccctggattaggacataa

SEQ ID NO: 156641 - DNA, 184 bp, Homo sapiens
tgcgcagtccagccttcccttcactttcaaggccttacgtttttgaaaattatagctcagttatgttgtagaatatcctcaatttggatttgtctgatattttaaatgtttagattaaggatatacatctttggttggaatatcacaaaagtgatgctgtgcttttcttgcatcctagtgggaa

SEQ ID NO: 156642 - DNA, 1080 bp, Homo sapiens
aaaacttaccattgttgcaaatattcgtgcatgtatttgattacatgattaatgcctgtctcagctattagacaacatattcttaagagtgcaggggccctctccctctttatggctcaagagtaaatccccagtgcctagcactatacctagtgcacagcagaaactcactatatatttgctgagtgaccaaatgaagcctgcagcagccagcacagatggcagcactccagtgcaagattgtggctttcttggcagacagggtgagtgccggctccctctgctggactcccatggtactttccacaaacagcctgtctgcctcttggcacttagcactgtattatggtactctcaatggataatgagctctcttgtcttctctgcacttagcacaatgtctggcacacagcagatgctccataaatgattactgcgtgaaggattgcctcattctctgctatccccaggaatgaactagtgcctgacccacaaacaaatatacttactactatatgcactcatcatgtgccaggcactacactaagcactttacacttattatctcatttaatgctcacaacgctttataagggaggcatttttttaaagtaatttggtttctttgagacagggtcttgctttgttgcccaggctggactgcagtggtgccatcacagctaactgcagccttaaactcctgggctcaagcaatatccctgcctttctgcctcagccacctaaatagctaggactagaggtgcatgccaccatgcccatctaattttactttttgcagaaatcgggggtggggggcgggtgtctcactatgttgcccaggctagtctccaactcctgacctcaagtgatcctcccaccccagcctcccaaagtgctggaattacaggtgtgaaccatcgcgcccagccctgtgctcaatttttaactaagtgcacaattgttctgtgaaaaacaagcaatgggctatttcttgtagcagactaaggagagacttagtttttctgtcaagcagatggtgagggtaacattgttgggccaacatcagtgtaattactttga

SEQ ID NO: 156643 - DNA, 537 bp, Homo sapiens
gcattttttttcatgctcaaagcatgcttgtgagtattgggagaaatgagtgctattcaggcccttctcggattgatacaaaattgagtttccttcctcaatgatgagtaatggactagaatgtttttcagatggcactaagtcaggtaaggaaacattagaaggtaggatttgaatttaaggagacctttaacaatttagaaacgagaagtcattaaaaacagaaagatgtttaaaatagacaaaaatgggctccatctggcagagacaagtactataacaaaatagctgtgggccctgagtgagcaagaaagtactacaacaaattgtaatatgaggcgggtgtatgtagagaattatgaaacgaaagcctagagagtaatctttccacaaaacttggcattgctgaggttttaattagagtgggaactcagatttcattctcctattttaaggctcatttggagaacctggaaaagatccagctaggagaaggaaaaaaaaaaaaaaagattaactgggtggaaaatgaagtta

SEQ ID NO: 156644 - DNA, 503 bp, Homo sapiens
aagttaatggctcactcaagactctcaacaagttggtgctaacaaagttgattttaaatttaggttcggctaaaccctgagtcccagacttcaaatacaagaatacagcaccagctgaaaaatatcttaactattcttctttaaaactaaaagcagatttcctctacctccccttgcactctcacaccagctcccatgaagacgatcctcatcaccatcttgcttgctaaacttcaatttgaaaaatagttactaattgaccaaaatactatgttgggtactgagaacacagagataaaaggacaccatccatgctccacaagaattgatagtaggctacagaaggtaaaactagcagaaagtaagctataaatgacaccaagtgcaacaacatatttaagctcaagtgcgaacaccagtcaagccacagacacagagcaaaaggaaaaaatctacggctgcaaggctttttacagactggtaagcaattcctgtccagattc

SEQ ID NO: 156645 - DNA, 290 bp, Homo sapiens
tgcccaggttctcttcctgctctcagattctgtgatttctttacagcaaaattcatccttatttattcaaaatgtattaaaacatatattacaggcaaagttttaatcaatgcatcatataaaatttttagcaagacaacatgtatttaaaaagaaaaaactccattttattctcaaaaataaattgtaaagaataaacatttcctctaaaaaattttgaagcaaaattggatcagttcacatccatctcatttggggataatctacataagcaagaaggtcgtgaacat

SEQ ID NO: 156646 - DNA, 483 bp, Homo sapiens
atcatacttttaatcttcaaaatggcagttctgagagttgacactgcaccttcccctcaaggataaggactgtatatcaatgagatatatacctaaattacttaagtatattttggctagtctaaaatgtctagggtaaatatctcaaataacagtagattagtgattctaggccaaatatgtttttaaaacttgagcccaaagtttttaaaacttgagccaacatttagataatggaagaattcacataaaagtcagaagctctaccaacacttgggtacaccttaccacatgattaagtacaactacgactgcccccttgagacaaggcctgagctctgtccagccccgactcacacaggaaaagtgagcccttttcactgggtggcctttcataaacaaggccttcaaggactttaggcctctgagtatgtgactcctagatgcctattgtaagtaacacacaagaaaccaatacaaaaa

SEQ ID NO: 156647 - DNA, 133 bp, Homo sapiens
agctaagtcaaaggagtaagacatttttcaggtcacttttggtttaaattgatagcataactatacctgggaaacagtctgactatgataattgaaagtaaaaaaaaaaattaaaacactgagtcatgcttgg

SEQ ID NO: 156648 - DNA, 320 bp, Homo sapiens
ccaccacacccagctaatttttaaaaaatttgtagagatgggttttcactatgttacccaggctggtcttgaacttctgggctcaagcagtcctcacacattggcctgccaaagtgctaggattacagacatgagccaccacccctggctgattttttcaaaaagttccatggcttttcatttcatatttacatcataatgttttttgagttaaattttggataaagtgaggtttaggtcaggttgttgttgttgttgttttgtttgtgttttttgtttgttttttgagatggagtcttgctctgttgcctaggctggag

SEQ ID NO: 156649 - DNA, 596 bp, Homo sapiens
cacatttgagtccaggcagctgcacactttccttcagcctcacaaggcccagcaactgtgctctcaacaaaggaaaagctcttctgctggtttatatttatgagaagcagagtagaaccctggggggtgaggggggcaatgaaatggagcctttggagctggaactggcccagcttcaggtgaagcctccaagtgggtattctgaagtgaggactgtaacaagagaggccaagaaggctatgttccagttaaggaaaaatcccctctggcacccccaaagcaaagcagtctcccccatcctgctctccccacaattatagaaggcagacagaagagatcaagatgcacatgaatagaaaacagcacttctcatttggattgaggaaattttcagtcttcaaccagtccttcaacatgagcatgaatagataactgagaatcaccaaactttgaaagaactgacaaggctggcacagtgactcacacctgtaatcccataggcagcactttgggaggccgagcaatgcagatcgcttgagttcaggacttcaagaccagtttgggcaacaaagcaagaccctgtctctggcaaaaaa

SEQ ID NO: 156650 - DNA, 540 bp, Homo sapiens
agtgggaggcctcgttgttaaccttatgagctctggagtcaggctcaaattctgacttctgtacttagtagctgtgtgatcctgggcaggctacttaacctctctgtgccttaggcgcctcatctgaaaaatgcgagtaatagtaataaactttactgaggttcgtggtgattaaattaatatttgcaaagtgctcagaactagatcttggcatttgatgaatactgattacccattaattctttttatgatatcctgaccccgtttcttccatacaaagcaggttaacatgcatccgtgcatgttggtatgtgcccagaactgtacacacgcacccattaacaatggctgcctggaagtaggggtaagaaggaagtgtgagtatccatgtccctttgtgatagatttatttgtgaattactgtaacttcctacatcaggcactgacacttgtggacaggtgggtaggtaataggtagtagctatacacacggtcattcagtgaacaagtgctctcatctggaagcgcacacgcctccgg

SEQ ID NO: 156651 - DNA, 724 bp, Homo sapiens
tgaggggagagggcagggggtggggtccacaggtcatatatacacatatgtgtatatacccctcatgtatacacatatgtgtatagacccctcatgtatatacatatgtgcatacaccttatgtataaacatacgtgcatttttctgagaagtgggtccatagctctgttaagattctcagagatctatggcccagaaaggctcaaagtacagcttgaagtcctcttcaactgcacttccgaaagtatgctaggtcagttcatgcttccaatttagaaaccacctgtgtttctagttgtaaaagcgccttctcatggtatacccatctcacataaagggaaaagggggctgcttgaaaaataatcctgtgttcctgaaaaacatctctagccatgcacaaaaagatgagggttattaaatgtaaaataaaacaaaattaagatatagactattgctcaagttttcaagtttttgaacataaaacaaacgaaacatttactaagcacttagcatagtgattgcttacaagagaaattaacttttgttgaggacctactatgtgctaagcactttacatgtgttctcatttaatttcattctccattgaattatatctcactagctctgttttatagattttttaaaaaaccactgagcctcaaataaattatcccccaaaagtcatctagcaagaggatttgaacccaggtctctagacctccaa

SEQ ID NO: 156652 - DNA, 182 bp, Homo sapiens
gagggtgggcggcacccgactgagccaactacatatgaaggtgccagggctcggcccagggcgggaacctggcagggtggcacctcctgggaaggtcctgggtgcttccagccccatctcactgacagagactcagaggctcagaggtgagtggaaacatgatagtccaacagcaaacttgc

SEQ ID NO: 156653 - DNA, 797 bp, Homo sapiens
atatctgcattctcattaaagtcccaggaatcaaacagacttaagtgaaagatgacatactaagtttcttagtgtttcaatctcactttgcttagattaatatttctaataggtcttagaattgttctaatttgtgtgatgatttacttaaatcaacttagcgaaattacagttgagagattcaatttgaaagatgcattctgcagttgattagactgtttatagatctctagaaagatttatatattaacataaacagtcttaattacagaaaggattaattttgttttcattttaagaaggcattgtatcagaatccatacttaaagaaaaaccttgagttagctaaaggaatattagtttattagcaaggtaactaagaattatggaggattaggggttctgaaggtaagaaagatttgtgaatccttatgcatgagttataattattctcatagtcatacagccttctctactagacaggtcttattcttaagagaagtcttttatacatgatacatagtcttaattacagctagcctctacttgtaaaaaagaaaatccttagccgttagctatttactgacttccccgtatttgttatgttcatgcagtgtctacttattctttgtatatgaaaacagcaaaatcttccatgtcagataagcattttacaaaaatgaattttcttgtgtgagataactaggaaataataataatgttaaaagaaggacaaaaaccaagaaatgagttgataaaaatcaactcgagcttttaattttagaacaaaaaaaata

SEQ ID NO: 156654 - DNA, 411 bp, Homo sapiens
agtggccagaaacttagtggcttaaaacaacacactttcattctctcacatttctggaggccaaaagtctgacacaggtctcactaggctaaaactgaggtgtaagcaggcttggttccttcaggaggctccagggagggtctgctttcctgacttttccagcttctaggggtgcccacattccttgactcatggccccatccatcttcaaagtacctcactccaatcactgctacccttcacccatctcctctaatctgaccctcttgccaccacattccaagaacctttgtgatgacattgggcccccttagataatccagaatgatcacctcatctcaggaccgttaacctaatcgcctctgcaaagtcccttttgcgacgttaggttgcatattcacaggctccagg

SEQ ID NO: 156655 - DNA, 327 bp, Homo sapiens
caacatcgaacactccagccctgtctccttttcccacccgccgcgggtcaggcacacacctggcccccgggcctgcagaccctcgcacaaactcctcactcctggtgcggcccctccctgcgccgccctgttcattcctggccctggctaacagtcctggcgatggctgtcactccctctgccagtcgtccgggacccacgctccgcctgcctcaggatggaaattgttagaggtcagggagccctggccggcctgctcacctcgcaaaccccgggcttagagtccgacctgaaccagcagccatccattccgagtgcccccgtacc

SEQ ID NO: 156656 - DNA, 213 bp, Homo sapiens
ccatccttggaggtctggggggtcagattcacagttcaccagtaagattgagcagtttcagagcctggaaccagcacaaccaaaaataccaccaaaacatcttttggactgacactcaattccaggggctcagggagacagcagttgtgataaatgtagtagtagatccattaggcagacctgacctcagcaaggcatgaattaaagacacta

SEQ ID NO: 156657 - DNA, 382 bp, Homo sapiens
cgcccaccttggcctcccaaagagctagaattaccggcatgagccactgtacccagccagctacagtaacattttttgccaattaaatttattcaacatatttagcatctaaaacttgtttgtgtatatagtgttacaagattcaaattaaaataagcaatttttcaagcttaccaagaatttcactgttcagaaaaataatatccttaaattgtggtgtgtctactcaaatctacaaaattgaggaaatatgcaatatgcaaaatgctaaccctctgttcctatcccataacaaacattacattctgtatattaacataatttttttaatcccactaaaaacaagatacaatcactccgtcacctaatgtgctatacacgg

SEQ ID NO: 156658 - DNA, 339 bp, Homo sapiens
tgctgggattacagacgtgagccaccagcgcctggcctgtctgtataacctcagaattactttgtacctcacaaatctcaagtactaagtactgaatctttgttctccccctcaccaagtccttttgaagtcacacagagaaatttcttgaattttttagagaggcgtatagaatattaataactaatgtttattgactggttattctgtgccaggtactttgagtactttatgtaccttatttcacttactgtctaggacaatctagtgagataagtaatatgatctccatttattaaaatattcccattttatacaggaggaaacactcatagattc

SEQ ID NO: 156659 - DNA, 342 bp, Homo sapiens
acaagtagggaggcaaccaggcccttccctgggtcagggaagggagacagaaacatttcaggatattaggattgcaatagtaacgggggtgcacgcaaaggaaagcatgtgcaagcagcttgagatggagaccggctggagagcatcggagaccaaggcgaggccccgtctgtgaggagctacgggggaaggggagagctgaggatggggacacccagagacggcctccgcccagcgcgaggcggcacagagaccaggccgggctccgcgtctgtcacggtagcagtgtggcccttgaccctggggcagtgatcgtcctccacgcctgctcgctgcgtagcg

SEQ ID NO: 156660 - DNA, 395 bp, Homo sapiens
aaacccgtactctcagcagccccttttctccagtcctgtggctattctcatctgctcgcctccaggacactatcctacccccatccctcatcattttcacctcttacctgcagtctggaggagaccctgtctcaaataggcaagaccacagtgagatattatcagcattgtaaacactctaccttctagatttctgcctggaaccttatttttataaaatccagtgacttcagaaagcagtaattgggagggaggtggattttgcttctgaccaagacaaaagctgacagagagcaatggaataatctgtgctgcacaaagttgtccctctcttgtgagagctctacaccagacatgctgaaggaggcatccaggacccctcaagagtctatgac

SEQ ID NO: 156661 - DNA, 534 bp, Homo sapiens
atggcagggcaggggaggaagagaagaacgtggacaagcagtacagcccagcacagactgcatttagatttgcttattccagcagtcagtgctatgtcaactatctgatatgtccacacatctctctatatatttccctctttttcatgtctctgtctctgtctaatgccaatgtcacccagtatccatagagttagggactagatacacagttctactgactgacagttttctaggcagcaacaagtatataaactcttgagaatgtttgtgccatttgactcagtaattccacttctacttatttttttttattttttttatttttttgagatggagtctcactctgttgcccaggctagagtgcagtggtgcaatctcggctcattgcaacctccgcctcccaggttcaagcaattctctgcctcagcctcttgagtagctggtattacaggtgcccttaaccttccctgctaatttttgtatttttagtagagatgggttttcaccatcttggccaggctggtgttgaac

SEQ ID NO: 156662 - DNA, 350 bp, Homo sapiens
tgtaaacctgtggcattcttagcacataaagcctctgtagtttaaaatcaaattgagacaagttgtaaactcatgaaacagttaagctcatgaaagcaagctagttactgtcaacgtgaaaggtttacaactaatccttctggcattcaaaggagtgtcagtgacccttggtggtagtcagggaaggcttcagaggaagatatgactaaggctggactaaggaagtcccaaatggactattcagcaagaagagtaataggaataaggacaagtggagggcagagtgggaggtaaattctcaggccaggtagcaaatgaggaaggttaaaaaaaggggtggggggaaacaa

SEQ ID NO: 156663 - DNA, 385 bp, Homo sapiens
aattattgttccttctggtgaaggggttggtgccatcgtgggtcctaccaggttataaattaatcacagtcaatctagtagccaggaataggttccagccttgaagtcatcttttgttagagtgagacttctggagatgtcaggtccatatcaagatctgacccctgaagcgttgaagcaaatatatgaccagataagtgagtgtggaacattccgaggctgtaaagtttatctcagaactacatcttgaaactgggtagggcagggagaagagcaaatggaaaaagaaaaaaatgttttatttcttatttatttatttttttgagacagagtctcgctctgttgcccaggctggagtgcagtggcaccatcttggcttgctgca

SEQ ID NO: 156664 - DNA, 474 bp, Homo sapiens
caagataaggcttgataacagggaatgaggccagccagaatgtgcacagggatcctgcatagcagtgagcataaggaattcagggatgcaggcattcggggtgggttggaatagtcaggggagaattcctagaggaagtgggtctcaagaggtgggtagggttgggatgaaagaaaaagcaaagagtgttcttggagatgggaataattcagaagtcttggagagtacgcctctctctggagctctgggaaccccaatgatggaggaattctatcatctacccattcattctttcactcattcatttaataaacatatattaaacacttacttcatatttagagtggtgatggccgggtgcggtggctcacacctataatctgcactttggaaggtcgaggtgggcggatcgcttgagcccaggagtttgagaccagcctgggcaacatggtgaaacctcgtctctacaaaaaa

SEQ ID NO: 156665 - DNA, 561 bp, Homo sapiens
gtattctccaacaaaggtctactctgtaggggaaaatatattattagacccctatcctggtttggggagggcatttctcccacttcagctcactctagccttcctgtgtcggtttcagtgggggaaaatgtataccactggagaaaagcccatgaaggtcacagctcagagaaaataggcaaagtaaaaaataaaggtttaatcctaaaattatagactgtatttcattccccataccttactaccataccaacagagctctggtataataacaatgcatttcagctggaagagttgcaagaatggactctttttctgaggaatagtactgagataagctcaaagtcaatggatgagacaaacataaggatactagaggaacttgaagtttctgacatctatagcaaacattaaacacagcttacctcctggccagattaacaaatccacatcatatgtttacctttgttcttattactcaatgcaacatggtgaactttcaacaaaaaaaattagaaggcacacctaaaggcaagaaaaaacagtctgtagagataaagc

SEQ ID NO: 156666 - DNA, 464 bp, Homo sapiens
ctaattggtgttctggttaacaccctccggtttgtatcgtgtaatcagactgcagcttacagttcatctttgagaaatagtctaagagaaattcatgtaaattaaatggttttcttcctaaagcattcagggagagttgttcattttaacgtccacgctgttaacacaggagtctgtgtgcagtcttggatccaacttcaacacctgtgttcatacccgtcacctttgtgtagaggaactcacactagagataatgtgacttgctgtgagctctcctggcctttggtttactgtcctcaggcaactgtggtgtgtgtcaggatctttcacactatcttacactcttaagaaactacagcaaattgcaacaactcccaccctcaacaatgtattggacttgtaattcagaggattgaaagccccctcccttttttccccccatttattcttcagaacaccgtcgt

SEQ ID NO: 156667 - DNA, 1316 bp, Homo sapiens
aaatgtcaaatgtcattgaaactagagtgggtaactaattttttttattaaaaacaatttttattgagccagggtctcactctgtcacccagggtgtagtgcaggggcacgaccctaggtcattgcagcctcagactcctggactcagatgatcctcccatctcagccttttgagtagctgggaccacaggcatccgccatcctgcccagttaatattttttaatttttgtaatgagggggttttgctatgttgcccagggtggtcttgaactcctggcttcaagtgattctccctcctaggcctcccaaagtgctggaattacaggcacgggccaccacgtccagccagagtaactagttttatgtagcaagcaaggtaaaagggagaggtcattttgattctgagtgttttgccttgcatgactgggatgatggttgcacagttaaactggaaatagggaaataaagcatggcaaggaggtacagcaagtttttggtcttggttttggacattcaggttttaggggccattggagtagctgggtggagaggtcacatagtcttctgcacattgagggacttctttgggagagaagtaggctctggagatagggcagtcatttgcctttaagacgattgggacagactagagagcagataaggttgggagggggaaggagaaatagagggcaggaatggatggaatgccaccagggccagggatgtgggcgagcacccaggatgtgtgccaagagagcacatcaggaatggggggatccaaggccatgaggaaatgcatgaggtgtggggatgaggcagaggccgctgataacttttgagtcatcactacagagtcctgtggctaaaatccagtagggaaggggctgagagactcgggggtaacacagcagaagcagctcctgagcagctggatgtttccattacagggacagggtagagtacgagactgagaatgagagtacaagggagagtgtgtctctccgggaggtggaagaggaccaggggctggtttggtagatgggaatctgagcatatgtaggacactgggaagaaaacactggtcagacagtgagaagaccagggaacacttactgagcacttactatgagccaagttctgtccaggcctaaccacacttaatcctcacattgaccctgtgagataggcgctatcatcaccccattttacagatggaaaaagtgaggccccgattggtcgtggaacttgactaaggtcacacaggttgaagtggagtcaggatgtgaactcaaatctgccagcctccagggccagt

SEQ ID NO: 156668 - DNA, 424 bp, Homo sapiens
gggcagaaacccctcatgcaaagtgggaggaacgtcactgcacagcctctggaggcctgtccgtcagcatgcagcaagagtgtacaggcatgtttgccctttgccctggcaatcccacttctagaactctatcccgaaatacaccgacaaaaacaggaaatgttctatccatacagccactcctggcagcactttctgtgacagcaaatgccagggaataaaccatcccagtggctggccagcccacggcagcgcacagtgcagctgcagaggaggccggggtggcccctccagcacaaaatgatgccttttgtgttatcaggggatacaaatgtgtgcctagatttgtgtggatttgccatatgctttcaagatgaaaggaaggataggctgggcacggtggctcacacctgtaattccagca

SEQ ID NO: 156669 - DNA, 367 bp, Homo sapiens
ttcgaacatgtgaccagcattcctgctgatcgactgaaccaggtatggctccacttgatcctctctctggggactgggagttagcattcagaaatgccagctagcctccatcaacagcagactggaaggatcaggcatctcaggaatcatgcaatgtgcatcaaaaaatagagaaagcttatcttcagagagacagacaagtgaagctggctcagaggtcatgtggaccagagggatgggggaagcagttgccttggttcctgacaatcctgcattgaagtcaaactgctgttcctttccctggtttctgtttccttgtaacagacttattcctttgcttgaactgggggcttttagtggggttctg

SEQ ID NO: 156670 - DNA, 531 bp, Homo sapiens
ttctttgctcaggagatagttcctctattagatggtctgcaatgaggtgatggcccaagggcctatcgcccactccatctccccgtcctttgccaccatagcgtaatcaatttagaaaatgaaggaaagagaaagaaccaaacatttcagaagaagtaaatttttcttttggaaaatcaccaaaaagaggaatttttgtgtatttcactgcttaggaataatttcttttccctcaagtcctcaaggttgcctgttagctcttaactgtagccagggacccagttatgcttaatttccagatgccatacactgttcactcatgaactgagacaacattatgggaattaaatcatatctgcagcatacttaaaaaaaaacaaacaaaagaaacctcttcaaaccagtctatttcaaaaagtgatggggttttaatattgtttgcaagaattgcctgcagtttttctctttatttttgggggctgactgaagcagccttcatggagacagaagtcttcattcaggtggtaattt

SEQ ID NO: 156671 - DNA, 124 bp, Homo sapiens
ttttcctcatttgaggggcgataatatcaatcaaccacctctgtgcaatcgcttatgtcaccactgaaaagtcaccccagacacctctgtgttcaaatagtgccacagcatccttaatcaaata

SEQ ID NO: 156672 - DNA, 206 bp, Homo sapiens
acacacacacacaaatggacacccgagcgggcacacccggctccacagacccggggatggacatccaacccggacacaaacacccagagcagctagtcgcgcacgcacatgggcttgggggggacccacacctgggcacacaacccacgcacacacacacctgcacacagcccctccgatgggcgcgcgacagcgcccagacacac

SEQ ID NO: 156673 - DNA, 145 bp, Homo sapiens
aaaaatgagccaaagaagaaacagctaagatcgatgttgtcacatttagatctacaaaatcatcaggtaaaacccacatgacaaaattctcctggccaaacaaaatgtataaaatacgctaatatgcaaacccaaaagctacaga

SEQ ID NO: 156674 - DNA, 592 bp, Homo sapiens
cgtccccaggtcaggctgtcctcctcctgctccagtttggctttcatgtcccacttttccctcaagagatggaaaagcctgtcctttcctcaagcccgcatttccatttatcagaacatggcagggaggggcaggcagaggcaccatggaggacagcaagtcccatcacactcaggaggctcctggcctgtgcagcctccagctatcagcactgtcccttccccatttagccgctgcttctcgggaggccgccccagtgccctgagcctggaggcactgttcatggggccagccccgctgcggggttctcctgccctgcctcttcttcagagccaaaaagaaaaagcacagagggcaaggcccacatggaaatcttacaaaacagctgagggccaagagtcctggaaattccaagcaatcttgtctcaggggaagaggctgagtccctgtcattttaagaaagcctcctgtctgcacatcaaagtctcgtctctatcttgggaccctatcgaccacactgggctgctgtgaatgtaaaaggagggtccagatggaaagaggctttattgacaggacgcggcagttcatgcct

SEQ ID NO: 156675 - DNA, 545 bp, Homo sapiens
aactatcatccatcatggattcttgaaaaagcctttttttttcttggagacagaatctcactccgtcgccgggctggagtgcaggggtacaatccaggctcactgcaacctccacctcccaggttcaagtgattctcctgcctcagcctcccgagtagccgggattacaggcatgcgccaccatgcccagctatttttttgtattttttagtagagacagggcttcaccaggttggccagcctggtcttgaactcccaacctcaggtgatccatctgccttggccttccaacgtgctgggattacaggcatgagccactgcacctggccagatgacattttaaattagtggtgaatggatgggatactgattaaatgatgttggaacatttgactaataattttaaaacataaaccatagagtttgttgttgttgttgtttgaaatgtagtctcgctctgtcacccaggctggagcgcagtggtgcgatctcagctcactgcaacctccgcctcctgcgttcaagtgattttcctgcctcagcct

SEQ ID NO: 156676 - DNA, 386 bp, Homo sapiens
tgaacccactccttgttcaaggaagctcccctgggcttttaatcacttaaataaaacctcttccctgccccagggacttgagagtacaaggtcatagctggcttttcctggcttgtcaggggcgtgatcccggaagatgagattattgcctaagagctggtgggctggaagagctccaggttttgtcctgggggagggacacgccctccagggaccaggaagcaggtgtaatagtatcagtcgcacaagagctggaatcgggtgagggcttggattcagctacccttccctccaagaagccccaggatcgtttcccctctgctgtgtctgtcctccttggagaggggaggcctgtggataggctggcaaggtcaaggcaggctcag

SEQ ID NO: 156677 - DNA, 553 bp, Homo sapiens
ggacttctgaggaaggaggatggtgagacacccaggtgagtggtgccacacacaaacacaaaatgccaagccagggagtgggactggaagggggcggtgaggtggtgggaggcacccacagaggcccttctgcactgtggggtctggtgtgttggaggaagatctgcacttggatgaggagatttggggatcgccagcatccgcgtcattgaagtgatgagcatggacgtgtgacccaggggcttgaacggagttaagaagagcagggccaggagcagacagacctagagagcaagaacattcaggagcaaagcctgaggcaggagggtggtcatcaacacagatgctgcagccaggtggcccagggtcgggcggcatccccaccactcctcccggggatgacttgcacctgaaacagaggtaataaaacacagcagccttgtgaggatgacatgacttaatccgtttaaagggctgagaaagtgctcacatactttagctctttgagggctagaggcccagaaggcatgtgagggagacacggagtgatgct

SEQ ID NO: 156678 - DNA, 409 bp, Homo sapiens
ggacttctgaggaaggaggatggtgagacacccaggtgagtggtgccacacacaaacacaaaatgccaagccagggagtgggactggaagggggcggtgaggtggtgggaggcacccacagaggcccttctgcactgtggggtctggtgtgttggaggaagatctgcacttggatgaggagatttggggatcgccagcatccgcgtcattgaagtgatgagcatggacgtgtgacccaggggcttgaacggagttaagaagagcagggccaggagcagacagacctagagagcaagaacattcaggagcaaagcctgaggcaggagggtggtcatcaacacagatgctgcagccaggagactgaggcaagccaggagacctgagcaagccaggagacctgacagccaga

SEQ ID NO: 156679 - DNA, 518 bp, Homo sapiens
gggtgtggtgagtgttgttcctcgtggtcgtgaagacactcggagcttccctgttctcgggggcaatggctttggacacgctgttcaggatgcccctttcccacgcgcaggcaattataccgtcagagcccatggcccctagacatcatggaggcctcctcaaatcacagagaaccacaaatggcctcgcaggttgttgtagacgccgtgcgcttgtccggggtgggtaaaggctccgaggctcaggtccagggcccgagggggctgtccttccaggtggatgggggtccccagggtctttcagggaagcttgagcccaccccaagagcagcttcctcagagttgtacaggcccacagatttgaggttttaccttggaggagggttacctggcagggtttgctaagtggatgtcagggctcccaggccctcctgcatggcactgcagcatggaggggtctggccaagggttggctccccagcctgcttctgggccttccacacaggtcaggcggccgc

SEQ ID NO: 156680 - DNA, 470 bp, Homo sapiens
ccaggatttgcttatatgttttcttcccaagaaagctataaacagcgagaattttagctgtaagttttcctgtatgccccactcctcccctgccaaaaccagagttaaagaaaagattaactgcccatttttctgtgatcagcggaccttatctatcctcccaattccttatgaacatagttcgttaagttctataagatcctctttttcttgctgtacagctccaaggccacaaaacgagtaagcataagtcgcaatttcagattttctcaaaatctaaggcatgtcacaaaataatttactgcctttgtttcttgctcctgtaacattcttcccgcctcacgtatctcccgccttaaagagtttaaaaggcaatcacccaagctagcagtggcaacccatttgggaccccttccacactgtagaagctttgtactttcactctgctcaataaaacctacagctcaaaa

SEQ ID NO: 156681 - DNA, 627 bp, Homo sapiens
cttcattcttgaagtcggcgagccaagaacccaccaattccggacacaatattgcatgcattaatagaaaggccaaaatgaactgcatttcagggggaaaaatgctgaccctaaaacaaaactaataaccaccatttaaaataaagaattatatgcataagaatgagcagagctgctctgagggaaagctgggagcatccccactccaaaatgaaaatctgaacttttactagttattcaacacttttctgagcactttccttattcacagaataagaggaatcttgggtttcccaaggattcacttcaggcttttcttaattagcaagttgtcctggattataaaaggaattcagtttataaaaactaaatcattcttctaagtttgagcatagatcctcactccttaatgggagactgtgcaaaatgactcccatccaatgagtacagtatggaaaggaagaagaaagaatgacttcgccatagagaaacctgacagcttatgagaaaaacatcaaacaaacccaattgagggacaaaattcctaaccagcactcctcaaaacattcaaggccatcaaaaatatggaaagtctgagaaattggccagccaagagaagcataagga

SEQ ID NO: 156682 - DNA, 644 bp, Homo sapiens
agaagctttgcacaatagatgtgacatgaacaatatcaaaattatcctccagccatctgtcctcagaatcgtgagatgtaattgttgtaggctctagctagcaagcatgattagttcactacgaggaacgtgtccttgtatcctatatccaacaaaagagaatctagttttgtcaatgggataatgactgctcatgggcaggttaaggaacaaaaccaactgtcttccattcactaggcagctttcttcctgtggggtaatcgaatattctgctctctcacctctgcctcccagtgtccatctgcaaccaccctgaaccacatttgagtctgttatccacagttctgagtgaaaagggaatgagttttaggaacagccttccaaaaattgcattttatgctgctggaatatcactgaccataaaggtaaatcgaaatttaccctgctaaagttagtactacaagtgtggttgaagtttgccaccataatgatcacaggtttatattcaacaagtcatacggtgatgtttccattattggcaaatgagatatcctttaagaggacttaattcattaggattttaaatacttctgttttgaatcaaaatcttgctcgttttgaaagtttctagacaacaagaaaga

SEQ ID NO: 156683 - DNA, 408 bp, Homo sapiens
agagaagcctagcaggcatgctaacgctcaaatcaagagctctccagcagagctcatacctcctggagcctgtggatcaatgggaaagccaactagagaagaatccagtcagaaatgagagcactgccaagtaggagtcaggcagtctccgaatacagtgggtctgcagaaaacagagaggcagctgtggttggtgcaactgagaaaggcattctggcaaaggtggccctggagctgggctgggaaccatgtgtgcttggctatctggagaggaggatgggggctttgcggtagggcagaaggctaagcctagtggctggtgtgggttcccaggggtgggagtccagcccaggccaggcaagtaggattggcagggaggggagcctgttgagtggaggctgatggcca

SEQ ID NO: 156684 - DNA, 340 bp, Homo sapiens
ctccacccgacggggagggtgagggaagggcacctgttctcaggactagggcagggctgggtgtgacaggaaatagtcgagggattaaaacaaaacaaaaaaaacacccgacgccagtcacagagccacgagcctctacttccagctactcgggaggctgaggcaggagaattcttgaacccaagaggcagaggttgcagtgagccgagatcacgccgttgcactctagcctgggcgatatagcaagactccatctcacaaaaaaaaagaaaaaaaagaatcatggatgccaagtatgtgctgggcgttcagcacgtgtgacctcaggttatcctcccag

SEQ ID NO: 156685 - DNA, 657 bp, Homo sapiens
ttaaatataaaaaatggccataacctaggcatcttatacgtatctatttaatcaatctttgcagtaacacaatgacacagttttattatccttattttatagatgaaggctcaaggagagtaagaagcttttcttaaatagctatattttatctcaaatatcatatacttcatgttattgtccttattccaccattagagtttggggccattaacattttacgttaaaattacttacgtaggcttggggtttttgttttttattttatagattctaaaattgaactttctaaaataaattttcactttaattataaactatactcctggttcttaaggattgagttctgggaagaatttcagagattgccaccacagctatcacgacctcattcatgaggtgcaagaacatgaaacacatatagcactttcctaggtatttatgactgaaaaaagagaatctttagttgatcttgtaaaattaaatatcaaagcctgcaagccactagtttctggcttttgcatactttgttgcctaccctcacaacaaagaagttgcacctgattgacattttcagtattcaactgatgaccagaaaagtggctatatgctcctacatgtttgataacagaagaaaaatcctagcttcctttcctt

SEQ ID NO: 156686 - DNA, 642 bp, Homo sapiens
gacatttactgagggccgattgtgtgtcagatgctgcgctgtgactctttgtgggattgaaagacacaaggcaagcagtggttcgattcccattgtacctggcaggaaatgaggctctgagaggttcagtcacttacctgagttcactcagctcattaaaggagagctagggttccaacgctggttgatctgactctgaaatgcacgcttttccctatgcaccggaaaaatagaaccatattttaaacagtttttgaaaatagatcaaagggaaaaaaatgcacccctaacttaactatcatgagacaacattgtttagtatctggtgtatttctgtctagtgtttttcccccgtttggtgactgtatatatttattaaacatgtattttacataactataatcataaaagaatatggttttgattgagactttggatgaggtaggagggtctcctgagctggggccaccggggagggattgattcttggcaaaatggaaacctggttttggctctgagccatctttttggtaatgaggtgcctgaaactgcactggagaaggcaaactggctgaatggagaggcaggcgagaccccagtgttctctcctgggtagcttttgctcagttaagtggcagaatt

SEQ ID NO: 156687 - DNA, 353 bp, Homo sapiens
cttcactgctgtatctcccagtgtaaccctagcatccagaagtggcacaaaacccctctgctggctcatgtgtgcaactgagactgtcagagcatggctagctcaggggtccagctctgcagggtgggggctagagaggaagcagggagtatctgcacacaggatgcccgcgctcaggtggttgcggaagtcagtgcccaggccccacacagtcttcaaaggtctggcctccccagcgtggggctcctcgtttgaggggaggtgacttccctcccagcaggctcttggacacagtaagcttccccagccctgcctgagcagcctttcctccttgccctgttccccacctcccg

SEQ ID NO: 156688 - DNA, 138 bp, Homo sapiens
aaaaaacactcaggacacctagtaaaatggctcttgcagtgtctgtcctgtgactagatttataaatgccctcctcagtgaaagcagaggccgaagctatccaatcgtttgaccaaagccttagttagcatattatct

SEQ ID NO: 156689 - DNA, 333 bp, Homo sapiens
ctagctctgtggtagccttggaaacccacagcctcacatctacaatagctgtgaaaaacagcagcctggcagccactggagaggacagaataggtctggagttcccaaaaagcctgacctgtctgggggctcacaggaaggctgcattatcagctcttgtctttacatagcctgacttggttcatgatatagacagccttatagccagccaaggcatttactgaaaatagtgaataaaaattagcaaaggcttatcactgtaacttctgaagacagtattaccaattgggaattaaaaagaggctaactaaaaagcttaaaaggaaaaaatgg

SEQ ID NO: 156690 - DNA, 363 bp, Homo sapiens
ggattgtcattagcttccaatgagaaacaggtgcacaatcaaggtctaaagataaagagggttaagtgcaagacagcagccatgacgtgtcggtccacgtacagcctgtctgcctgagggctcagtgatccaaaaagacactgcaggtcagcacttcagagtgttcgcaacatccgggattacttaaccctgtggcttgacaagcagcagagatttgcaaacaatgatagcttctgtgccacttcagccgaacactggctctgaaaacagcctcagtatctgacaagctctcattcctcggcatgaagatatacttaggctctctcaatggacagccacgccacaagcccaggaatgagagct

SEQ ID NO: 156691 - DNA, 679 bp, Homo sapiens
acagagaagggacccctctcttattttcggagtccaaaataagccattttgggagccacatccaccacttttgtgactcccacacaggttggttcccaggaatcaggtgtcttagtgttaatacgggccaataggacaaaacaggacccttggtccttcacaaaacattaggaatatttgtgtactgaggtaatgtacaatgtctttttgccctgaatagggctcccttagaaactcttttaataatcatttttaaatatcactctggaaccacttttagtaatttgctgaaggaacatcacagtaatatcttaattcttaaatatcttaattcatcccatgtttttcttttagtttttcaaattaactctaagtaattcatactgtacatttccgaaattgaagtacacacagctttaattctctgcagggaggatgcagcaggagagaatatcctgggcacatctttctggagaatcatttttactataagatttgtaagaaacaaatttatttccaaagtaagaaattaaaactctaaaacaaggctagaaagtcatctgcctttaataacccttagtcatctatgcctgatatgtgagactttctccaagataaaaactctcaagaataacctattttccatcattataaatagtaaaaattagaaatcatagaa

SEQ ID NO: 156692 - DNA, 229 bp, Homo sapiens
tactcccccacctccagggtcctcaccattcccctaggtaagcgccacactctggagcaggcaagcagcaggcctggagatggactaagtccctcaaagaccctgggggtcaggaagctgaggctggttgtgtggtaagaacgccccatggcctctgtctgcacttcccagctcaaatctttccaaaacatcaagcattcctttttcccctggagctattaagaaacac

SEQ ID NO: 156693 - DNA, 536 bp, Homo sapiens
tctaaaataacacctgtctactaatatatctggatgacatttaaaatcactaattagcagacttttcatccagtgagaaatttgtctataattaagaaaccaaatacacatgattcaacccagtttacaagaaagatcatttgagaagaaggataagagagaggttagttaactgagggatgtgtactctaggtgatatcttgaccatgacatgccaatcacaatttcagatccataaaagggaaccaatagatcttctatcacagcagaaaatgggtctctgatattgggagacagcattcacttattgaattatgcttcttaactttggagaaagaactggaaaaaaagaggctcaaaatatgtccctgctcaacaattctgggctcggtaactgctacttacagtgctctagtatacagtcgagccttacgacgcgaatcatatcaacagcctggacgacatctcctattcttcacctagcagcaggggtttataagacgtcacaggttcacagtcaaatctgtgcgagtaaa

SEQ ID NO: 156694 - DNA, 876 bp, Homo sapiens
catcagtgtacatttcctcttccccaacaagccctgcgacccccaaaagggaaacctgacctagttcccaccagcttacactgcacccttgtacctcacctaagaaagactacacagggctgagtgtggtggctcacacctgtaatctcagcactttgggaggccgagtggggggatcatttgaggtcaggagttcgagaccagcctggccaatgtggtgaaaccctgtctctaccaaaaatataaaaaaaaaaaaaaaaaaaaattggggggcggctgggcccggaaaagatttttaaaacctttggtgggggggggggccccaggtagggcacgagtagaactgcgggccaatagcgttgcccaaaagaagaaaacccgggggcactggcacaaggtggcggggtgtcctcacaaaaaaaaaaacggccggggggcgcacccggcgggtccgtggaccaactccaaaggcggcttccgagcggccatacaccggacgccaactcaacgggaagtccaagcagcgctcgaaatcaaattaacgcccgcgccgtgagacaccacaaaacacacgaccaacacgacgcacgaaacacaacacaaggcagcaaaagaaaacacaagcgccacaaaacacacacacgcaggagacgaacaaacgacaaacagaccccacgcccgcaaacaccgacgcaagaccgacacaaccccgacaccacacacccaaacacacgccggacaacgaacgcaggcacaccagcgacaagcgacaaacaaaacgccacagcaaacgaccatcgaacgcacggagtgcggtccacagggagcgccaaaaacacagaccaacaaacaacgcaacaaaaagacacaaaagcc

SEQ ID NO: 156695 - DNA, 323 bp, Homo sapiens
ctctgagctttgtcatgtaacacaggcaggtaaattaaatctaagaaaaaccacggagtctgtttacgttctctttgttttgatggcagctgagacctctgctgagcaaatataacgcaaaggaaaatactctgcaaaggagaagcttgttctgaagcagggaagctcagaactcatcctagcaggagcctttgcagtttgagtctgtgctctttcagatcctgcaagtggtctgctattgctgcagactcgactgaacatttgtctttctagaagtcttaaaatacatactgcagcaaatccatccacctacctgcagtctg

SEQ ID NO: 156696 - DNA, 433 bp, Homo sapiens
aagctgtgaattaatgcaagccatcattagtctgtgaaatggtacaaggaaggagaaacagcatggcggcagctccaggagatgtcatcactaggggattcccatcagcaggcagagctccattaataaagacgcatttagagacctgggctctgtgaccaatcggccgttcagagcagcgttcctgcttgtgagctaatcagggctaatctttcatattaaaagtattaaggaacatatgacattaaagcgtcacccagtgccgcggaggattatggctcttattagtggagcaaaatgtaaaacgttttggtttagtaaatctataaggcttgatttattcataagcgcatgcaatgcttgcaaggggcagctgccaaataattattgtttatggtgagaatgtatggaaatcatttaatccagtgacgac

SEQ ID NO: 156697 - DNA, 380 bp, Homo sapiens
caatcccttaggaacctctgaggttttccatttatgagactctcctactactagagtgggccaaagggagagagaatcctatttggagcaatggggaggtaacaggtgacggaggagtgaagcactcagcaaaaagaacagagttcatgaaaccgtaatgggttcctcaccttctagcgttctaccaccatgtgaggctggtgccccaaacccaaacccacaatcattttgttgggagttcctgactcaggcctacagctacatggtcatatcttctgggcaagaaagacagccatgatgggtgaaagtaaagaagtgacagaaggacttaggaatcaagaatttagatggggtaagaggcatgtttccttacagactgc

SEQ ID NO: 156698 - DNA, 96 bp, Homo sapiens
cctgtcaaagctcccaattaaaaataaccagataattctggccacttgattaaaaatggtgggataagcttgtgggggaaagaggaatggaatgaa

SEQ ID NO: 156699 - DNA, 406 bp, Homo sapiens
gcaggtaactgtgcacgaactaaccttggaaaggtcaagagacctggctgtggctcattttcctttcttttcttgggtacttgggctcctaatgaaaatgcttctcattcagaggttccgggaagcctccatccatgagcaactcacatgatttacagaagaattgctatgctgtgtatcttcacgtgggtaacacacttgttcctcacagcccatagggttttgtcattaaactattgagacccatgtgatggtggagtatcaagattgacaggttaatttcccatttatatagaacattatatgaaaattgatttttttaaggcatgggggtggaggatcctgggatgtgtggcgtggtgagagagaagattaagcatttagtgttttcagctacatttaaact

SEQ ID NO: 156700 - DNA, 359 bp, Homo sapiens
gctgagcaggcagggtgcatgagtcaccttaaaagaatgcccccctccacacacacacaccctggatgtgggagaatgggcttccagcgctggagagggctcccccgagtcccccagccgttgaccctgaggtctctcctgctccaccagcccctctcgcttatcttttatccctctcctccctgaacacacacacagacacacacacacacacacacacacacacacacctctcacctctgcctgtaaacccaggggaggagcatccactgtgtgccacagccagctgtgacaatgctgccaagagtgctgaggggccaggggtggcctggtgggagagagggctctccgggtgcagg

SEQ ID NO: 156701 - DNA, 807 bp, Homo sapiens
tggaaacaaagtctcactctgtggcccaggctggagcacaggggcacagtctcggctcactgaaacctctgcctgctaggttcaagtaattctcatgtcccagctacttgagaggctagtacagggagtcgctatgttttaagccagcccattcagttttggtaaagctccatcataacattttccatcatactgacctaatacctagctatattaagctggctcacgccctgccttctgggactacaggcacccaccaccacacctggctaattttttgtatttttagtagagacggggtttcactgtgttagccaggatggcctcgatctcctgacctcgtgatcctcccacctcagcccccaaagtgctgggattacaggcgtgagccactgcgcctggcccatcagggttctttaagtatgatacaaacccactgcatgcacagcgtctgcctgagtccctccacagtgccccctgtatttggacaccaagtagaagtgactgaacatgaaacttaatgctgttaactatcccataaataattaagtcctttgtctcagaccgaggagttttgtatcttcttccagcatctgtaaaaatgtgcaggccaacttgttaacttgtaagttgggtgaaatctcagatctttcacagttcttaaaagcattgtgataaatctccacttgtaaaaatcatttagcatattaaattacagcagtgaacaataagaatgtagtacaatgctttctcaaaaagctaaaaacaaatagatcagctattattgacaagaaagaaactgtcctt

SEQ ID NO: 156702 - DNA, 380 bp, Homo sapiens
caaacagagtcacactttgtacacacctgtgcacacacgtgcacacacagaggccagtagggaggataagaggggcctgaatgtgaccggcgggcctttgttaggggagtcggaggaagacacacatcagagaccatcacctcctggtgtataaggggaacagggattagaagaaacccaggatatctctgtatggagaaaggatggaaaatccacagccatcaggaggggcaggacacggcgctcggtaacgcttgggagagacctgggccctacgtagctgactagcatctcacctgtagcccctccaagggcctctggttgcaactggaagctgaggccgaaaccccttcccactgtccagttacaatcaggcagtc

SEQ ID NO: 156703 - DNA, 721 bp, Homo sapiens
cttgtgcagttaatttgatttaagtttcagcaactgaggcacaatatataccagatatagaagttatcctccaaaattagctcctctaagtttctcctacttttcacatgattcccagatattcttttctttaagtccaagtgatttcccaattatttccatggctatggctacaaaggctttaggccataggaatagaggaatttattcttactaaattcatcttattagatttgattaatcttcccaacttgtcaactgtgggatcttgtttctgtcattctctatgtatttctttattcattgatagcaaaggcactatatatcttaaataccaagaagaatttatatagctttctttttgaaaaattgtttaaagtatctagttcaagatccccaatctaggtgaacttcatggaacatttaattgacatggagataattaggggatgttctgaagagttaccaaagagaactcctaaagagaaactagatggttgagattatttatggaggaagaacagatgaaagtaaaattctgctattaagaatactatctgggtaaagaaatgctttctgctttctttggtggaaatagataagagtgagcagacttatattcattcattgaaattcagataaattcataaccaaagttttattatatatatactgataaggtgaagagttcaacactaatctagtttgaactccatagata

SEQ ID NO: 156704 - DNA, 395 bp, Homo sapiens
tagtaaaacctactctttaaacagttaagacatgatactcatatccttgattttaatttgcatcatgtagaatttgctgagcatctactataggttccattctccaaaatcacagggttcaagagtgttgcagaatgttaaattctgagaacatttttaaaggaaaagtagtgtggtacacctatattgaaacactaaaaggatatgaagtagcaaccctaattgaacaaattactatttcctactacgtaaaattaacaattacaaatactctcacatctgttcactttacgctttgtcaccaaatcagttaaattatgaagatttttcattttcatagcgttcagatttttggaaaagcagttaagtgaacagatgtgagagtctccaagcct

SEQ ID NO: 156705 - DNA, 637 bp, Homo sapiens
tgaggatcccccaaggtccttagcccaaggctgccctgtagcagactaaaatctagttacttgggcatactaacaatttagatggctcttgagcggtttgcttgagcctgctcctgctatgtggagtgtactttcatttcaataaatctgtgcttttggtgcttcaagaaacaaaaaatgaaggctgggtgcatggtggctcacacctgtaatcccagcattttgggaggctgaggcaggcagatcacttgagatcaggagtttgagaccagcctggacaacatggtgaaaccccatctctactaaaaatgcaaaaattagccaggtgtggtggtgggcacctgtaatcctagatatttagagggctgaggcaggagaattgcacgaacccgggaggtggagctggcagtgagctgagattgtgccattgcactccagcctgggtgacagcgagactctgtctcaaaacaaacaaaccagagagattagatttgaacctcagcgtgtccacctccctggaatgtggccagaggaggttaaccaggacagtgacaatactgggcaccaagtgacaaggacccagttacagaagtaggtggagagtgaccagcctgtaaagagaagacggcttgttcct

SEQ ID NO: 156706 - DNA, 443 bp, Homo sapiens
gccactggcaggggtgctgcgtctgcgacgcgaaggcaaaggagcaaaggcagcctcatcgcgggcgctgggacccacatgctgtgggaaaccatttggaagctcaagtaaagaaaggtgaaaagtgaaacatacaatgtagcatagacattacacttcaaacaggtaacaatgaaaacactgaacaggagacagggacaaactaaacacgtaggaagaggtgattaccaagcacagagacccaagtttagaaacgccccagtcctctggcccttgtcttgacaccaccacgcgctgggagaggaaagtgcctaagacaagcacactgcctctgaggaccgtctgtgatgcctcactcatgcacagctctcccaggacgctcgccgggaccagagcacacagacatccgtgcaggtccccacacccagagcagaagtcgcggc

SEQ ID NO: 156707 - DNA, 374 bp, Homo sapiens
tatgttgaacttttaaagccacactcactgccctctccctctcctctgtccttagctcctggcaaccacacttgtgtctctctgttttgataattttgttatttcaagaatgttttataaatggtactagatagtatacaactttttgagattgatttcattttctcaacataattttctgaagagtcatcaaggttgttgcatgtatcaatatactaacatgcatgtattaacagcttattccttttcattgttgagtagtattccatgttttggacatagcaaggcttgtttaaacattcactaatttaaaaatatcttatttgtttcccatttgaggctgttatgaataaagctacaattaagatttgtgt

SEQ ID NO: 156708 - DNA, 612 bp, Homo sapiens
tatttggctagctaattctttgttttagggactttcctgtgcatcacacattgtttagcagcaaacctggtctctttccactagataccttaacacctctgcctacattatgacaaccaaatgtgtctccagacattgccaaacgttctcttaagaacagattcactgcctgttcagaaccagtgatctacacaatagtttttaatatctaccttattttccattatgtgaatacacagtcatttatttaattaactacctgtctatgtctctttagatttttctccagcttttttcattacaactaatatgtatcatcacattcttttatacatcttcgagcacattttataattatttcttttggacagagtctcagaaatggcctttcgtggttaagttcttatgcagagatttgcttacctgtattaatgcccttgattttcacaagtctacaggacaccatgagaatgcactttgccctacagcctcactaatatgtggtacatcatcaaccttttaaatgtgacaactaaatacctgtaaaatgacagtatcttattgtttagaaacatctctttagtaaagttacgtatcttttggcaggtgatg

SEQ ID NO: 156709 - DNA, 547 bp, Homo sapiens
tatttggctagctaattctttgttttagggactttcctgtgcatcacacattgtttagcagcaaacctggtctctttccactagataccttaacacctctgcctacattatgacaaccaaatgtgtctccagacattgccaaacgttctcttaagaacagattcactcagaacctacgggaacaaaccaaactctctcagaacctacgggaacaaaccaaactctctcagaacctacgggaacaaaccaaactctctcagaacctacgggaacaaaccaaactctctcagaacctacgggaacaaaccaaactctctcagaacctacgggaacaaaccaaactctctcagaacctacgggaacaaaccaaactctctcagaacctacgggaacaaaccaaactctctcagaacctacgggaacaaactaaactctctcagaacctacgggaacaaacgaaactccctcagaacctacacacacacacaaatccacacacataaacatagtgcacacacatgcacacatacacaaacagacacaccct

SEQ ID NO: 156710 - DNA, 241 bp, Homo sapiens
aaaaaaaagatgtagacagcaatgagtcagtggcacaaaaagaattgaaaggccttttcttctttaggcttgatgccccatcctaccctgccactcccttagaattactgtggacagccagagcactgcaaaaaagggaaatttgtcatttgccttggggaacaatggctttcaccaatcaagaggcaaaatcaaccacagtctcagagcctggagtaagatggaaaaatcttcctgttgt

SEQ ID NO: 156711 - DNA, 590 bp, Homo sapiens
gggtgtcagaggatcccgggttccttgtctcttccagtattcttatgctaagaaaatatttcttctatttaagatacagtagctgttcccttgtattttctcataggggttcttgttttattttgtttgatatttaactcttaaattcacctgcgttttattttcttatgtattatgagataaggctttaatttgatcttttttttccagaatgaaacaaattgctcaacagcagttattaaacaatcttttcggtttcaaactctaactgcagcccacagctgaaatattttatatcacaacccagcatgcacacactacatttcatcaattctgctgtgaacattttttcatgttttggtatcttaaattaggatgtgtcttataagcaatgatactgaagcactctgggaggctgaggtgggtggattgccgctcaaagtgctggtattacaagcctggccaacaatccctgtgcacagaaaatgcaaattagctgtgtccagttaaatgcaattgacctttgcactagagatagagcagtttttgcaaattcatttcagcattcgtcttccgttttttttttttgg

SEQ ID NO: 156712 - DNA, 87 bp, Homo sapiens
ttcctggctcgggaaagatgcttttgattctgggccagctttgattgcgccctccccttggttcagtgtcccgtggcgccttcaggt

SEQ ID NO: 156713 - DNA, 429 bp, Homo sapiens
ctcccttccctatgtgtctcctgggctgaaacttgcggcgcactgggacagggatggtgctttccttaggcccatttagggaggggactggttcccagcctggcacaggtcctcagctctgccttgattgccttagagtgagatggatcagtcagtgctctgaaggtaaatgtaagagactgtccctgctgtgtgcgaggctggtctagggatggaggacttaacaggtcctcccaatctgtcaggcctggacagcactgtcctgtctcaggacttcctcagatcctgcagagggcacagcctcctagcccaggaggggcagccccttggtggagcctgagctctccatggtcctggagcatcacctgccagccctgtgctccattttttcccaggtcccacatttccagtgtcagccagcagggaggc

SEQ ID NO: 156714 - DNA, 547 bp, Homo sapiens
acacagtgaatgaagcaactttattcctcacatatcggcagcaagggacagtagaagcctgggcttcatggagttcatccaaggctcaggaaagctacctagtgtggaatctcatctgtgtgtggcccatgttgcactgtagctgagggttctggaaaagcagcctgtcctgggctttatccttcatgaatttgagttactgggcttaaagtattgtaggacatcttgttctagaaagaataggaacaggtcccaggctgttctggtcagttcctccttatctcaggaagttaaattttgaaggggacaaataaacaaaccttagcacaaactaataggataattatggtcctcatatagattatttctaggttacttttactaacctggtctaatagagttaattaaaattaatttcattgggtcatttaaacaaaattcaaaatacagtgatgatggaaataggaatttattttggtctgttacctaattttagcatatttgattataaactatgactagaagatgtgtatgatacaaagaagaa

SEQ ID NO: 156715 - DNA, 636 bp, Homo sapiens
aggcacccggggccagagacatatgggccataccccttaaccccgggatgcaaggtagcatgggtccaagagacatggaagagagagccatgaagcattaaaatgcatggtgttgagaagaatcaggagagggatacaagagaggagatggggtcccggcacccatctgtatcatcagtgcctctttgaaggtgggaaacattagtgaaaattctgttggtgccacgctttgatgagcatttgtttgaccccagtttcttcttacacttcttaccccagcctacccttcctgcatttctcttctcagctcttccatgatggattcccccccctttcctaaagccatcatgccttgataaatatatatgatcattgaaatactttttaacaaaaaacagattctatattattatatatatatatatatatataaagatatatagagatgcattcacaggggttggctgggaggaggaagaccattctgtgaccaaaataccttggtcattttttttatattgccttatttccctatggctgagccttgttgtgacacatcaagcttttctgtagatgttgtcttggcttcccaccagcttaagcgttcatatgctctgcttttagttcatatataca

SEQ ID NO: 156716 - DNA, 434 bp, Homo sapiens
cactggggatcactttctgcagcactttgtgggccatggtgacaactctggctttactccagtgagccgtgggaaggtcctgagagaggtgtgacatgagctgacttaacacagctacctgtgtcacccagggggaaagtgaggcacagaaagagtggctgacctatcagaaccacacaactagagagcgagaccacccccaaaaggccccaggtgtgtctggcaccaaggtccatgtgctttccatttctgcaccttgtccctgggagacaccccggtcctgccagaatgtgtcagaggctgagccaacccgtgaggtcaaccctgtagacagctcaaggaaccaggacttggatctggcttttgccctctgctgtccacaaaactgggtgatgctctttccgcaactggtacggcgggtttataggatgcta

SEQ ID NO: 156717 - DNA, 338 bp, Homo sapiens
accccgaattgggtctgcactcgaggcatggataatgcgaatcactactattctaaacccactaacaaactacatagcctatccattcctcatgctttccatatgaggtataatcataaccagctctatctgcttccgtcccccgacagatggacttgtttccttgagtttcctaagtactttatgtaacactcttactccactggaaacacatcgtctaataaactttaagtgtctttatccactctgtcttccccgagcaggctagcttttcctcgagggcagcggctccatcctgctcctctctgggaaagcttccagaacgaggcaagcccaaa

SEQ ID NO: 156718 - DNA, 207 bp, Homo sapiens
  misc_feature (142)..(142): n is a, c, g, or t
  misc_feature (145)..(145): n is a, c, g, or t
  misc_feature (149)..(149): n is a, c, g, or t
  misc_feature (163)..(163): n is a, c, g, or t
  misc_feature (165)..(165): n is a, c, g, or t
  misc_feature (172)..(172): n is a, c, g, or t
  misc_feature (174)..(174): n is a, c, g, or t
  misc_feature (188)..(188): n is a, c, g, or t
tctgtctggttgttcaaaattcctcccttcctacaaaatacttaagttacaaccaaaactgtagttaatataaaaacttgagccaaaaagtgatgggagtcaattctgttgtttttttttttttggataaagaaaaaaaaanttnatcntttttttggggggntnttctgcntngggggaagttgggntttccacatccaccaaagg

SEQ ID NO: 156719 - DNA, 430 bp, Homo sapiens
ttagtagagacggggtttcaccatcctggccaggctggtcttgaactcctgacctcatgatccacctgcctcggccccctaaagggctgggattacaggcatgagccactgcgcccagcataaataaaaaaaatttaaactattatataatttaggattttcaggaatgaaggttgattctttataaaccaaatttgattttgtgaggttttgcagaatttaattttacttggctaaatatgactcattatatggtcacagttttttcagtgattaatttggtaagaaatattttgttttccttcttggcattatcatgagttatggcttcctgtacacattcctgccattttagctgtgtactttttctttgaagctgccatatgttaacaacccaagagagatggtatttactggagagatcatcact

SEQ ID NO: 156720 - DNA, 575 bp, Homo sapiens
gtccctgcacagttggatggcttgatgaagaaacgcaagaaatctaagcttcacagttccccacatagttccccagttcctgaaagcctttcagcttgctcatgagatgaaatccaatgcctagtattgaatgagatagcccaggaatagaatctagaaagatacaaacatcctgtagaaaactgatagcaaatgctcaggcttcaagagaaaagggtccagagccgcactaacatcaaagaattttactgtgaaaacatggcttcttggccgctccacagccagtctatctgaggtgctggtgcgactttaaaacatattttggggctggacatggtggctcgcgcctgtaatcctagcactctgggaggccaaggcaggtggattgcttgagcccaggaattcaagaagagcatgggcaacatggtgagacccagtctctacaaacaaagctcacacctgtaatcccagcactttgggaggctgaggcgggcggatcacaaggtcaggagatggagaccatcctggctaacacggtgaaaccccgtctctactaaaaatacaaaaaattagcc

SEQ ID NO: 156721 - DNA, 406 bp, Homo sapiens
  misc_feature (5)..(5): n is a, c, g, or t
aatgnttgcgttgtgaccaaagtcatcagatggacctgcctgactgtgcgtttgctgggagatgcctgactgtgtgctcgtcagaggctgcctgactgtgcgtttgctgggagatgcctgactgtgtgctcgtcagaggctgcctgactgtgcgtttgctgggagatgcctgactgtgtgctcgtcagaggctgcctgactgtgcgttcgtcgggggctgcctgactgtgcgtttgctgggagatgcctgactgtgtgttcgtcgggggctgcctgactgtgcgtttgctgggagatgcctgactgtgtgttcgtcgagggctgcctgactgtgtgttcgtcgggggctgcctgactgcgtttgctgggagatgcctgactgtgtgttcgtcgagggctgcctgac

SEQ ID NO: 156722 - DNA, 452 bp, Homo sapiens
taaaaaggacagtcctccctgggtctttggacctgcgtccctgaaggctcctgtgtcacctaaaactttgattaaatacgtctgtcatgcttttctcttgtgaacttgtctctcgttataggagtgtcagctgtgaccctttcaatgggtgaggaaacagaccatacctttgtgcgcctacacaaacatgatctcattcacatgataattgtcataatcattattcatgaggatgatgatggtattatggactgaactgtgtctccccgaattcctgtgttggtaaagtcctaaccctcaggacctcagaatgtgactgcatttggatgcagggccttaagagaggtcatcaagttaaaacaagaccgttagggtggatccaatccaatctgcctggtgtccttatgggaagaaatcaggacccggatgcacacagatgacccgtgatgatg

SEQ ID NO: 156723 - DNA, 625 bp, Homo sapiens
aaactcaagagtgggggagaatcctacctttaagccaataatttagaaaatgcattgtatatatagaacaaatttaaaagttgaagggtttatttcagtatgtatagtaaaagtagggcctgaataaagaccatgtaggtgcaccaacagcttcactttttaaagaagcaaagcattgtcatggaaaacaagtagtggagacagtggaagaaccctaattcagaaaatagggtcttattcaacgtagtattggaagttctggccggggcaatcaggcaagaggaagaaataaagggtattcaaataggaagaatggaagtcaaattgtctgtgtttgcagatgacatgattgtatatttatttagaatacccgatcgtctcagccccaaatctccttaagctgataagcagcttcagcaaagtctcaggatacaaaatcaatgtgcaaaaatcacaggcattcctatacaccaataatagacaatcagatagccaaatcatgagagaactcccattcacaattgctacaaagagaataaaacacctaggtatacaacttataagggatgtgaaggacctcttcaaggagaactacaaaccactgctcaaggaagtaagagaggac

SEQ ID NO: 156724 - DNA, 520 bp, Homo sapiens
caatcactggcttcactgttgggtggtatggctgtgtcattttattgagaaatcacttgatacatttccttgttttgttttctgaagctggtcatgcttaccagaggtgtcttactctcctccctaaaggataagaaaaggtggtcagtttctgatcccagtggaaaaagaagttgagggatctcaaaaagtaaactgtttattttcatcactgtgcctattcagtccaacagctcttttctaacttgcttaagagagtacatctccagttttctgccagggttcaggagtcaattgccagcagtatagaggatctggaggtttaactaattgttaagcgactttgaatcgatcttttgacctgtttcatctatgtttctacaggtatttggactgccaattcctaaatctttgcggggagtcagggtgttctgtggtgtaatctgtgatatccacactgctgacagctggcagaatattgtttttttccttccttctttcctttttttttttttttttt

SEQ ID NO: 156725 - DNA, 632 bp, Homo sapiens
ctcatgtctcgaatcgttatggtgactaggataggaagtcccacagatagaggagtcctaatgcaggaagaattctgatactgagaattggtcagctaaacaagaaaaaacatgaagcattttctcagagtagttatctctggtttctccaggaacagtggataagaaacaaatatacatggccatataagcatctatagaaaaataaacattactttcatattgtgtagagattcttcaacagagcttccaggatacttagagggttcaaaaatgggcctgaggagctagggagaatgacgaaaccctatcagttacatgtaaatctatgtgtagatagatgcatgtgtcttcttggtgaagggggtctcaagaattcatcagattatcaaagcaggacaagacgtagaagctatgaaattctaacagttgaaaacctttcttggccatgcagctcctttgattaacatatgttaccagtgaaaagtcactccatgtttgaatacagccatcggctggaactgttactgaaacaccaggggttcggtctaggtccggctgctcgctgcacagaaagccaatcactgagatcacaagcatcgccaaggaaggctttaatcgggtgctgcagt

SEQ ID NO: 156726 - DNA, 439 bp, Homo sapiens
gtaaaactcctaataatgacacagtttgagacttgagagaaaggagcaaagcagtctttcttatcatgtctgccactgcctcaaccaggaaccactgttgtcagttctgtggcaagagtcagggaaactctcgtaaaaatccatttacacataattatgtgagttgaaaaaatagttcggtgaatctattgttatgtagtattcttttttaaaactatatatcttgaatctgttttcatgttagcaaatattgaaatacttgctttcttagttctgtttgcaaacatttcatgcttaataagaatttatattatgctgttcagcatgcttattattaaatattttattctgagatataatgctatgattatttctgatttttaatcttttgatttaactaataaactaaagtggtgttctaattatgaaccattgctgt

SEQ ID NO: 156727 - DNA, 707 bp, Homo sapiens
tttctaccaaattagcaaatactcatgggtactcaatttacccaagtaggttctcagtttctagaatttggtcttccagtgcttactacattgataactctttgaggccttttaagaggatgttttaaactattcagtgttttgagttgtccttattgggcacgttggtcctaatttcttagtgtgccattactagaagtggaagttccccattctgactttgatacaagaagattggttgccctattatgtctgttgctgtttgtttgaggaagatacttttgtgacacctttttctgcccatttccctttttgatactcctttttcctatataagaactatatttatttgatttggaaaggggtaaatataatcatcttatcattcctcctggcagaggtagccgttgaggagtaaggcttttttgatgagtagaacactggtgatttgacagaaaagaataatacttctggccaatattttccattaatttttctgttaccatcttaaaagcatcagagtttaaggagataattttctatttcgacccttccattgaggtcactttttttacgaagtctaatctctgcaattatgacatcacattttattgtagagcaaagcattgtactttcagagggcaaatatcatttaagtgatagaactgatttttcccccaaaataaacacagctcaagaaaaagcag

SEQ ID NO: 156728 - DNA, 199 bp, Homo sapiens
gaagccctcctattccatgtcagtatatcaagatacaacctggcatgaagatggggtgcaggaggggctgtcctttgcctaataggtgctggctaattgggtacattcttcctcctcctccacctggacctagacttactgagagaataaaccacaaggagaggactgggtgcagtggctcatgcctgtaatcccagca

SEQ ID NO: 156729 - DNA, 384 bp, Homo sapiens
cacgccagccttttctaatttatttggagaagaaagtgtcctgcagtatttgccagtctggattttgctgactgcaacccctcttccaaaaatggagtaacttaacatgcctccttttcagtggtatttcctataagttggtagttcaatcttgaggcttcatcaagcatattttataggtgttctgtgtgcttccatcaggaacaacatattatctgctgtttttctgtttgtgatattaatagctattgatgaccattgcctagatccattaattcattgagggactgcaaaatggtgatattccaattctgtcagtctttcttgacatttcagttagactactttcataaaaagaagctctccttcacctctgtttggtaa

SEQ ID NO: 156730 - DNA, 429 bp, Homo sapiens
atttacctggtgtgatgtggattcaggaggccaggatccctggcccaaccagcccgcccaccgtgggggcatttatttgcctgctgacattgccaggcctggccgctgatctgatcgctggtggctgctttccaggtagtcggtctcagtcaatttttccttctcaaactcacctgatcagctgaattacctgggccccccaaccccattgttaaaaatctcatttgcaggccccatccagaccctactgagcgaatcccaaagtgtgtggctgtgggactctggtttgatgaaatgagcacttcatgtggctgaaagggatgggcaggttggacacactgaatccgcagtgcagagggaaggaatgctcacatcccagctcccaaaattacctttgagcccctccacagctggggttggtgtggacaa

SEQ ID NO: 156731 - DNA, 262 bp, Homo sapiens
ctgtggcttccatctggccaccctctcttattcagggaagccagctgccatgttatgagctagaaagacccacatggtatagaaatgatgtctccaaccaacatatagcaaagaatctgaggcctgctaacagccatgtgagtgatctgagaaacagatccttcccagtaatgcctttagatgactgttgccctagccaacaccttgattaacaacagccttatgagagaccttgagccagaggcacccagctaagcttaca

SEQ ID NO: 156732 - DNA, 241 bp, Homo sapiens
ggtgcgtgtgcggtggggtggcttcaatggggaggaggtgacatctgagcaaggaccagagggaggagaggtcctgagttgtcagcacggggctggctgaggaccactgcagagggcagtgggggcatgaacagtaggagggcaggggaacagggcctgagtgcactggcgcttactcacgggaagccactagagggtggttcccccatttttcttttcttttttttttttgagatggatt

SEQ ID NO: 156733 - DNA, 513 bp, Homo sapiens
tctgcctagagtgcaaggaaagtcctcagcagcctcagggccatgtcataatcagagactcatcatgtttaaatgactcaagcctttctcagtgtgagatgaccacatgcatctcattttcccctcacaaaagcccagggaagccagttgtactgctccagtcccaggctctgagaggtttagctcttctctccaaagtcctgagatggagggcaggagggaaggcatcccaggcagggttacaggtaagcaaaggcagagaaggaagatgttcacatggtatattttgaagacagcaattggcccagttggctgaagagagactcctcatgttggcaggcaaaaggaattaagaataatatgactgaagtttacggagctcatagtgtgcaagatgcaagctgaccaatcctgtgcttacttcctgtacaatccttccatgcacaccccatcctcatttcccagtctattctgctcagagcaaccaggtagctccacatacaatgggaaaca

SEQ ID NO: 156734 - DNA, 341 bp, Homo sapiens
cagctgacacgccaggcgatggcacgatttcctccaggaacgtttctctgtaatgtgactgattacaatatagctggctgcaggagaagccgcggcgctccagccggctgagggtgagccaacacaacccagagataatgaataatggtttgtggcaaaactgataatgcgcccactattatattgactggggctgcggcttcagttaatcgtgctaaattgctaggctggagctgtgttccgccgggcttggccgctgccttcctcttttgaaaatttccatttgtctgaagttgggttcttgtcttttcctcctgcccttctattcaaatgagctggct

SEQ ID NO: 156735 - DNA, 384 bp, Homo sapiens
ataagtgaagggtgagacagaaaacaaaatgctggctgtttgtcaaatcctgaaagtaggggggctgaaatcatttttgaaggaggatgtcattcaggagaccttgtacatcttagagtgtcctcttaccagatgaagtggaggatgaggttgaattagggagttaggtgacagtgggcacatacttctctgcctcagttttttttttaaatctgtaaaaatggggatgataacactcaggattttttggtgaggactgtagttacctggaaagcccttaggatagtgcccggtgcatagtgagtgctgcatcagtgtgagctattataattatgggaataggcaaaggtgccaccctggccatccagagtggagaggtatttt

SEQ ID NO: 156736 - DNA, 211 bp, Homo sapiens
tcctaagtagtaggaatagtcaatgcattgtttatgaaaaatgacaagccaggaaaaaggagaggaaagaacaatgagtttccagctccactattaacttcttgctagacaagacagactgcagttacctcatctataaagaaaaaaatttaacaattcttacctacctcataagaatattgagagaattatatgagttaatatatatgta

SEQ ID NO: 156737 - DNA, 454 bp, Homo sapiens
ccagtgatgaaactggcacagaggttagatgaccttatcaggggtgatggctgagataacaggcaaggccactccagagcttgtactgttgtgtactaagttatactgcccttatttgagtactttgtagatgattggagagcatcggtaagtaccacatacctcatgtttatgcctgcttttaggtctttcaccaagaaagcaaaattattttctggaaagagccaaggacttgttttctaatcctgtctctgccactacctggtgaactgacctggggcaagtaatttcatctgtgggccttctgttttttaatttctaaaatgaagaggttgggctggatgaccgcttgatttggctaatttattttccaagttctttaactgtatactaaagctgcatattaaatattcacagtatacactcatgttaggctcagggaagtcctatagta

SEQ ID NO: 156738 - DNA, 970 bp, Homo sapiens
gattttagttgtacttaggaagaataagaaaaagtatctcttcccataagtggaagtcccctatatgggaaatttttaaatcagtcctctgcttaaaagccacagcctctgcaccaaccctacacttgctcaatcctgaaaatgagtgtttccttacattttgtaccctgggcccttcgcatgtgttatccagcccatatctcaacataacatctttccagcctcatctccctctccattatcccacaccccatgtattttcatgcctgtgacctggttagatggccctccctgtccctcgcctcctctatctgctgaaacaccaatcctgcaagacttcaataaaatgccatgtccttataaaaccttcactgatttccacctctctccctcccgtgttaattgctcctctccctatgtatccatgccctttgtttgtgcctatatggaaatttgaattgttgactaggtgtagtggttcatgcctgtaatcccagcactttggaagggtagggcaagaggattggattgagctcaggagtttgagatcagccttggcaatatggtgagaccccatctctacaaaaaattttaaaaatgaaagtgaaaataaattagccaggtgtggtagcagatgtctgtagtccctacttgggttcagagggatataaccctaaataagcttagtcatcattaaggagctaggccctgtggaccctccccatgggggtgactacttcatctctcggtttccctctatttctgtggttacctgattgctgtttgatagtctgtgggcttgtgcatttaaagtttgctttttcaaggtgtctgtgagctctgtgggggcaggagctctgcaaccctaggtatcagagaacctagaacctattaggtgctggcacatgttatgatcaatgactgaaatctgaattttgtcagtctggtactcactttttctgactgagcc

SEQ ID NO: 156739 - DNA, 693 bp, Homo sapiens
taatgggaccaagagtcaccttaggaattatgcagcacagagatgcctgatataaagaggccaatatagaatgcataatagggccaagcccctaagactctcccagaaatcagtttctagattctacagatgatgctttccatctgctttacagttgccaaagcaaatcacgtttattctaaaaacagataagggcttgctcacaccaatcaaaagcaggtttttatctactattagtaggctgcctcttcagcagagactatcgtgttccccagccaggctaactggcattaaaccacttataagtacccactaacaagctaggtaccctggggaaactggacacaaacaaagcatgggccctgttccttagcatcttgcaatgtggatggcgagaaaagatgcacatatttggagatgacttgagatggcagtgcagtcacactggcaggaaagccaggcttgtgacgcaggtctgtgagtgccggaagcactgggcagagtcagccagcgccctgcaaatccaaccaacagaacaaaactagccagcagaggcttaagaggctgagaagctgagctgtttgtcttaggttggtagcccagggtgaatacagctatctctggccaggcatgtagcacagcacagagttgatgagatctagtccaagagctactctgcttgggttcaattcc

SEQ ID NO: 156740 - DNA, 290 bp, Homo sapiens
caccccttcttctttccctgttgcatccagccggttactttcccttgccctgcccaaatgcccacttcgaggccctcttcttcttttcctaggctggctgaaaactaagttttcaaaatacaaaatgaaaagtaagatttgattgctgtagaggaaatgtccaacagctcttgtatttaaacttaagtagccccattgggactcccaatttcatatcttgagttctagaggtgctcctgccgtatagttctgaaactttctgcacaaattcagtggatcctgtgtttttt

SEQ ID NO: 156741 - DNA, 211 bp, Homo sapiens
cttttcatatgactctcatcctcatgatcacaagaaggttgctccctctctgtcctcacatctgtattccaggaaaagcaaggagaaagatgaggaaatggtctgaggactcctcaacccatgtttccttgcccagagctctgtcacatagacatctttagctctgagattggcaagatacatacattgccacactcccaataaagttggg

SEQ ID NO: 156742 - DNA, 181 bp, Homo sapiens
tgctgggattacaggcatgagccaccacgcctggtcaatcttcctcttcttatgaggttataaggtaaccaatcctatcggattaggaccctaccctatgacctcttttaaccttaatgattatcacctaaaagccgaatctacaaatgcagtcacattggggattacaacttcaacatag

SEQ ID NO: 156743 - DNA, 369 bp, Homo sapiens
gttaaggcactgtatgtactaagagaataaaaaatgtattgctctattccttcgaggagcctataattgaatggggaatatagatatatcaaactatacattgtaattttatgataggattattaagcattatgggagcaaaggagagagtagttaattctgatggatcattgaattggcctttgaggaataagagttttctaggaattgaagaggggagaaagtcatctcctttctttccctccccattcttctttaaggtactgaaaaatcagattcaggacagtgtttattaagacagatatatttgtgggcaaataaagagtaaattggaatgagagattaattaggctactacagttgtttaaa

SEQ ID NO: 156744 - DNA, 234 bp, Homo sapiens
  misc_feature (187)..(187): n is a, c, g, or t
cctaggggatccttattaaaaatgcacattggccaggtgtagtggctcacgtctataatcccagttctttgggcagctgaggctgaaggattgcttgagctcaggattttgagaccagcctgggcgatacagcaagattccattgcaaaaaagaaaaaaagaaaaagatttttaatacaggatcccnctagggggtatcctactaagagtcgacgctgcacgtgcatgcgatgc

SEQ ID NO: 156745 - DNA, 144 bp, Homo sapiens
cctgggcgacagagcgagactccgtctcaaaaaaaaaaaagttttatcggaacacagccatgctcattcctgtatgtactgtcagtggctgctttcacgtgactgaagcggaactgacagtgtaacatgcaaaacaggtaagaa

SEQ ID NO: 156746 - DNA, 243 bp, Homo sapiens
ttttgggattacaggcatgagccaccatgctcagccattgaagtcattcttgtacatcctcattgtcatcatccctatctattaatctacaaacactgttaatatcacttttacattatccatgaactctgttgctgtctcagtatttccactgccattgtctttgttcaggctgttctaatcccttgctgaaaatagtgtcctaagatcttccttcaacacccctcccctgtttttttacag

SEQ ID NO: 156747 - DNA, 443 bp, Homo sapiens
tgtcaattcacaaagaagatgcaacaatcctaaatgtgtgtatacctaataacagaactttaaaatatatgcagcaaaattgacagaactaaagaagaaaatacacatatacagaatcatagttggggatttgaacacaccactcttggtaaatgataagatatgaacaaaaaaatcggaaagaatatagaagatttgaacacagtcaacaaaattgacataattaatgtaatacaatgttacactcagttgcagaatacctttttgtttttaaacacttcctggaatgtttacaaagatgcaccattttgtggaccattaaattttctgaccacattggattaaattagaaggtagtaacaataggatgtgaaaaagcttgaacaatttctaaataacccatagatcaaaaagaaatgacaagggaaattaagaagttgttt

SEQ ID NO: 156748 - DNA, 184 bp, Homo sapiens
aaatgttagctgctgttgtctgtatacctacagatatttgcatgcaggattctatcatctatatttttcttaaaggattgctgggaatctgaaaagcatttttgaggaagatgtccagtgaaatggatggtgaaaggatgttgaatatagttcataaatcattggcactcaataatttccagaa

SEQ ID NO: 156749 - DNA, 423 bp, Homo sapiens
tcactcagagtgacactactttgtggggagattctcacgcccttccacaatgccagggcaacgggatcccgtagcccagcccccttctctagctggtgctttttcatcattcagatctgggtcttggtttgaattttcagtcctcctgagctggcagttgtgttttagagaaccacagcatctcattttcatcagcacatccgagtgatgtgaaggtctcagaaaagctgccaggcccccagcctaaccttcaaaagcaacaactctgaggcaggcagggttgagggaaggtctttattccagacagagacagcagggtccttctccattagggcttgatctccccaggagggaccccgctcctaaccaccagctgcttgcacactcccaccaccgcacctgccccttcctctcctgccctct

SEQ ID NO: 156750 - DNA, 560 bp, Homo sapiens
tagtgatttagcagttaatagctatgtctggtagaaggtaggctatagcaagagcttgtggcaactttgcttctaactgatgtagttgcagcttattgctccactgcaggcagcgttgaatttcagcatggaaagcacgttcttgaggcctctttgcttttcctcagtcaaggctgtatccagggttgatatctagcctatatgccatatgtgtatggctagtgtttgttctgattggttggtgctcacactgcccagattgttaaatattttgaaaatcgtatctggttctattcatctgcattctctgatcttatgtctggctctatttatccctattctctgatcttatgtcagacctgaagttcctctaatttttctgtggtgtatttatagggaaaaattgcctttttttcttctaatgctcttaagcaacttcatataaaaaagttcctggaaacattaaatttttcttttactattacaggccattatacagtattttaagtctacttagtgatctaaaaggtttcaaacatttatgaataaactaaagaaat

SEQ ID NO: 156751 - DNA, 250 bp, Homo sapiens
ggacatgtcataatttaaattatgtcttagtctataatgatgtatttgaacatgagtatatcttaaaggaaaacgccaagagtttttgtctgatagagggctttaaaatactggctttaaaaaataaataaaaaattaaacatgggcttttaataaaatgaatcaacttaaaaattatctggctgggtgtggtggtgtaggtcaataatcccaaaacttgggaggctgaggcagcagaatcactcggcca

SEQ ID NO: 156752 - DNA, 430 bp, Homo sapiens
ctatataaagacaaccaaaatgttaacaaccaaatatcaattcgtggtggatattttgaaagaaaagcattgatatttaaaatgttattttgatattggaatataaattaaaaagatgagaaatatttgtaaaccatttcagattaatttattatttattcttattttcaagaatcccataccaatagcaatatataattacatgttctttttgtttgatttgccacactttgtcaaatagtaacttaaaatagcagacagttatttaaaaacacgtttaacagatggaaagatcacctaggcgtgcaagaagtcatcaatatgtgattcatcagtttgccttcagattattttcttacactgagagatttaaataatttccaaaccactgaaaaataggcagaggcagcaattttggaaaagcatgaat

SEQ ID NO: 156753 - DNA, 865 bp, Homo sapiens
tgtggcccccttcatgtgaggtcccacaccagacaccacagaccgatgggaaagatgctagaatggtgggcactttgtagggcatgtctggggcatgggagacactgtccatctccatctggatggtagttacacgggtagagggctattgccgtggactttcattatgtgtctccccaaatcccagtgttgaaaccctcacccacaatgtgactgtacttggagacagggccttgatgaaactaattaaggttaaacgaggtcaacaggtgaagtcctgacccaataggattgatgtcctcatctctcaccaccatgtaagatagtggccgttggtgagccaggaagagagctcccactggagcccgatgctgccaccccttgatctgccacaccttgatctgccaccccttggtccaggggacttctagcctccagaatggtgagacataaaagtctgatgtgtaagctgcccaggctgtggcctctgttgttgcagccccaacagactaatgcatgtgagactgtgtcgcactgtatacttcagatgagtatattttaccatatggaggttattccttcttttaaggaagcagggggcagctacagaaggaaataatttcatttctgataggaccttctagtgtctattttttatagagtcaagtcaaatgattcctcattcaccacctgccactgggccaggaattccaccaccttggaccagtctgctgctcttgcatggtgcctgcgtccctcccaggcaatgacacacccgctgcgctcatccatgtgggctgctgagccgcgccacgccaccgcaggcacaccagatggttttgagagggcttctatttttcctccc

SEQ ID NO: 156754 - DNA, 247 bp, Homo sapiens
atgagccgagattgtgccactgcactccagcctgggcaacagagggagactctgtcttaaaaaaaaaaaaaatgaggattttgagatgggggatcatactggatcatctgggtggtaccaatgtaatcacaggggtccttataagtgaaagaggaaggcaggagaaaagagttgtaaaaggagatgtgactgtggaagcaggggttggagtgataagaccactggttggaagggggaccttgagcca

SEQ ID NO: 156755 - DNA, 273 bp, Homo sapiens
gtataaacatttattggaaaggaaaaaacatttttgttggaaagtttggtaattattgtggcttaggatatgttctattttgaaagattgctatatccagtatatttctgcccttttatgattgaagatgtacgtctgaaaatacctatgttagttctagccggttgttctttttgcgctgggaagtctttgaattttgcactgtagctgctattttcagatcctgtctctgaaactttgtctctcagttttagcttgaagtagccatttcct

SEQ ID NO: 156756 - DNA, 617 bp, Homo sapiens
gcaattaatcatgtaaataaaaccaaaagtatgccatagcataaaaggagtctttaagaaaggctaagaaaatatgacagagcacaagatgtctgatttatattgttgaggtgttccctagagtctccgttacttctttgttttgttttgtttcctactgaatttcatgcccagtgaactttttgtaagtttctatcgcctctacttctgtttacttcctacagatcctttttattttctgttgcttttaaaaattacaaattaatcggaagaatagaatcaccaacatcagaaagaattggagattggaagacacttgagtctggaggaaagagaaagactttaagactcactgcttaggagcaatctttaaactagtttatttatttattcataaagttgtatacatttatggggtacaagtgcaatgttattacttagctattttgagtagtggtaaagtccagcttttcactatatccatcactcaaataatgtatgttacacttaccaggcaatttctcatcatccaccctcttcctcccttctcactcttccaagtcttcaatatctttcattctacactcattccacatgtctttcaaagtcacgatgat

SEQ ID NO: 156757 - DNA, 462 bp, Homo sapiens
aaatgaccaaccagaagacacatgactccagagcccaaacagaggtacacaaatggatattcattaaaaccatgggtgacagtgcagatccggggtggtaagaaggacagatgaagctgggagagttgattatccctatgggcaaagagaaaattggaccccaacttcacaccatgaaaaaaaaagaatcacctcctggtggctaaatggggaagacaaaacttcaaaattatttagaagaaattaaggagaaagatctttatggcttcaacatggtgaatttcttaaaacacaaaagttttccaactttaaagacaaatactgataagcttcactacattaacattaagaacttctttttatcaaaaaggccccataaagagagtgaaaaaataagccacacactggaagataaatttgcaattttggaactgacaaagaatttctccaaaaagctgaaaa

SEQ ID NO: 156758 - DNA, 2687 bp, Homo sapiens
ccaaaagagaaacaattaaagaatgaagaattagttattttctctttccatgaaaacaattgtaaaatacaggaatttcatgttgatggtaaagaattgatcccttttacagaaatgaccaatgcttcagagaagaaatcatctccctttaaagatcttatgactgtacctgaatcaagagatgaggagatgagtaatagtaccagtgtgatttattctaacttgacaagagaacaggcccctgacatcagtcctaaatctgacaccttaacggattctcagatagacagagaccttcacaaattatctttactagctcaagccagtgttattacgttcccatccgattcacctcagaactcatcgcagctgcaaaggaaagtaaaagaagataaaagatgtttcacagctaaccaaaataatgttggagatacctcccgtggacaggttattattatttcagattctgatgatgatgatgatgaaagaatcctgagtcttgagaaactcactaaacaggacaaaatatgccttgagagggaacatccagagcagcacgtttcaacagttaatagtaaggaggaaaagaatccagtaaaggaagaaaagacagagactctttttcagtttgaggaatctgattctcagtgttttgagtttgaaagttcatctgaagtgttttcagtttggcaagatcatccagacgataataattcagttcaagatggtgagaaaaaatgtttggctcctatagccaatactacaaatggtcagggttgtacagattatgtatctgaagttgttaaaaaaggagcagagggcattgaagaacacacaagaccacggagtatttctgttgaagaattttgtgaaattgaagtaaaaaagcctaagagaaaacgatctgaaaaaccaatggctgaagatcctgtgaggccttcatcttctgtcagaaatgagggccagtctgatactaataagagagatcttgtgggaaatgattttaaaagtattgatagaaggacttcaactcccaattcacgtattcagagagccactacggtttcacaaaagaagtcttcaaagctttgtacttgtacagaacccatcaggaaagttccagtttctaagacccctaagaaaactcattcagatgccaaaaaaggacagaatagaagttcaaattacctaagttgtagaacaactcctgctatagtgccgccaaagaaatttcgtcagtgtcctgagccaacttcaacagctgagaaacttggcctgaaaaagggtcctcgtaaggcatatgagttgtcccagcggtctttggattatgtagctcaattacgtgatcatggcaaaactgttggagtagttgatacccgaaaaaagactaaattaatttctcctcagaacctgtctgtcagaaataataagaaacttctgactagtcaagaacttcagatgcaaaggcagatcagacccaaatcacaaaaaaatagacgaagactttctgattgtgaaagtacagatgttaaaagagcagggtcacatacagcacagaattctgacatatttgtaccagaatctgataggtcagattataattgtacaggaggaactgaggtacttgccaacagtaacagaaaacagttaataaaatgcatgccttctgaaccagaaaccataaaagcaaaacatgggtctccagcaactgatgatgcttgccctttgaaccagtgtgattctgtagtgttaaatggaacagtaccaacaaatgaagtaattgtctccacttcagaagaccctctgggtggaggtgatccaacagcacgtcatatagagatggcagctttgaaagaaggagagcctgactccagcagtgatgcagaggaagataacttatttttaacccaaaatgatcctgaagatatggatttatgttcacaaatggagaatgacaattataaactcattgaactaattcatggaaaagatacagttgaggttgaagaagattctgtaagtcggcctcagttggaatctttgagtggcacaaagtgtaagtacaaagattgtcttgaaaccacaaaaaaccagggtgaatactgcccaaaacactctgaagtgaaagcagcagatgaagatgtatttcgtaaacctggcttgcctcctcctgcatctaaacctttgagacctaccactaagatttttagctcaaagagtacttcacgaattgctggtctttctaaatctttggaaacttcttcagcactttcaccgtctctaaaaaataagtcaaaggggatacagtcgattttgaaagtaccacagccagttcccctcatagctcagaagccagttggtgaaatgaagaattcgtgcaatgttcttcatcctcagtctccgaataattccaacaggcaaggttgcaaagttccatttggtgaaagcaaatattttccatcttcctctccagtaaacattcttttgtcatcacagtctgtctctgacaccttcgttaaagaggtcttaaaatggaaatatgaaatgtttttgaactttggtcagtgtgggccccctgcaagtctttgtcagtccatctcaagacctgtgcctgtcagatttcacaattatggagattattttaatgtttttttccctttgatggtattgaatacttttgaaacagt

SEQ ID NO: 156759 - DNA, 1625 bp, Homo sapiens
tccggaagacagatgaatacctggagaaggccctggagtacctgcgccagatattccggctcagcgaagcgcagcttaggcagttcacactcgccttgggcatcacccaggatgagaatggaaaacagcagctccccgactgcgtcgtgggtgagaacggactcatccttacgcccctggggcggtaccagttcgcaggacagatggcggctctgtgttcccgggatgacttcctcggcagcttctgtcgctaccacctcacagaacctgggtggccggccacacccgcggccccaggctcagcctgcgcttcctgggcagttaccggacgctggtctcgctgctgctggccttcttcgtggcctctctgttctgcgtcgggcccctcccatgcatgctgctgctcaccctgggctacgtcctctacgcctctgccatgatactgctgaccgagcgggggaagctgcaccagccctgaaggtggcagctgccttcagagcaggctggagggatttgccacacagccccacccttgggctgagaggacctgggaagcccctccaggagggaacacggtcatcctcaggcttctggagcggggttcctgcagccgcagaggcatctggaggaaacacaaccaagaaaggaaggcagttgggccccagcaaaggagtggctaccagggctcaacagccacgctctgtgacagcgcagagctcagcgccggcctttccctccctctgccaaggactcatggccaagccagctctcggggccttttttccagtgcccatttggctactctgctgcaccaagcttgggagccagcctgccaagagccgcctgggcctggcctccccactggctggccttgaggtaggcagagtgggttgtggcgcctcctctctctgtgtgggaccaggacggtggcttaagtctccactccaggaaagaatcaaagtttctagagttgtgagaaaaccagagagtggctctcctgattcttcactctggggtgcgttcttcatgttctcccagctgttccaagactgggccgtagaattccatgtttcaggagcctaagaccctcccagagcccaggtgcttcaccgcagaccgcaagccattgagcacatcacccaaagcagtggccaacatcgcggacccctgtgccttgtcacagatgggtgctggtcctcaggcgttggggacactgctgggtcgatggggtcggattctgccagtttctgctctgcagccaaagatggtcagaagcattgtcacttcagtaacatcaagtgctcaaagacatggcaaccgttcagtggtacttaagtattcaaaatatacaactacagattctctgacagaaaccagcacggggtcttcaccttcattcaccccacaggcgacatgcgagggagaacagcatctcagtggtgatttccaaaccaagcctttgttttcggtgtggggttttgggggtttgctttaatgtttttgaaattgtaaatgttgggctttttattttgatgtaaactgagaataatggcattttagggcctgtgaccaaaaatgaagcttgtaacgaccatggatctgaataaacatgtccttgcttctga

SEQ ID NO: 156760 - DNA, 1820 bp, Homo sapiens
tccggaagacagatgaatacctggagaaggccctggagtacctgcgccagatattccggctcagcgaagcgcagcttaggcagttcacactcgccttgggcatcacccaggatgagaatggaaaacagcagctccccgactgcgtcgtgggtgagaacggactcatccttacgcccctggggcggtaccagttcgcaggacagatggcggctctgtgttcccgggatgacttcctcggcagcttctgtcgctaccacctcacagaacctgggctggccagcaggcacctgctgagtcctgtggggcggaggcaggtggccggccacacccgcggccccaggctcagcctgcgcttcctgggcagttaccggacgctggtctcgctgctgctggccttcttcgtggcctctctgttctgcgtcgggcccctcccatgcatgctgctgctcaccctgggctacgtcctctacgcctctgccatgatactgctgaccgagcgggggaagctgcaccagccctgaaggtggcagctgccttcagagcaggctggagggatttgccacacagccccacccttgggctgagaggacctgggaagcccctccaggagggaacacggtcatcctcaggcttctggagcggggttcctgcagccgcagaggcatctggaggaaacacaaccaagaaaggaaggcagttgggccccagcaaaggagtggctaccagggctcaacagccacgctctgtgacagcgcagagctcagcgccggcctttccctccctctgccaaggactcatggccaagccagctctcggggccttttttccagtgcccatttggctactctgctgcaccaagcttgggagccagcctgccaagagccgcctgggcctggcctccccactggctggccttgaggtaggcagagtgggttgtggcgcctcctctctctgtgtgggaccaggacggtggcttaagtctccactccaggaaagaatcaaagtttctagagttgtgagaaaaccagagagtggctctcctgattcttcactctggggtgcgttcttcatgttctcccagctgttccaagactgggccgtagaattccatgtttcaggagcctaagaccctcccagagcccaggtgcttcaccgcagaccgcaagccattgagcacatcacccaaagcagtggccaacatcgcggacccctgtgccttgtcacagatgggtgctggtcctcaggcgttggggacactgctgggtcgatggggtcggattctgccagtttctgctctgcagccaaagatggtcagaagcattgtcacttcagtaacatcaagtgctcaaagacatggcaaccgttcagtggtacttaagtattcaaaatatacaactacagattctctgacagaaaccagcacggggtcttcaccttcattcaccccacaggcgacatgcgagggagaacagcatctcagtggtgatttccaaaccaagcctttgttttcggtgtggggttttgggggtttgctttaatgtttttgaaattgtaaatgttgggctttttattttgatgtaaactgagaataatggcattttagggcctgtgaccaaaaatgaagcttgtaacgaccatggatctgaataaacatgtccttgcttctgaaaaaaaaaaaaaaaaaaaaaaaaaaaaaaaaaaaaaaggggggggggtaaaaattccccgcggagggggcgcaagtttaggcgtatacccggctttttgttgtccaagggggccccaagtaggggaggcgtataaaaagcctaggacaaggg

SEQ ID NO: 156761 - DNA, 1453 bp, Homo sapiens
tccggaagacagatgaatacctggagaaggccctggagtacctgcgccagatattccggctcagcgaagcgcagcttaggcagttcacactcgccttgggcatcacccaggatgagaatggaaaacagcagctccccgactgcgtcgtgggtgagaacggactcatccttacgcccctggggcggtaccagttcgcaggacagatggcggctctgtgttcccgggatgacttcctcggcagcttctgtcgctaccacctcacagaacctgggctggccagcaggcacctgctgagtcctgtggggcggaggcaggtggccggccacacccgcggccccaggctcagcctgcgcttcctgggcagttaccggacgctggtctcgctgctgctggccttcttcgtggcctctctgttctgcgtcgggcccctcccatgcatgctgctgctcaccctgggctacgtcctctacgcctctgccatgatactgctgaccgagcgggggaagctgcaccagccctgaaggtggcagctgccttcagagcaggctggagggatttgccacacagccccacccttgggctgagaggacctgggaagcccctccaggagggaacacggtcatcctcaggcttctggagcggggttcctgcagccgcagaggcatctggaggaaacacaaccaagaaaggaaggcagttgggccccagcaaaggagtggctaccagggctcaacagccacgctctgtgacagcgcagagctcagcgccggcctttccctccctctgccaaggactcatggccaagccagctctcggggccttttttccagtgcccatttggctactctgctgcaccaagcttgggagccagcctgccaagagccgcctgggcctggcctccccactggctggccttgaggtaggcagagtgggttgtggcgcctcctctctctgtgtgggaccaggacggtggcttaagtctccactccaggaaagaatcaaagtttctagagttgtgagaaaaccagagagtggctctcctgattcttcactctggggtgcgttcttcatgttctcccagctgttccaaagatggtcagaagcattgtcacttcagtaacatcaagtgctcaaagacatggcaaccgttcagtggtacttaagtattcaaaatatacaactacagattctctgacagaaaccagcacggggtcttcaccttcattcaccccacaggcgacatgcgagggagaacagcatctcagtggtgatttccaaaccaagcctttgttttcggtgtggggttttgggggtttgctttaatgtttttgaaattgtaaatgttgggctttttattttgatgtaaactgagaataatggcattttagggcctgtgaccaaaaatgaagcttgtaacgaccatggatctgaataaacatgtccttgcttctga

SEQ ID NO: 156762 - DNA, 444 bp, Homo sapiens
ttcgatctagaggatcccggcatgtagtgaggaccgtgggtcgatggggtcggattctgccagtttctgctctgcagccaaagatggtcagaagcattgtcacttcagtaacatcaagtgctcaaagacatggcaaccgttcagtggtacttaagtattcaaaatatacaactacagattctctgacagaaaccagcacggggtcttcaccttcattcaccccacaggcgacatgcgagggagaacagcatctcagtggtgatttccaaaccaagcctttgttttcggtgtggggttttgggggtttgctttaatgtttttgaaattgtaaatgttgggctttttattttgatgtaaactgagaataatggcattttagggcctgtgaccaaaaatgaagcttgtaacgaccatggatctgaataaacatgtccttgcttctga

SEQ ID NO: 156763 - DNA, 1668 bp, Homo sapiens
tccggaagacagatgaatacctggagaaggccctggagtacctgcgccagatattccggctcagcgaagcgcagcttaggcagttcacactcgccttgggcatcacccaggatgagaatggaaaacagcagctccccgactgcgtcgtgggtgagaacggactcatccttacgcccctggggcggtaccagttcgcaggacagatggcggctctgtgttcccgggatgacttcctcggcagcttctgtcgctaccacctcacagaacctgggctggccagcaggcacctgctgagtcctgtggggcggaggcaggtggccggccacacccgcggccccaggctcagcctgcgcttcctgggcagttaccggacgctggtctcgctgctgctggccttcttcgtggcctctctgttctgcgtcgggcccctcccatgcatgctgctgctcaccctgggctacgtcctctacgcctctgccatgatactgctgaccgagcgggggaagctgcaccagccctgaaggtggcagctgccttcagagcaggctggagggatttgccacacagccccacccttgggctgagaggacctgggaagcccctccaggagggaacacggtcatcctcaggcttctggagcggggttcctgcagccgcagaggcatctggaggaaacacaaccaagaaaggaaggcagttgggccccagcaaaggagtggctaccagggctcaacagccacgctctgtgacagcgcagagctcagcgccggcctttccctccctctgccaaggactcatggccaagccagctctcggggccttttttccagtgcccatttggctactctgctgcaccaagcttgggagccagcctgccaagagccgcctgggcctggcctccccactggctggccttgaggtaggcagagtgggttgtggcgcctcctctctctgtgtgggaccaggacggtggcttaagtctccactccaggaaagaatcaaagtttctagagttgtgagaaaaccagagagtggctctcctgattcttcactctggggtgcgttcttcatgttctcccagctgttccaagactgggccgtagaattccatgtttcaggagcctaagaccctcccagagcccaggtgcttcaccgcagaccgcaagccattgagcacatcacccaaagcagtggccaacatcgcggacccctgtgccttgtcacagatgggtgctggtcctcaggcgttggggacactgctgggtcgatggggtcggattctgccagtttctgctctgcagccaaagatggtcagaagcattgtcacttcagtaacatcaagtgctcaaagacatggcaaccgttcagtggtacttaagtattcaaaatatacaactacagattctctgacagaaaccagcacggggtcttcaccttcattcaccccacaggcgacatgcgagggagaacagcatctcagtggtgatttccaaaccaagcctttgttttcggtgtggggttttgggggtttgctttaatgtttttgaaattgtaaatgttgggctttttattttgatgtaaactgagaataatggcattttagggcctgtgaccaaaaatgaagcttgtaacgaccatggatctgaataaacatgtccttgcttctga

SEQ ID NO: 156764 - DNA, 2151 bp, Homo sapiens
tccggaagacagatgaatacctggagaaggccctggagtacctgcgccagatattccggctcagcgaagcgcagcttaggcagttcacactcgccttgggcatcacccaggatgagaatggaaaacagcagctccccgactgcgtcgtgggtgagaacggactcatccttacgcccctggggcggtaccagttcgcaggacagatggcggctctgtgttcccgggatgacttcctcggcagcttctgtcgctaccacctcacagaacctgggctggccagcaggcacctgctgagtcctgtggggcggaggcaggtggccggccacacccgcggccccaggctcagcctgcgcttcctgggcagttaccggacgctggtctcgctgctgctggccttcttcgtggcctctctgttctgcgtcgggcccctcccatgcatgctgctgctcaccctgggctacgtcctctacgcctctgccatgatactgctgaccgagcgggggaagctgcaccagccctgaaggtggcagctgccttcagagcaggctggagggatttgccacacagccccacccttgggctgagaggacctgggaagcccctccaggagggaacacggtcatcctcaggcttctggagcggggttcctgcagccgcagaggcatctggaggaaacacaaccaagaaaggaaggcagttgggccccagcaaaggagtggctaccagggctcaacagccacgctctgtgacagcgcagagctcagcgccggcctttccctccctctgccaaggactcatggccaagccagctctcggggccttttttccagtgcccatttggctactctgctgcaccaagcttgggagccagcctgccaagagccgcctgggcctggcctccccactggctggccttgaggtaggcagagtgggttgtggcgcctcctctctctgtgtgggaccaggacggtggcttaagtctccactccaggaaagaatcaaagtttctagagttgtgagaaaaccagagagtggctctcctgattcttcactctggggtgcgttcttcatgttctcccagctgttccaagactgggccgtagaattccatgtttcaggagcctaagaccctcccagagcccaggtgcttcaccgcagaccgcaagccattgagcacatcacccaaagcagtggccaacatcgcggacccctgtgccttgtcacagatgggtgctggtcctcaggcgttggggacactgctgggtcgatggggtcggattctgccagtttctgctctgcagccaaagatggtcagaagcattgtcacttcagtaacatcaagtgctcaaagacatggcaaccgttcagtggtacttaagtattcaaaatatacaactacagattctctgacagaaaccagcacggggtcttcaccttcattcaccccacaggcgacatgcgagggagaacagcatctcagtggtgatttccaaaccaagcctttgttttcggtgtggggttttgggggtttgctttaatgtttttgaaattgtaaatgttgggctttttattttgatgtaaactgagaataatggcattttagggcctgtgaccaaaaatgaagcttgtaacgaccatggatctgaataaacatgtccttgcttctgaaaaaaaaaaaaaaaaaaaaaaaaaaaaaaaaaaaaaaaaaccttctcggagcggcttttttcgcgcggggcgcgcgcgagaaacaagagcggttcatagagaagggcggccaattgggccatacgtgtgtttcctttagccccatttttcttttcacaacggcggggagaaatctccgcgcggggctcccccctataaaggagaggagcgaggatatatatatttctgcgagaataaccgcacggggtaaccccgctccttttaatatcctcctcccccacaaaaaacactgttcttcaataatcaatgatgtcaaacacaacgacgacgaacgaaagtcagaaagatacaaacattacatggcggggttcctccaacaatattcatttttatactacaacaacaaatctctgttcttactatatcaatcaattatttactcacagtatgtttacactattttctattatcttcaattttttt

SEQ ID NO: 156765 - DNA, 996 bp, Homo sapiens
agaagagaagggagtcagaccctctgagcaaaggggaagttgctgcgctctgctcggtgtcgtggcctcgcagatgattctggctgtgactcagtcactgacactgagcctgaggacgagaaggttgtttcctactcgaagcagcagaacctgccgacggtgacttcacctgggaacctgatggtggtgcagccggaccgcattcgctgtggggcagaaaccactgtctatgttattgtgagatgtaagctggatgacagggtggcgacagaagcagagttttctcctgaggattctccctctgtaaggatggaagccaaggtggagaatgagtacaccatttcagtgaaggctcccaacctttcatctgggaacgtttctctgaagatatattctggagacttagtggtgtgtgaaaccgttatcagctattatactgacatggaagaaattgggaatttattgtccaatgccgcgaatcctgtggaattcatgtgtcaggcctttaaaattgtgccctacaacacagagacccttgataaactgctaaccgaatccctgaagaacaatatccctgcaagcggactgcacctctttggaatcaaccagctggaagaagaagatatgatgacaaatcagagggatgaagagctgcccaccctgttgcattttgctgcgaagtatggactgaagaacctcactgccttgttgctcacctgcccaggagccctgcaggcgtacagcgtggccaacaagcatggccactaccccaacaccatcgctgagaaacacggcttcagggacctgcggcagttcatcgacgagtatgtggaaacggtggacatgctcaagagtcacataaagaggaactgatgcacggggaggaggctgatgctgtgtacgagtccatggcccacctttccacagacctgcttatgaaatgctcgctcaaccccggctgtgacgaggatctctatgagtccatggctgcctttg

SEQ ID NO: 156766 - DNA, 1167 bp, Homo sapiens
ctcagcacccgctgtgtcgtggtgctgctgtccgcggagctggtgcagcacttccacaagcccgccttgctgcccctgctgcagagagctttccatcctccgcaccgcgtggtcaggctgctctgcggcgtgcgggacagcgaggagttcctagacttctttccagattgggcccattggcaggagctcacctgtgacgatgagccagagacctacgtggcagctgtgaaaaaagccatttccgaagattctggctgtgactcagtcactgacactgagcctgaggacgagaaggttgtttcctactcgaagcagcagaacctgccgacggtgacttcacctgggaacctgatggtggtgcagccggaccgcattcgctgtggggcagaaaccactgtctatgttattgtgagatgtaagctggatgacagggtggcgacagaagcagagttttctcctgaggattctccctctgtaaggatggaagccaaggtggagaatgagtacaccatttcagtgaaggctcccaacctttcatctgggaacgtttctctgaagatatattctggagacttagtggtgtgtgaaaccgttatcagctattatactgacatggaagaaattgggaatttattgtccaatgccgcgaatcctgtggaattcatgtgtcaggcctttaaaattgtgccctacaacacagagacccttgataaactgctaaccgaatccctgaagaacaatatccctgcaagcggactgcacctctttggaatcaaccagctggaagaagaagatatgatgacaaatcagagggatgaagagctgcccaccctgttgcattttgctgcgaagtatggactgaagaacctcactgccttgttgctcacctgcccaggagccctgcaggcgtacagcgtggccaacaagcatggccactaccccaacaccatcgctgagaaacacggcttcagggacctgcggcagttcatcgacgagtatgtggaaacggtggacatgctcaagagtcacataaagaggaactgatgcacggggaggaggctgatgctgtgtacgagtccatggcccacctttccacagacctgcttatgaaatgctcgctcaaccccggctgtgacgaggatctctatgagtccatggctgcctttg

SEQ ID NO: 156767 - DNA, 192 bp, Homo sapiens
tggcatctgacccctgagtcctcctttctgctcaggatgagagtgtgacagtagagacagcacatgagaaaaaaaaaacgtgtaggcctcgcaaatctcagcttaaataatgggactaatatttccccgctaacctgctaaacactgaaagcggaagttcctaagcatttggcaacccacgccctttggaga

SEQ ID NO: 156768 - DNA, 480 bp, Homo sapiens
cttccaagttcaagcgattctcctgcctcagcctcccaagtagctgggattacagatgcctgccaccacgcctggctaatttttgtatttttagtacagacggggtttcaccatgttggccaggctggtctcgaactcctgatctcaggtgatccacccaccttggtctcccaaagtgttgggattacaggtgtgagcccctgcgcccagccaaacccaaccctttctgttcatttgggcccttccccttggtgagggagggtctcccctttagttgttggccaggaggactgcagtggagcaggggaaggaagggctggcaggaggacaggaggaggggagtgctccctcccaccttgtctgctatctcccatcctcccacctgggagggcaccggctgctgcccacagctgaggctctttgcatggggatgccccgacctcgtcactattcttcctgggttgggtggggatcccctgc

SEQ ID NO: 156769 - DNA, 283 bp, Homo sapiens
aacttcatcatcatcttacctttgttacaaacaaggagagattctctagttttccaaggtctgtccctatttccttttgcaaagactgagttccttcgggcatccctttctctcatcctctactggatcatttctacctacattcaaatgtgcatcctcccttgacctacttcagctgcacactccctccaacacacccctctactctccttcctactcgaattgctgtgtctgtggcttcccctttccaacctccccttctttactttaaacctgtgcttgg

SEQ ID NO: 156770 - DNA, 483 bp, Homo sapiens
acctttaaggtcatcctaaaaaagaaaagcccagccagaatggactgttctggaaagcacggcgctgaagaatgaaatgcaagtgcacagccacagcccagagacctgggaaggctaattacaatagcttccaggtggtgagcgactgctctgcaccaggtacacctcattgatcctcacaacaatcccatgaggtgggtattactgctcccctgttataagtgaggacactgaggcttagcaagattaagcaacttgcccaaggtcttacagttagtaagtaataaagctggatttggttgagcccaatctctctggctcaaggctatgctttaaccacccacgccatcttgccttagatggtttgatcagccaccctgctaattctacaaccccctaaccccagcctagcttctttcccacactcaggaataccgagtaggatgattacagactcctcatagaatcttacgagctacacaa

SEQ ID NO: 156771 - DNA, 283 bp, Homo sapiens
atacttttgcacagaaattaggtctgctctaggataatagtgcagtgattcagttccttctcaagtgttcagacttaataatattacctaggacagtatatgtatcttttcaatggatagaccaatgggtgtatttaagagaattttataggtcaatgaacgtacataagagaatacaacagacttacttattttttatataaatttaaggcctgggaacttcaagtacttaaaattcaaagctctgtccctagtgttttggaatttctctttactacctaaa

SEQ ID NO: 156772 - DNA, 525 bp, Homo sapiens
ttactgcaaggagggtaggcagggcaggtcctctaggtcttcctttcagtataacagttacacaacagaaagcgtctttgctttttttattcttggagaaaaagctttgcagctttagctgactcagttacttcttttcatttagatgtgatccctttaaaataatccgctggcaaccaggttgatggatgaacttcaaagaaggacatagtgatgaaaagatcgatagcttttaagactgctctaaagaaccagatagctgtatttaagatataattggaatttccctttaagagaaagaacaggttaaacttgagaagaaaaaagacaagccatatataacagtactgctgacatttagtctttgcaactgtaaatatacaagaacctcaaagatcactatctgtcctgtatttgaaggcgcttgttgtgatgtgcagaatactgttggcccttaaatgagaaaacatgagatgacatgggaaaacacaggatgacatgttaagacatccaaaaaccagaatg

SEQ ID NO: 156773 - DNA, 450 bp, Homo sapiens
cactagataaacccgtgtcagtttagtttaaagctgtatctgttacttcagcgtttatattcaaatgtgaatcccagacatctggattcagtgcttgtgttgacatttttagctatttgatttgtggtaattttcctagtatgtgtgatgcacttgtgtccaagtacagatctttcttcatgggacagtatgttattttatggcttaagacatgggaagcacttagaacagtgtatagcacatgggaagcattcaaaaatgttagtcatggctattgctgtcatcataacagttttttttttttttttggagacagagtattgctttgtcacccaggctgaagtgcagtggcatgatattgggtcattgcaacctctgcctcctgatttcaagcaattctccagcctcagcctcccaagtatcagggattacaggcacccaccaccacac

SEQ ID NO: 156774 - DNA, 663 bp, Homo sapiens
taaggaaatactaataattaccatatcagatactaatgtctctacaaatcctgtgaaaaacaaatctggcatctattcttacccctcctttcaattttctctctaagtttacaaattatctcttctgctttaattcaattgtcttttcattgtagtcactgtttctgaacttctacaccgcatttgaaactgtcaacaccctgcccttgtagaaaatcttcctatcctggaaatgatgcactttctggttcttctcagaatgctattagcctatttcaagacccaaaattccaaacctcaaagctctttcttcattatactactaccctcccaacacacatctactgatgtgttttactagcatctatatccctggtcagtgcaaaatctacctttcatctaaccgttcattgtatatgggaataattacatgcataaggttaagcaacttgcccaaagtcccttctgattttaataccttattatgaagatttaatgaattaaacaaacgtaggcgcttagaatacctgtcatacagtaagtaaatgttagctattattttattcctacaaccactatcttatatcagaccctcatcagcttattcctaaaattctccataagcactctaatcagtctctccactcccaggacactcagctg

SEQ ID NO: 156775 - DNA, 476 bp, Homo sapiens
gctcggtaccctgtctcagtttcgggacgcatggcgtgccttccactctgcccctggatttctttttacagccctggctcttgtgggccacaacagttcttgaggtaggctgctagggttccccattggagcctctccattccagtgttccagggggcagatgagctcctatccccactggcctgtcttgctggtgttcagggccctggcttccactttgcgaggtcacctttcaggattcatgtgtatccactttgctgtgtcagaaactccctactgctgacctccctctcctctttgctgtcattaatggattctcattgtgggagataaacgtgtgctcagcctagaataccacatgattttttttttcttgattcattgcttttgcctgttagccttgttgttctaaagtagttcatttttctactctacttttcctttcccctcaatgacccccaccccaaaactgtgcc

SEQ ID NO: 156776 - DNA, 578 bp, Homo sapiens
agtttgctcctcatatttcatcagttgctcaaaggtactccccattttagcttgtgttctgtttggatcctgactttctcatggtggtttttctggacttttattagctttctttttcatcctgggtattacatggcgtgccttccactctgcccctggatttctttttacagccctggctcttgtgggccacaacagttcttgaggtaggctgctagggttccccattggagcctctccattccagtgttccagggggcagatgagctcctatccccactggcctgtcttgctggtgttcagggccctggcttccactttgcgaggtcacctttcaggattcatgtgtatccactttgctgtgtcagaaactccctactgctgacctccctctcctctttgctgtcattaatggattctcattgtgggagataaacgtgtgctcagcctagaataccacatgattttttttttcttgattcattgcttttgcctgttagccttgttgttctaaagtagttcatttttctactctacttttcctttcccctcaatgacccccaccccaaaactgtgcc

SEQ ID NO: 156777 - DNA, 154 bp, Homo sapiens
ccccatttccagttactttcttagcatcaggaggctgtaatctagggagggtgacattacagttagagtaaagtggaataagttctgtgccagaactatgctcagagcattgtgagattatacgaggcgggcacataacctgtgcctgtaagga

SEQ ID NO: 156778 - DNA, 237 bp, Homo sapiens
gagttaggatactgaaggtgctagaaagagaatatagttatgtgccacaaatagaaggctgaatcggccagaatcaggaaagaaagtgatagagaactgaacaggaagagactggaaagtctagagaatacaaaattgagaatgaaatgtggctgttgtcaaagaataacatgtatgcttaggggttcaaaggtggagcagggatgagtgatgacaaatgtgaacagacttgtggat

SEQ ID NO: 156779 - DNA, 152 bp, Homo sapiens
ttatttagttttatttttgctattctagagtggggctataggcaggggttattcgtagctcagaaagtgggggaccatacagggatgaggtgcctgtgggcccctggccttgctgaacactaggcaggtgtggacagtgaactccatgctgg

SEQ ID NO: 156780 - DNA, 404 bp, Homo sapiens
ctaaaaactactacttccagcctaattacaaaaaaacaacagacttggattgggagaacactactggcatggtctgtcaagacagtcaaagtcatgaaaaacaaagaaaagcagaaaaaactgtcacagaacagaagagactggaagataagacaaatgtatacaatgtggtacccctaactggatgcatcttggaacagaaatatgagctatatggaaaaactggtgaaatcccaatggagagtctcatgtcagtttcctagttttgacaaacatactttatgtaagatgttaacaatggtggaaagtgggagagatgtatacaggaaatctctgtattatctttgtaaatctgtaaattttgtaaatctaaaattattctaaagttaaaaagttattttaaa

SEQ ID NO: 156781 - DNA, 469 bp, Homo sapiens
cagttcatgtaccctgctcaacaaatacagcatttgaataagcaattgagtacaatgctggaggactttatggaatatagaatggataattaggcagtcaatgttttctgaaatagtataaaataagaaaaaaggagcaaaatgcccatttgaaaggatgggctaggaaatgaaaattccaggctctagttagtctatcatgtaagaatgaagatctgcctcagaaatgtgagactatagggaagtttcttctgtctgacttgactcatttcaagtacaaggtccctgtgaacagctttgcgcctttgaacttgtaaactttaagctattaaactttgatgttttagtttataactattagaggagcattccgaacctggaattaaaatgaaattttattctcatagttgctatggcttttagttttgctttcggttgtaacattttccattgtcatatacaaaaactt

SEQ ID NO: 156782 - DNA, 668 bp, Homo sapiens
gaggctgaagtcatacattcattatttgttaatcccaccctaagtgataggtgtattcatcattctcagtatcagaagaagaaactgaggttcagaatgacccagtaaagatcacaagcccaaccctggtgaagggcgtgattggcagaagcccaatttaagcccccatcatgtcctgacgctttcccaaagctgagctgcctgccagggtctttgctcttccactgccaagaagtaaggttttggttgggcgcggtggctcacgcctgtaatcccagcactttgggaggccgaggtgggtggatcacgaggtcaggagatcgagaccatcctggttaacaccgtaaaaccccgtctctactaaaaatacaaaaaaaaaaaaaaaaaaacacatttgtttgggcgcgcgcagttgaggcccctgagaagaaaggtttttaaaaaacccttgtgttggggagccggggggcccaaaatgtactaacgtagccactgggcaaaaagaagggggccacagaggaagctcggggccaaagacactgcggtgtgggttcctccacaaataaaacacgccgggcggacacagcgggttcttagaccactccagggagggtcgagggccgagggatcacaaaaggagacaagcggacgaataaatagcggtcagg

SEQ ID NO: 156783 - DNA, 550 bp, Homo sapiens
cagcagccatcatcattgaggcaagatgatcattagcattttttgcattgaagtatttttaaattaagatatatatattttagacataatgctattacacacttaatagactacagtatagtgtaaacataacttttatatgcactgggaaaccaaaacatccatgtaactcactttattgccctattgacttcattgtggtggtctggaactgaaccagcaatgtctctggggtgtgcctgcactttcataatttaaaaatatttgtatattattagttagaatgcacaatttgactcggattactggtcctatgtatttctcttctatgctgcctattctgatccattaactgttttcctattagattttcaaatttgtgttactgttttccaagagtcctctgtatgttagaggttagtatgaggtgaatattgcaaatattctccccacttgcaaataatttcatacaaaagaaaagttccaaacagatgctggccaagaacatgtgctttggaatgaggtgaggtcaggttcgaatcctagcttc

SEQ ID NO: 156784 - DNA, 197 bp, Homo sapiens
ctggagttcctggtttagttcactgtctttacttgtatattcatgagataataaactcagcaggttaatttacttgcccgaagtatttacaatgattcagtagcagaacaaagaggtaatccacttgtaacacccaggtcgaggtctccgtgtatctggtcactctgctgagggtggagtggttaacagagctgcct

SEQ ID NO: 156785 - DNA, 357 bp, Homo sapiens
aaggcaccattgttgctgcactgcattgttggttgcaaggtagttactaaggttgggccaggttgcataggacaggacaggacacagatccccacctttccatgggaggaatgtccaaaaatgtgaagtcatgttttaaaaccgccacattgtaattcacttattataattataatgaaattatctttcttcttccctgtacactaaataccccccacccaccccccgacacacacgcacaagaaaacttctgaaattacattaccctgtaaaaatcctgactgaaatgtaaaggttttgttggttggttggttggttggtttgagatggagtctcgctctgtcgcccaggctggag

SEQ ID NO: 156786 - DNA, 123 bp, Homo sapiens
tgagacagagatggaagccaggacaagggagcccaccgggcccagataggtacagagagcagaggctcctgttctgtcctcgccacccacgagggtgacactgcttgtaaatggtggctgtgc

SEQ ID NO: 156787 - DNA, 238 bp, Homo sapiens
ttgggctgccagttgcagatggagtgtgggcctggagtgagaacctacggtgctttttctgggcccatccatggccacccatggaccaatcatcacatacttactcccttctgagcccataaaaacctctggactcagccagactcacacagatgtcaggactaccagcggtgggaaggagctacccacttcagttctcctcgacttgttgggaaaacctaactgtgataaagagcta

SEQ ID NO: 156788 - DNA, 655 bp, Homo sapiens
ccctcaccagcttgtgttcccaagttagtctccagccctcctgaccttgagctcctgactcatatacccgacaactgacttgaactgtgaactggagtctcaataggaaattaacacttacgtgcccaaaggagaactcttgattttcccctctaagccactcgttttttgttttttgtttttgaggcagagtctctctctgttgcccaggctggagtgcagtggcatgatcttggctcactgcaacgtctgcctcccggattcaagcgattcttctgcctcagcctcccgagtagctgggactacaggagcgtgccaccatgcccagctaatttttatatttttagtagagacagggtttcaccatattggccgggctggactcaaactcctgacctcgtaatctgcccgcctcggcctctcaaaatgttgggattacaggtgtgagccaccgggcctggcctaagccattctttcccagtgaatgtcaccctgcagagtggctgaggccaaaacctaggagtcagcctttactcccagctttccttcaagttcaagacttccgcaagcccccaggggagcaccttcaactatcacaaaaacgtgtccaactctgcattttcaccctcacgtccctggcctgagcaccagcaaa

SEQ ID NO: 156789 - DNA, 178 bp, Homo sapiens
tcggtggagtaactgctgagaagaggatctggaagtacaccctggagctgtttcagtacttccgttgacatcaccctgggtgggtgggattggtgtagtaactgctgagaagagggtctggaagtacaccctggagctgtttcagtacttctgttgacatcaccctgggtggaacctt

SEQ ID NO: 156790 - DNA, 483 bp, Homo sapiens
tgaatgtagtaaaaacttgaattgtacacttaaaatgggtgagctgtatgaaatatgaattatatcacaataaaggtagtatcagtgtatatgctcagcatcatgcttggccttgataaattggtaaatgttagctaccaatgtaatagtaactctctgacttcatgtgcagagcacgtttatagtagcaaagatggaaagaaaggaaaatgctgagagagtagatgaacatacaagttaactcagataccaggtgagggagaaggtgactgaatctgtggcagcagtatggtaggagctgagtgctgcttttggagaaggtgaatgaagttatgtggtgcaagagcctgataccctaaaagtgtctagtaaacctgaatgtagttacccttaaaatgtggttgaacttgggtctggggatccagatgtcactaaacagtatcttcttcacaaaagagtaatcaccgtcagtgtgataaaagc

SEQ ID NO: 156791 - DNA, 189 bp, Homo sapiens
ttccagagggtccctgaggaggcaccccattcccatcttcctgatctgcccccactgcccacctcacagctctctttcctcaagcactcctctctcccttgctgactcctgggcgacattcagtcctgacagttacatcctagagaagccttccctgaccttccccctaattagaatagcctccaccat

SEQ ID NO: 156792 - DNA, 516 bp, Homo sapiens
cgaggagtgggagtgttggagggtgaagagaatggggcagtgaaagatactaaaaggatggaagccagttaagtagttgttggttatttgggaatttcagaatatatcctgtacttctgaatatttgatacttattctaaaagtaggatttacccttgagtcttgtatttcttctcattgctaagctttataatgtctattttagtggaaaattcctctagctataatctcttaatgctgccaatctcattctcatgatagttttagaataatagtgtaattttccccaacacaacaccccctggtgtttctacataagatgcgaaaattcccagagggggaaaacttccagtaaggggtggcatttatctttgatgatactgtttcttttcccttttctgagcattatagttcatgtctttgtagctaagagtggagggaggattctttttggatcgtattagagatttatgttaacattcctaagtaaaatgttaaaaactttttggagttaat

SEQ ID NO: 156793 - DNA, 336 bp, Homo sapiens
tttaaagggctttcatgtggaggaagaatttactccttgtgattccaaatggcatatctagaattaacatgcaggaggtagaagaagtcattttgtaatagagctgttcagaaatgtaacacagggtctcatgcagtggtgagttcagggtcactcagagtgatgctaaaagaatgattggccatatgaataaattagtcgagcagggagctgtactccattctgtgtttctaataaagccatttttgtttaatccccatagtcttatggtttttccctcttggtgtcaatggtttatttcaccttctatgaggaatctagaagtattgaagtttg

SEQ ID NO: 156794 - DNA, 564 bp, Homo sapiens
cccacacctttctttggagtctaagatcagccaagacctaacttcccagtttagttctgattcttgaccatttctctctgcatttcaacttctctaatttccttaaacaccaatctataaagagccatggacctttttccctttcactctatatcctggttagtttaattcttgttttctcacctagtgttgaaggaaggtacgtagtataataaagattgcattctagtgaaagatacaagtcctttttcagtcacgtgtggcctaggacaggtttgataattcccttaagcctcagtttgtccaaggataataggaatgtaatgatcattcccctgtctgcctcacatggttatgatgaaagtcatgtgagaccacatttagttccacaaatattattactacatatttaaacactctgaggtgttacaatgttaatgtgttagaaatatttatatattgggaggaataatagtatagatcaaaagtcagaaactggtgactcatgggaaccacccagccagtagatgtgttttatttggcctacatggtatttttatgtat

SEQ ID NO: 156795 - DNA, 241 bp, Homo sapiens
tggaaatatgtacacttgttgagcacataggccctgaaaggagaatcacacctggccctgtggcctattaggtacctaactatgggcagattggttagctcctctaggcatcatttttttaatgtgttaaatggagataatattaagacttacctcataaaatccttagaaggattaaatgaagtaattcatatacagcccttacgaacaaatgacatttgtgtaggtcagaaccaactta

SEQ ID NO: 156796 - DNA, 731 bp, Homo sapiens
gttcggtccatgcacagttcggtcccatgcacatgcacacaggggcttcagatagagatccgccctatctcaagggacagtcctggggctcccctggaaagggtctctccctgtcccctcttcgtggacaaggcagaaaagggtcgcggagggtcctctgcccccgcctgcctcccaggtgcacgggcacaagcatcgtaattctcaggcctgccgtgtgcaccgggagggagccgggcgcctcggacgccacctggggccctcacagctctcctggatcctcctgttctcacaggctagagaacacgggtttcaggccaggcacagcggctcgcttctgtcatcccagcactttgggatgccgaggcgggtggatcacctgaggtcaggagttcgagaccagcctggcctacgtggcaaaaccccatctctactaaaaatacaaaaattagccaggtgtggtggcgggcgcctgtaatcccagctacttgggaggctgaggcaggagaaccgcttgaacccgggaggcggaggttgtaatgagccgaggtcatgccacagcaacaagatcacttcagtctgggcaacaagagtgaaactccatctcagcatcagccaacctgggctcgagtcctggccccaccgcttcccaaggccgtgacctcagacaagctgccaaccctctcgagccctcagtttctggaactacagaacggggacatccataggac

SEQ ID NO: 156797 - DNA, 359 bp, Homo sapiens
ggttgtctccactattctaattgtttagatagtaagtctaagtagtaagacaaagttttgaggtccccaaggggaagaactgcaacatacaagactaggcttcttccacaccataagctaagactgaacattatatatagtattgaattaacctaaatatccaaacattcatccaagtgaacccaaacatttagctaagatactctctacccaaaggtcttggcaatcaccatcaatggtctgcaatgcaaacaccaacatgtttaaagttgtgtctaattgatatacaaagaaaaaattttaaatgaaccagcctgggaattcagaatgaacttcagcttctagcatgaggtaccacc

SEQ ID NO: 156798 - DNA, 183 bp, Homo sapiens
caaagtaatatttaaaagtgtaaactcaatgatttcattgatttacataaagacctttcaatgattttcctatgattcttccattaaaatctatgttcttcttctttacttacaggagtctagctgcatgaatattcttccatttactcttcaaaccaagcttcctcctgcctcaggaaatat

SEQ ID NO: 156799 - DNA, 850 bp, Homo sapiens
  misc_feature (229)..(229): n is a, c, g, or t
gtaacccatggagtctattcagccataaaaaaagaatgagatcctgccatttgcaacaacatggatgaaactggagaacactgtgttaggtgaaataagccaggaacagaaagacgaacttcacacgatctcactcatttgtggaagctaaaaattaaaacaattgaactcatggaaatagagagtaaaggatagttgccagatgctgggtagggtagtgaggtggtgngggagaaatagggatggttaatgggtacaaaaaaaccagaatgaatagtcgggtgcagtggctcacacctgtaatcccacactttgggagactgacagggggatcatttgagaccaggagtttgtgaccagcctggggaacatagcaagacatcatctctacagaaaagtttaaaaaattaaccagacttgatagtacatccctgtagtcctagctactcaagaggctgaggcaggaggatcacttgagcctaggagttcaaggctgtagtgaggtatgatagtagctatgtagtaatgccactgtactccagcttgggcagcagagcaagactctgtctcttaaacaaacaaaaaaaccttcctttgttcttccttccctacctgtgaaataaaaccccaaatcatagattttcattcataatctggttgcagcctatctttctagccttctcttccactgtctgtttcttctctaccattttaagcttcctggtattcctagaatacgtaacctattttagggcttgtacttactttacaggatcccatttagataccaacttgtggatgaggccattttaactaccctagaaaaaagtagtttctaagttttttttta

SEQ ID NO: 156800 - DNA, 109 bp, Homo sapiens
aagtcattatgtggccttaataggtggacagaaatcgggtttcatgcaattatgaagttgagtttttaaagtaaatgtgcagccgggcacggtggctcacacctgtaat

SEQ ID NO: 156801 - DNA, 332 bp, Homo sapiens
ccttgtagggcatgaagacgaccagtctcagaaatttctctggccaaaaaaaattaagtgtttgaggctgggcaagggggctcacacttgtaatcctagcactttgggaggccaaggcaggaggctcatttgagcccaggagtgagttcgagaccagctggagtaacatggcaaaaccctgcctctacaaaatacaagaaattagccaggcatggtggcatgctgccagctacttgggaggctgtggtaggaggattgcttgagcctgggaggttgaggctgcagtgagctatgattgtaccactatattccagcctgggtgacacagcaag

SEQ ID NO: 156802 - DNA, 788 bp, Homo sapiens
aagaaaaaaagctttatcgcaattataaaagagctgttggaaaaagtacttgatgcaaattatttgacacactgtaggagagtgtggaatgttcacatttgctgttcatcaaaatgagttcaccacatttggaaataaacacaggattttccccctactttttaaaagaaggcagttatacacatttacaagtagaaggaaggaaaagctgtgggcttacatagggccgagctttgaaacagtccattatccaatgctgtgtttggtgagtgtgcacaggacttctaacacagggcttgtacctagaaagccctggctttgcggtttgtacagtgagtgaggctgcgattgtcatactagccagacagatttctgcagcccagctttgcactcttttggcttttactttctttctagagccaggatttctagaatagttcggactcttgtatgactggccagtggaagtcactatgccagatcatcttgtgaaaagaagtacatctaatgtacttttcttctcattaggatggaaaagcaggcatagtctagtctgcaggaggacagttgtgataaatcttggtttaattacagctgccagtttttgaaagtgtcctctttaatgaaatgaaaagtcagtgggtcgtaatcaccacctggatgaaacaaatttttgggtaccttacttagtccagtggtatatgtaactagcgtctgcatttcagacttggtgtcccttttattcaaatgcagtataacaggaagtgaataatatcctacctatccta

SEQ ID NO: 156803 - DNA, 385 bp, Homo sapiens
actttccacagcttttggtaatagatagggactgtttgttttatggctgaagttttgtgaaacaattattgcatttcatacattctgctcatggttattgccttagtttttctttagtttgtcttagacatctgctaatttgaggatgttaatttttttctgtatttaaaatatgctgatacttggtctagttttctttgtgagctccttattctcaaacatgcaactgtgaactgatttttttaaaaagggacatttacgtttcactccttcagtataggaatttacgtttttagccttctgtgaaatcagggaatagattcttatctttgccatttataaggttgcattaggaaggtagatttttgaacataaaatgaaagta

SEQ ID NO: 156804 - DNA, 623 bp, Homo sapiens
tcgccctggtggaggtgttactattgaatagaataatctcgcagaacactaacatcagagaaggtcacctgtgtgactgtgctgaaataggaccaaaagtaagtaaactttaaaaaaaacaactcataatcgtttctaagtagtgacaaatccaagatcatcatacaaaccacaaaaatcaccaaatatcccctgctcccggccagtaagagtgagggccgaattcccacagtccccaggtgcgtgtttccctcgcggcgaagagtaacaactctagttctgcggaaccacatgtgtgtgcctggtgctctctggctgcacttgtaacagccaacctcacaaaagctgaggccttttgaaactcaaaactgccaagctgaacaccacagtttttctttttatctaccatcacaggagtctagcccaccactttaaaacctctagcactggccaggcgtagtggctcacgcctgtaatcccagcactttgggaggcagaggcaggcggatcacctgaggtcaggagttggagaccagcctgaccaaagtggagaaacccccgtctctactaaaaatacaaaatttgtaatcccagcacttggggaggccaaggcgggcggatca

SEQ ID NO: 156805 - DNA, 279 bp, Homo sapiens
aagccagtatgaactgttagttgacattattcatatgaagatgttaagcaagaatttagaaatttaggcttggagtttaggccaaagcctggactaatggatcatctctatagggctgttatgtaaagagtgagaatggttgagctccccgaacaagagtatgtagagtaaaaagagaagcaagcatacagtcttcaggggactcctgatatttagaaatggtcaggcaaaaaagaagttaggagaggagatagagcaggatctgcagagaagtggagg

SEQ ID NO: 156806 - DNA, 329 bp, Homo sapiens
ggaattcaaagttaaagtgagccaggatctcaccacagcactccagtctgggcaacagagcgagactctgtctaacattaactaaataaaaagtactttataaggattctagtgaggaggccgaccagtcaaagccaaatacaggcttctcacaaatgccatgcagtgattccaaccctctggcctcatatatgacatttggaacaaaacgaggaaacgaagaaatgcggatgtaacatcgaggcttatttcctcctgtctcacgaaggactgggagccatttacagaagaaaccctggcggctccgcacggctcttccctgggacaat

SEQ ID NO: 156807 - DNA, 502 bp, Homo sapiens
tggttttgaaaaggtctgaactttggggaaaattgtttgaaatttattttggctttccttgcccgtggcagtaccttgaaagtaactgaaacataagcttgttttggataacctttcccttgcaaatggaaattgtacatacacacagcagaattcacgttggctttttttttctttttcaaatcatatttctggaaaatcttggaagggagtttgtgctttgtggccagtccagggtgggtgtaagtcatgaatgattggtcatattaagactgtgctagacccttttgatcaaaagcctcgctagggatgctttctacttatgatcctctgtccatgagaatataccagagagtaggtattaggaaatccttgacagattgacttgattaaggaatctttacttttcccccaaagctgtgaacataaaggtttactcagggttggtaatagagtaggatggtagttggaggttctcgccctgccttgaggtagagctgca

SEQ ID NO: 156808 - DNA, 463 bp, Homo sapiens
tgaaacccagtctctactaaaaaatacaaaaattagccaggcgtggtggtgggcacccgtagtaccaactacttgggaggctgaggcaggagaatcacttgaacccaggaggtggaggttgcagtgagccaagatcgcgccactgcactccgcctaggcgacagagcaagactctgtcttaaaaaacaaacaaaaaaaaaggttttctgattgtttcttttccttttcagttgggaaagacttgagcagggtgatgtttgggtttccagccttaggccgcagcattagggaatttcagagttagcaggggctgcagaatcatcctatctgtgcctctagggcatgctcctggagagccaggagtcggtgggaaggatcggccgattcattgctttttattgaatctacaacagcccaggccccttggcctcccactgctgtcggcagcagacaaacacaacca

SEQ ID NO: 156809 - DNA, 571 bp, Homo sapiens
taaagaaagcaaagcagcaggctatgcagagatctgaaatgaaagtatttcaggaagtgggaacggtgagtgcaaaggccctgagatgaacagcaaaggaggccagtgtggttagagaagaatgactagggtttgaaaaggaagtagaaacagggtactggagataatgaaagaagggaacaaaatctcttcaggcccttggcttttatgctaatatgggcagcctctggtggactctggtagaataccatgttcatgttctgatgtttaaaatgatcatactcgatgctgagctgaaaacagaccgcaggctgtatacaagtatctacagaagtgataatgccaggatctcccatgcttgatgctccccagtattccttctgagttccctatgtatgtggctgtgtaataacagctgtcattggacttgaaggaaaccaagaactgggattatgtgatatgccatatatatgaaaccttaatgcacaacttcttgtatctggctccattattaccaaacattcaacccctatttctaaacactgattagaacatttgaaatttatcacac

SEQ ID NO: 156810 - DNA, 128 bp, Homo sapiens
tgtacagcagcccgtgtgccgaccttgtgcgtacgaatgtgttcgtgaccctgtaaatcctaggccggcatcctgtgctaccccaaagcctgtggccttccctggctgtgccatctgtagatgtgtgt

SEQ ID NO: 156811 - DNA, 200 bp, Homo sapiens
atggatcaaacagaaccagcaaaagctagaacagtttggaagtttatccaactgtgtcaaaaataaaggatcaagaataacaaccgggaggaaaaaggcagctgaaatgacctgaagattactgctgctatcacccactggctttgactgaacagcaactaaattctgtaactaatcccaggcagaacacagctagatag

SEQ ID NO: 156812 - DNA, 357 bp, Homo sapiens
catattgcctgctaataagagcataggttgtttacactcagtctgtctggtattagacccagctcatctgtttactagcttggtaaccttgggcaggtcatttaacttcttcccacctcactttctttatctgtaaaatggggataatgatggtctttaacccatagggttgtcatgaggattaaatgagctaatgcacacatagttgttagcatcctgctaagaaacagagtgagcacttaacaaatgttagaaacatgagctggtggtgttattttcaacgttggagactcaggtcctctgagactctggagtttccactttagtcctgtctagcagtaggcttgctagtgcaac

SEQ ID NO: 156813 - DNA, 264 bp, Homo sapiens
cacaagtcgatgcttcctcctttaaagaaacttttaaaagccaaggagtcaaagagccccaagcaggactcgaaaagctgatgaagtctggaagtaaatgaacccgcctcctgacagaacagcttccccgaaacacgggaaaaaggggattcctcccccgacttcgtatctgtctgcttccgagggtgaacgctaagcagcagatcccatctctccactaatacctgcggcgcacccggggaggaggagcgggaaacggcgagg

SEQ ID NO: 156814 - DNA, 287 bp, Homo sapiens
ggggcctaggaggtcattgtcgggggtgtgagtttgtacactgggcaagctgggatccatggagcagcctggacaggagcgatgttgcctgatgtatgtccatgaagatccgtctggctgccgtttggagaatgaagagggcagggtgaaagccaggaggccagttggagactgcctcagacctccaggcaccagggacggggcgagctggcagcagcgaaggtgctgagaggtgactgactatggctggagtttaaagcatgcgtgggatttgctgatggactaga

SEQ ID NO: 156815 - DNA, 420 bp, Homo sapiens
agaaagaggagaagagagaagacagagaggaggccccacactcttttaaacaaccagatctcacctgaactcagagtgagaacttactcattagtgcgaggatggcaccaacccatggtggtggcatgcgcctatagtcccacctgctagagaggctgaggtgggaggattgcttgagcccgggatcccaggaggtttcagtgagctgagatcatgccagtgcactccaacctgggtgatagagcaagactctgtctcaaaaacaaaaacaaaagaacaggaaagagagagaaaaagaaatacagaaatataggtggccaggctagtgtgatagcagtagaacgaggataaggggttggattctgattatattttgaaggaagagtccaggggtttgctggtaggttggaggtgagatgt

SEQ ID NO: 156816 - DNA, 416 bp, Homo sapiens
atcgtcgtcatcatcatcactatggatgggtcctccacattaaaattccattcctcaaaaacatggatgccttccaaagtcaaaaagacaaaaatcaaactcttgagcatggcattcaagccactggacaatatggtgccaacgtattaatactttcctagccccacctcgtgactgatctgccatgtagaagtaaactctacacttaccaagccctcacaattccaaaaacttgccaactactttcaccttctggcctttgctcctgctttctcattggcctgaaccacccactgtctttctcaacccagcagaattggccttcaaaaccagacaacattgtcaatatctctgtcaacactttaaattgtaccctattaaaaacaggcaaatggaaggcttccaaattggcctgc

SEQ ID NO: 156817 - DNA, 311 bp, Homo sapiens
ttcactctgagcccataaagcaagcagaaagccagccccagaaggtagcagccctgttgtgggcagctgtccccagggctgcagaggacccacgttcccggccatgtgcagttcccggcactgtgggagctcctgtaacattattacccccaccagtgttgttgctaatgtggaaaccgccggccggcaggcaggactgtcctttcagctgaggggaaagagccactgtggagccaggataccaccagggggccagggtggaagagagggtctgagtgagagcgccgccccgagtgtttcccatggggctg

SEQ ID NO: 156818 - DNA, 414 bp, Homo sapiens
cggtgagctaacctgatatatcagttttgcatagcatccccacactttcagtttcctgctctctgtccttagcatttatcacctatctaacaccgtcatgtgtacaggcaggcccccttttctatgggttctctatccatggactcaaccatgtggattgaaaatatttgggctgggcttggtggctcatgcctgtaatcccagcactttgggaggccaaagcaggcagatcacaaggtcaagagctcgagaccatcctggccaacatggtgaaaccctgtctctattaaaaacacaaaaattgttgaccgtggcatgtgagtatgacattagatccggccacattctagacaggggtgtgcttagtgaagtctgaatttaatgtttcaacctaagcatctaggagcagctctg

SEQ ID NO: 156819 - DNA, 184 bp, Homo sapiens
gtagccactatacacctaggagagtgctgggcaggcatgtcttactttgcaaacactcgaggggactaacttccacctcctctgctacttccagctgcttctaatcacacttttagtcctctcctccattttacacacacacacacacacactcactctcacatacacacactcatgcataccc

SEQ ID NO: 156820 - DNA, 712 bp, Homo sapiens
tgtatccttggaactgtcaagtatataattgtcttagtagcctcttcactcatttgtgccttaaatttctgtctttggttcagtagtatgaagattatcttttatagagccctgattatttgtcagatattatcataaatgctgtgtaaaactatctcatttaatcctcaaaacaatctttgatatttgtgctattgttcccattttactgtgagaggcccaggatatgaatgcaaggcttttacgcttaaacactaagaaactgcttccaaaatgcttaaaaatctttccaactaagaagagataagaaaccaagagggagcagttgacttcatccatgccagcccaagaagcatcttacatccaagataaagatattttctcccactcttatgaaggaaatggtaaccaagggagtcaatggtgggcttaactccagaacgtagatggcagaggcctcaagtgggcaaggcatctcactgcagcagaggccagggtgagaaacgattaggcatacgaagagggacacagcaacggagactcaaaaaagaagggccacacaggaatcagaagtgccacatcttcatgtcttcttccagtaaaaaacagacaagagccatagatgaaggcactggaatctttgtatcactgaggattgctggaaggaggagagatgactgagaatacaaaaatcagcaacagcttgaaagaa

SEQ ID NO: 156821 - DNA, 351 bp, Homo sapiens
tacacagaaaaacatcatttaccttctaagggaattctgtttgtccaagggtacccatgtgatgtcacagccagacactgtaccaaggtacaggggtttttgcactgcattcataccctgaaagctttctaaactgcacagcactaaaacctaaacctaccaaattttcactaccaatgcagtgttttctccccttactctaatgtggacttttatgttcaaattcagttagtctctctatcatgcctactaaatgatactactaagaattcaaaagatgaaagtaattttaaagataatttagtattaacagagatctctcattttagagatgaggaaaaagaaatcacc

SEQ ID NO: 156822 - DNA, 415 bp, Homo sapiens
ttaactgcttaccaaaataaaattcaacactttttgaaagaagacaacataatacagaccccttaccatgtaatatgacaatttctagcttacaatgaaaaattactagacataagaaaacacaagaaaatatgacctgtagcaaagaaaaaaagaagttaatagaaataggcctaaaggtgacccagatctagaaattagcagacaaggactttaaagcaaacatttgaagtatgtttaagaaattagatgaaaacgtggtaataataagtgaacagagaggttcaaactattaaaaaaaaaaagaaccaaatggagattcaagaacttaaaagtctaatatctgctatgaaatacttatggtgctaagagagtactgaagatgtcagaaaaaaagggttaacttgaatacaga

SEQ ID NO: 156823 - DNA, 571 bp, Homo sapiens
aagagagaatgctgaaggtcaaatcaaacagaatgatgttgggatcacttgtgtcccagtatggtctatggttaagagggcaggctcttagccaggatgcctgggtgtgaatcaaggctctgctgtgcacttattggctacttgacctcaatctagttacccaactttttaagcttcatctgtattattgcctatttatagattaaaccaggattaaaatttacagatttatagattaaatcagaattaaaattaaatcagtcagaattaaaggaaataattcaagtaaaccacagaagaagcacttatcgttgattacaattaccaccgttacagtgaaagagatccaagtttccccgagttactggcagcatatctgtatgggtccaaaattcaaccgaggggcataaagcagaaaagagaccaagccaagtttcagagaaggagtggaagtttatttaaaagcctttagaacaggaaagaaaggaaaattagcttgaaagagacccaagcaggcactgaaggtccaagagagaaatgagagcaaaagaagacagcaaaaggggccttt

SEQ ID NO: 156824 - DNA, 235 bp, Homo sapiens
cttccccgtggcttctattgcacccaggctgctcatcgcagccttagaagctgtgtggtggctgctgctcacagcagggcagagctcgaccggcatgaggcattcctgcagtgcagtctaggacagtggcccaggaatgatttccttttctctttttttagagacagagtcttgctctgtcacccaggctggagtactgcggcatgatcatagctcactgcagcctctaactctg

SEQ ID NO: 156825 - DNA, 513 bp, Homo sapiens
taaaggccctgtttccaaatagagtcaggctgagaggtagttggggccaaggcttcagcatatgaattggggcgtggaacacagttcagcccatgagccgagtagcctgaacactcctgggaccaagggcatggacaggaactccgcggtgatgatggccttgggtgaggtttgagtcagcgctcgagcagctgctctgttccgtttcctttgagacctcaggaagaatcagctgcgtactctgttgggttcgtgccgcctccaggaaatgatcctggtcgcacccaccatggcacagctgcctgatggtggggaggactcagaccatgagaccctggagagattgcctttggctggccgcaccttcacggattcattcaacgctgagctgaaggccaggtgcctttagcatcgcagtttgggcctttatcatctctcccctgagctctgtaccctcttctcatagttcctcctgcctcttctcttgccccattgcaatcctcccacctcagc

SEQ ID NO: 156826 - DNA, 232 bp, Homo sapiens
ccatggagttcttgtgctgggagttgaacttatttaaaagtactctagacagattaatttgtaatataaccacttgcagtttctggtgtttaggactggatttctgtgtactcagtttcctgaagagacacaagaggcaatgctagctaccatgagacttctggtagctaccatgagacaagctggccaaatgagcccttccaaaattccacttcctgcaaagataacaatg

SEQ ID NO: 156827 - DNA, 265 bp, Homo sapiens
ccaacatgtcgtaatatgtaacttatatgtgaagaaaatgaggccattctgcttcaagtaagtcatctgccagattgatgtagatattgaacaccttatgcccaggccccttttcacttaacctttctaattttaggcttccatagagcattgccttcttgatagtctatggctgctttcaggttccaaatacctgagagttgcctcagtcaatcaataccttctgtcatgctctattacagctgatcaatatggacaaggatgc

SEQ ID NO: 156828 - DNA, 742 bp, Homo sapiens
ggcagacctggtcacccactacatttcttggcccccacctccgcgcccccctcccagtccaagcaactcagcggttcccttgcttcacagcattcacctctgccctgctgtatcctgagacccctgggtagggctcccagcctcgggctctgggagagccagaaggttccattcttcatgcaggcctcaccagtctgccctgaggctaggccacacctaagtgaccctttgaggggcaacatcacaacaaatgagctataaaactcgactacaatcctttgaccaaataaccttactcctggcaatctgcccccaagagtgagtccagagaatctaaaaagatgcttctggcatttcccatgcacccgaggtcccaggtggcagagatgtccatacagctaggacccaggcataaccatgagcttgctgggaaaaaaaaaattcaaaacagggaactgcacattcacacacgctagaaaaaaatgatcaaagtcaataaacaagaacctctaggaggccaggtgtggtggctcacacctgtaatcccagcactttgggaggccgaggtgggtggattgccggagctcaggagttcgagaccagcctgggcaacacagtaaaaccccatctctactaaattacaaaaaattagccaggcgtggcggtgtgtgcctgtaatcccagctactcaggaggctgagacaggagaatcactcgaacccgggaggcagaggttgcagtg

SEQ ID NO: 156829 - DNA, 209 bp, Homo sapiens
gcagggtgaaaaaagcagtatctgttatttcttaaagaaacagacaccaacacatggtgaatatcttagtttttttcttcttagtagtcagtttcttgaaccagtgattttctgatacaattggtcctaagcctgtgacatcagttcagttcaagcaatggggtcttctgtgtgaaagccacacactaggtgggaaacaggcaacctgg

SEQ ID NO: 156830 - DNA, 375 bp, Homo sapiens
ctctattaatgggcatgctgataagagcgccagttgcctttcccacggcactgaaacagagggaggtgagcgcgtgaacaggtttcgtccactaaacagatctgaccatgagtcagttctgagagggccgggtgatgaaatccagagccccttgtaggggcacctgaccggggcggtggagacagcccagcaggaggaaggaagccaaacccctccccaacatcccagctttgctgagcttgtatgtgggggtgggggccggtgtccaggaagaagtctgtcccgaccttgaaaaggtgccccagcctgccaggcggctggcatttcaagggcaagggcctgcctgcctgctgtctctggggcaccggcagctgg

SEQ ID NO: 156831 - DNA, 384 bp, Homo sapiens
ttcctgagtatatggtttatgatgagcaaacagctcttacttttgccttagactcaattagaaccaaaatgtggttcattagcactgactcttcagtctgatcttacattaatgttaaaattataacactcatatctcagtttaggcatataatttatattcatatttactatttaaaaacaggctgggcacagtggctcatgcctgtaatcctagcactttgggaggccgaggcaggtggactgcctgaggtcaggagtttcacaccagcctggccaacgtggcaaaaccctgtctctactaaaaatacaaaaaattagccaggcgtggtggtgggcacctgtaatcccagctacttgggaggctgaggcaggagaattgctt

SEQ ID NO: 156832 - DNA, 761 bp, Homo sapiens
agtttttcttgttatcccatcctattagtcctaaaactaactataaagagacattccaggaataaactccccaacagaaagtaatttgcttagtatagattcagtcatgctcttattcaagctaatttgtacatttcaccttgttaaatttcacttctgaaagctgctgtgattttccctctcagatgctcatttcatatctcaaaatgaacctccctcaagttaaaataaataccaccattagttaattatgaggtgccaagataaaggacaaataataagaacagaaaagcaccccccaaagccaatattataggttatatgcctaaaaatcttaagtcaaacatgccatttcttaaaagttaacccaattaaatgcaaagaaaaagcagctatggtggctgtgagtgtctgtgctgtcagattccaaacttaacttgaaagccaatagttaaggagaggtttcagaggaggaaaagatgatttaaaaaaaaaagttattaatctaatccttacgttctagtccctacccaagccactcacacaagacatcatgcccagtgcaggatggatacgctcccacttcagctacaggaaattagctctgcaaattcgatggccctttggtgaactagtctaatccttgtctcaggtttgccttgaaggggaagacacttctatttctcctgctttcaatatcaccctttctttgatacatctcactttcaccagtgcagccctggctttagcatagaacatct

SEQ ID NO: 156833 - DNA, 373 bp, Homo sapiens
tgagtgtggtatgacgtgagagttggagatcaagatgagtgaaatgcccaaacagggaatgacaaaggacagagtattgaagcccacgcgggttgagaagggcatgtatatgggagaacaccctgatgtgactggtcagagcttgagtgaactcatccatgggatgagagtggagccaacccaacacagggtgttggagtccaagcaaagtaaagaggacatctgcatgaagaaagggctgcaacagtgaagagtgggtgattaaataattaggtaaatatattagggaatagatttgagacagggtctcactcagtagctctggctggagtgcagtggtgcaatctcggctcgctgtagccttgacctcctg

SEQ ID NO: 156834 - DNA, 152 bp, Homo sapiens
aactttttgtttagtggacatactgtggcccagaagctttggcagaggcttagtagaaaatagaaaagcagctaaaaataggattgtagtttatttaaaaattgtatttagaaaagtcttaaagttcattatttattactgttttacagtgg

SEQ ID NO: 156835 - DNA, 373 bp, Homo sapiens
catttatgtagccgtggttggctgacatggacgacagatactattatgaattctttactgcaagaagggaagattacacagaggttgtcaagaacctagccacagggaagtgggtgtgacaaaaatctctgatttatacttctatcactgcaagacagaattggacaggtatgagggggatgctgttggtgtggggatcggcaaccaactgtgtgtgtgtctgggtgctggtgtgtgtgcatgtatgtatatgtgtgtgttgtgctcaagggatctcatgtgggggcagccaaatattacctggggatggggccataaaacacattcaaatatatgacaaagattctctgcttggccaaacgccagttaggct

SEQ ID NO: 156836 - DNA, 342 bp, Homo sapiens
aatggatggacggatgacagatggataaatggatgaatgattggatagatggatgaatgggtagacagaaagactctgatactggaaagtgaatccttcacatccatggcaagtgaaccgggtaacaaagtcagaggcaagaccatagcagcgtcatttgtcactgttgccatttatacacatttttggggcagaatcggtcatgcttgaccacaggtcatctctagagggtgaggattgggggtcaggaactgtggggtgggctcagggctagggctgccgatgtggcctttgtgcctgtgagcagactgcatttccatcagcctcatccccatcttccct

SEQ ID NO: 156837 - DNA, 379 bp, Homo sapiens
gatccctattcattgttgaccaccaattggaattcagtttaaaagagagaatttattataagaattcagagataccttgtggaatgtggcagtgggaatggagctggctcacaggaatggatgggctagaaaaccatcaggatcctgtccacgtccttattggggcttctgccagtgtttctgctcaatttcttccctttctccattgtctgccttctatggactctccttggaagtcccccgcttttagtaacagcataggaagctttaaaagtcattggttagtccttcacaagctgattcagtattggatagtcagacaacagttatagacatcagatagccagtgtagatcatatagatgacttatgtatgtcat

SEQ ID NO: 156838 - DNA, 387 bp, Homo sapiens
tgatgcaactgttcctcccattactagcagagaataagaaggttaaaatcagctcctgactaaatgactgtccctagataaagtatagatgaaaactatttccatttgttgcaatgatcagtatagcaaactctgtttgtgcctctctcttatcatttcagtgcacttcagttccatcttcaactgctaacaccaaaggtttttgtgtgtggatttgtgtgtgtgtgtgaggatttatctttccgccgcttttctacctgcctaacaagctggaagtggcagaaaatgaacactttccaggagcaactgtcaaccaaagactggcttatgtaaacatttcttgactcaggctctctcaggtgggaatactctgattcttgtgtttta

SEQ ID NO: 156839 - DNA, 321 bp, Homo sapiens
agagatggattttcttcatgttgttcaactttggcctcaagtgatcactcactttggcctcccaaagtgctgggattacaggcgtgagccaccgcacatggcctagactctgtcttaaaaaaaaaaaattgtatacagtattcgaaattacctaacagtgatactttgaccctcaataaatgttagttttcttccttttttcttagttcagttctgttggtaaattggctttatggccttaaaactgagtcaattaacttgactcaattttagttttagttgatcattgataagatttcagcgcccattttaagtctctgg

SEQ ID NO: 156840 - DNA, 428 bp, Homo sapiens
tttgggttgggcagcagggacactggctggtgggcacttgattgacctgaatgggcaagagggctggctgtggtgctgaacggacagcttccctcccttgctccttggtggcatcagtggcccaagcccagccctagatagacagagagcatgtgcctggagagggcctggtttcatctcaaggtgaccacacaatcattgggaaggaaaaaggagggtctgagggcttcatccaggtttacagcccaagaaagtcctgcccacagagggtttgcatctgtgctggtcccgtcatgagtaaatcttgcctgcttgagctggcgaggagtgggaaggaggaggaggggagagagaagtagcgggacagagggaggtaagagtcagaaagacacacagtgacaaggaatcacagaaagatgcactcaggg

SEQ ID NO: 156841 - DNA, 284 bp, Homo sapiens
tgtggaaccgttatgtatgcataatgaaaagagtcaagataatgcaaagttaagttccagctaaacccaaatgacgtgacaagttattttgatttcactgaatcctaattttcttttcttcaaaatttttgaacattcagacaaatgtgccacttaccttgcacatttgtcttaaggtctaaagggataatctatcatttttgacatatagaggccctcattaaatgtttgttctttcttatctctcaaaaatatctaccataatactttgaaactaagctcaa

SEQ ID NO: 156842 - DNA, 390 bp, Homo sapiens
atagtgtaacacattactgtttctatgtttatatgtgtttagatacagatacctatcgtgtcacagttgcttgcaatattcagtacaataatacgcagattcatagcccaggggcaataggatataccatatggcttaggaatgtggaaggttgtactatctaggtttttgtaagtacatctttgtgtaagtacgtttgtgtaagtacattgtcatctttgcacaatgatgaaatagcctagtgatgcatttctcagaatgtatccctgttgttaagcaacaaaagactgttgaaaataagatacattcaaaatgaaatatggaatataatgaaatatgaaatacaacactgcacccaataactgtagactgtacattcttttcatatgc

SEQ ID NO: 156843 - DNA, 168 bp, Homo sapiens
tgtcctgcgtccctgcagctgaactccttcgagcagctctgcatcaactacaccaacgagaagctgcagcagctcttcaaccacaccatgttcgtgctggagcaggaggagtaccagcgtgagggcatcccctggaccttcctcgactttggcctcgacctgcagccc

SEQ ID NO: 156844 - DNA, 196 bp, Homo sapiens
accatgtactcgtcggctacatgtgtagcaagcacctaccttccagagttgtggaggggatttaaagtgcagacgcaggtaaacacaggacagtgccaggagtgtaatcaacatctaatgaatcctagagttatgattataatgctgatgttctatctatcaatgcaaggagttcatggcatcttggccccagttt

SEQ ID NO: 156845 - DNA, 272 bp, Homo sapiens
ctgcctggtcattgtcatagcacctgtatttctggttgtcccacaaaagttggcaaactttatttagatttttttaaaactttaactaagtttcttgcttcatggatagaaaatctgtggctgttttaaaaatacatatttaattgtgtgtgtgtgtgtgtatttatgttgagaatatctacagctttaattaattttttgtgaatcagaaacttttaggacattgctatagaaaccttgtctcattgcactaaatgagtctcattcctgat

SEQ ID NO: 156846 - DNA, 409 bp, Homo sapiens
tccttcaaaggaaaccttaaggaaaagtgtaactgctccagcgagtgaggcctgctcacccaaccaccagagccctaaagcatgttcccagaggggttccttgacagcacagtttgaaaactgctacacagcataatctgtaaggtcttctctggttctaacattgtatgattgccttctgtaaggcaaacagccttttctgtgatgaaaggacagctgggagaaacttgaaccagaccttgacagatgggtaggcttttgatctgcagagaggattccagagtcaaatagcgtgagcaaaggtgcacagacaataagcaaggcgtgtgggagggtccaggaggccaaagtagccgagggaagtcgggggaatgaaggcagtgcagcaggtgacataaggacatgctgg

SEQ ID NO: 156847 - DNA, 549 bp, Homo sapiens
gtgcatctttgttgttttcacacaacttctcatctgaaacaaagtcttaagttacagcagctctggtcttggcttaatggagtatatggcaaaaagaggatttggtggcagtgcctaggaggatttttttttttcccatcaacaatacttctcatttagcctgttgattgatacggattatcaggggactccttccagcttccctagttggagtttttttttttttttttccttttttgaaacaggggtcttcaaaaagggaaaaaaaaaaaaaaaacgctgttgggggcggctggggccccggaaaaactttctaaaaaccatgcggggggcgggcggggcccaaaggggacagggcaccggggcaaaagggggaccaaagaaaccggggcccagaaacgggggggggattctccaccattaaaaaagccccgggggacaacggggcgggctggaaaaatcccaaggggggaagcggggagccaacaggggcacattaacggggggccaaagagagccggaataaataaacccggaacggggggagac

SEQ ID NO: 156848 - DNA, 341 bp, Homo sapiens
tgctagtcaccttgcagtaaaactgcatatgctagagaacgcctccaattagaagaatgtgccttcgtgacttttgtatggggctcttaattgctatcacggtttgctttctctgtccatggcattttcatagcaatttctctgctggtgaaggcctggcactgttgcatctttcaagggttttggagtgcgagagggttataagaatgggaggtagaggtccactagaccatctgagacttcttcccttcatttagtcatttacatttatacatgtaaagaataactatgcacccagtaaaatgccagagatccaagagtcacattcatgatgataattt

SEQ ID NO: 156849 - DNA, 100 bp, Homo sapiens
caccctgcaccttcctcctggccccccacaccttcccccatctataaggggaaaggaatgggacagacacgtggtgaggctaatccttgtcctcaaggcc

SEQ ID NO: 156850 - DNA, 582 bp, Homo sapiens
tgcagacacaacatactttaaaaatgactgcatgtttggtcagagagtctcaacaaatttggaaaaattaaaattatacccaacatattctcaggtcgaatgaaatgcaaatagaaattactgccaagaggaattctcaaaaccacacaaatacgtggaaattaaacacattgatcctgaatgacctttgtaaagcaagaaaattaaggcaaaaatcaaaaaattatttgaaaaaaacaaaaattgtgacacagtgtaacaaaacctgtgatattgcaaaagaagtgataagatttgtagcactaaatgcctacatcaagaaaatagaaatatcttgttaacaacctaacattacacctaaagaaatagagaaagaagaactaaattctaaatgaagaacccagttctagcagaagaaaagaaagaattaaaatcagaacagaactaagtgaaattgagataaagaaaactattcaaaggatcaacaaaatgaaaagtttgttttttgaaaggataaacaaaattgatagactgctagataaacaaaggaaaaaaagaagatccaaataagcacaatcagat

SEQ ID NO: 156851 - DNA, 447 bp, Homo sapiens
cttctgactccatctattttttctgccatcagctaagaccatctaggaaagaaggtattgggagagggaggaggagttcatatgaaaatcattttccaggacagtaaaggaactaggaaaatatggtatgattatctggcagtgtcagaggcgtgttaaccagagcaactccgtcttgaataggagctgtgtaaaatgaggccgagacctgagacctactgggctgcattcccagatggttaaggcattctaagtcacaggatgagagaggaggtcggcacaagatacaggtcataaagaccttcctgataaaacaggttgcactaaagaagctggctaaatcccaccaaaaccaagatggcgacaagagtgacctttggtcgtcctcactgctacactcccaccagcgccatgacagtttacaaataccgtcgacgcggccgcgaa

SEQ ID NO: 156852 - DNA, 457 bp, Homo sapiens
acagaaaagcctctacaaggtgcactgccaaagggcagggagggagggtattctgaagtttcgaaaggcatctcagtagcactgtatagtctcccttggtatctgtcatggagaactggctccagaacctcctgtgaataccaaaagccagggatgttcaagtccctgatataaagtggcatagtatctgcgtatcacctatgcacacctctagagtacttgtaatacctaacacaatgcctacacttgacttgatttgcatggattcaatgtagtacctggtgcttggcaaattcaagttttgtttttggaacttggtggaattccaccccacccataaatatttctaatctgaagctggttgaatccaaagacgcggaacccacggatccagagggctggtggtgacatctttagataccaccatgaaggaagggaagctctaccctgaggactg

SEQ ID NO: 156853 - DNA, 540 bp, Homo sapiens
ttgaagctcctcaggtgattccagtatgaagtatgaattatgaagtattccagtatgaagccaaagataagaacgattaggtctcttctttttctctcctgtacagctttggaccaactacatttactttcccagttcaggatacttgaggaatgattggtctagaagaagcttgttcttatgcagatatactgagttcattttcttagatcaacatgaaagaatgcaaagctaagcaaattatgcaaagggacttattctgcattccaaataattagctaacaaagctagttttgcctgcttgtattgatgtagtttaactggtaccaaaactaagaatgaggttactgactgatttttctgatttaataattctagtcctgccctgccctttagcctttgttttgtattctttggtatcaaaaatgaatttgctctataaaatcaaagcatcattaagaaaaacgtgacatcctctatctgtgccttatgtagctgggtccttctcactgtattctccagtagtaccgggcgtcaaag

SEQ ID NO: 156854 - DNA, 473 bp, Homo sapiens
cactctagtctaggcaacctaggagctcttattaaaaataaaaaaaagacaactagggaaatgtgagtgtggactacatattccataattttaagttatttggatgtgacaatggtattgtggttttgtagagaaatgcatattttcttagaaaacatatgcggaagtatttatggcaaattcccatgatgtcagtagcttgcttttgaatagcccatcataacaacaacaacatgagtgcaaatatggcaaagtgttctcaatcaccctgaatagccaaaacagtcttgaaaaagaatgaagttggaggattcccatgtctcaatttcaaattttactacgaaggtacagtaatgaaaacagtgtagtggtactggcaaaagaaaggagacacagatcaatggaacagaatcagagtccagaaataaacccttatacttatcctcaattgatttttaataaggatcccctag

SEQ ID NO: 156855 - DNA, 288 bp, Homo sapiens
ctcgtctggtttcgggggtctggcttggctctcctgcaaagttatttctagttaattcattatgcagaaggtataggggttagtccttgctaaattatacttaggataccccattatgtggagttcacacgaccacaggctcctccctttaccctgaggggctaagcaaggtaataggaagagacctttcctgctctccatttgagcatatgagttatatccatccttcctctttgcatgaacatacacaaacacacatgctcatgcataaacagggtaccgagctca

SEQ ID NO: 156856 - DNA, 144 bp, Homo sapiens
aatctttatcaacaaaatgagatttgacttttagttggaaattttcctgcaggacagttttagctttgggcttttcagtattctgttatttgtctagtttttggtcagtgaaagaagtaaaatctgtatatatgtaactccaga

SEQ ID NO: 156857 - DNA, 263 bp, Homo sapiens
cctgccaggggaggcacgaaacgggaacaaattaggaaacagtgtaagagtagactttttaacctgaaggttctagcatgctgattatgagaagcaaacatctatactataaccatcctatgcccaatttgcagctatttaaaatattcagatttcagatagaagaattatgtgcactaaaaatacattttgcctgagtaaagtgtgtactaagtgttgagtgtttttgacttatgaaaattgtgaatatccagtgtaggtgt

SEQ ID NO: 156858 - DNA, 114 bp, Homo sapiens
ccaaaatcacagatacatacacacattcacgcacacggcaacctcaggagcgtgacacaacacacacaaaaccaccactaagcaagtgcaatttgcagccttggagaccccaca

SEQ ID NO: 156859 - DNA, 287 bp, Homo sapiens
catcacacatcttccagtgcccacaaccaaatgggaagcaaatatggaacaattttgccaagtgttttctgaatctccttgaaaacagcacttttacattataagatgccactgtactaatgtaataggtagatgcagagaagagttattttgagggctgtaatttgatttcgttatcttaggcaatcaagattgtttaacaccagaaatagctgactagaacagctgctaaaacagcgctttgtgtgggaaatgaagaaaaggttcagtattttgacagccatttc

SEQ ID NO: 156860 - DNA, 539 bp, Homo sapiens
aagccataacttattaaagtggggttaagaattccaggttaaccaggttgaaccaatgtagctctaaatgtcagaattcagacttccctgggagatgtggatgtctcctgggttgcttggggtcctctatattgtcctagccacactaaacaaattatatggttattgcagaagcagtcccaacactacaggaagtagtgatagaagcagcttctggggtaatctatgaccaagttccacaatgcttgggggattggagctctcaaggtgtgcctgggtggtctacacgacagcccccacacacagcctggggtttgtctgtgtctactcaaacacttaacattgacttccaaagcaacatctgtgagaggttcatctaccaaagggctacaggagacagaatgagggtgttgatggtttcaagactcagatatcaacaaagcatcattatgcatttggttggtaccaagagacaacaagcatattattgtccttatcatccaaatataccatggctttcaaagttaatacatttatgg

SEQ ID NO: 156861 - DNA, 590 bp, Homo sapiens
ttcacagatggaagacaaatagctgcacctgaagattcttcaaaagttactgctggtagggaaagtgttacttctgttccagggacaactggcttttcaggttgcagtgagaccattgtcactgtgtttggtacagatgtcacaagtggttttcgaagtctgaagcaaaacagactacacaactctatagaaatttatagtcaaaatagtaacaacaggttatgagataggccttagacttagaaagtctggactgactggattctcaaatgacaagtcacacatttggggcaagttcatcttaccatctgtgaaatgtccctaaataaacgaagtattagtacagggtcttgcatatggaaagtgctcagcatttagcagtgatgggattcaggacctgctaccccaaaatatggcactttggcatttgaggaagcagtagaagcagaaaagttactcgttgaccttctcccctgaagtaagccaaaacacaattctttgaccttcctgtgaaataagtaattaaggctctcatggagaggtgcccaccctatatatggaggaaaggaatgttcttatctccaaaggca

SEQ ID NO: 156862 - DNA, 236 bp, Homo sapiens
cagggctgagtatatgacctgaaactctggctgtattcagtattacacaattattaggcccctccttgagaccctccagctctgggctgggagttgcggagaatggcaaagaagtatccacactcgtccctgggtttggatgttctgtggatacactgaggcaagaatgtggttataggattcaaccggaggaagactaaaaaaatgtctgtgcagggctgggacccaatgagatg

SEQ ID NO: 156863 - DNA, 348 bp, Homo sapiens
ggcccagagccacggacagggtgtccaatcattggaactggacaaagtgaaggacctgtgccagacagagcctgtcagtgagggtgcaaacaccttctgagacagcagaccccaaggagaagacacaaagggccaggacccacggtgagtctaagcagacctacaggtaaaccagccccccaagtccatggctgttggggccttcagactataaatgaggtttcccataggacatacccactctgcactgcagcagagccggtgaagcacgtggtaggccgggtctgctgaaggccgggaggaggagggttgaacaaacagagaaaaacaaaaaacagcacaggcctg

SEQ ID NO: 156864 - DNA, 711 bp, Homo sapiens
gtaatgccacagcgcacgtggtcttgggaaaactgaagacactgggatattcagaaggccacggcgatccagcttatcctgttgggcaaggtgctgggagtgaaggaggaaaagggcaggagagcccagagaggagacaaaagggtggggtcactgcatatagtggccaagagctgctaggactagtgcacaggacacagcagcctcttccagaaatccccttcaacaagggctctccagctgagcttccttggagaccagggaaggaagagcccacagttgcccccacccctccaggccagcccatcccctagagactgctgacagctgggagaagggtgcaggctgcaggccacccgaggtgcccgccccgaccctggctttcatttttaatgagccattttccaagtgcttcacaagcaggcaggcaggcattgtttgcagccagcaggggagtcctgagccggctgttaatgggtttccctcagctccccctcctgggggtctgcacagccccttcggatgaaaggagccctctgcagagggcatggtgaccatgggcatggcagcttctgtcctctgttcgggctgtcaaagcctaccccaatctgcctggggaatgccttcatgagtgccaattagagttgggacaaaatgtgtgtgatttcagaagccaggggagttgagacactcggaacacagcaacttctg

SEQ ID NO: 156865 - DNA, 398 bp, Homo sapiens
  misc_feature (295)..(295): n is a, c, g, or t
ccttatcacttaatctgtcccagaactctaccactgatgaccatgtatagtgtctactctttatttttaatttctttatttcaatgtgcagcacacagtgaatacatctattctttgcattaccctcttgaaaggcaggataacatttgcctcatcttccttatacctctccatgatttttctcagaataatatatggctctatagttatatctgctaaaactatttttttgataataaaagaaactgttagagcctagagattaaggatagagagattaaggatagagagattnaggatagagagattaaggctagagagcattaaggatagagagattaaggatagagagattaaggatagagtgattaaggatagagagattaaggatagagaga

SEQ ID NO: 156866 - DNA, 525 bp, Homo sapiens
ccttatcacttaatctgtcccagaactctaccactgatgaccatgtatagtgtctactctttatttttaatttctttatttcaatgtgcagcacacagtgaatacatctattctttgcattaccctcttgaaaggcaggataacatttgcctcatcttccttatacctctccatgatttttctcagaataatatatggctctatagttatatctgctaaaactatttttttgataataaaagaaactgttagagcctagagacctgaacttatttacagagactatctgctctgtcttctctcacctaccattaattatctctttctgctgttatttctatcttttgcagtttgaaaatcattttccttcctagaaaaggcagaagtgaaatatgagctaagcagtgtgcctttctaacacctgctagccttacaatattttctctaagcactgagtgttatccttcttacgccgaaagaagcaaatgatctcttagttgtccccctacatgtctttttcttttt

SEQ ID NO: 156867 - DNA, 595 bp, Homo sapiens
  misc_feature (505)..(505): n is a, c, g, or t
caggagttcacggaaaagtcttatctttgccagcctcaaaaataaggtcaagaagaaacagtctctcggtttacagttggacagttgtagcctcaagaacaaatgaggtattaatattagctaggaatctctgacaaggaccagaacttgcatcctcagatatcttcagtgttgtgggtcttcagcacagccttgaagataattcctaaaaaggctcagtccacaaaaatatcaccaacttcaaaacaaattcacatcacatcattattgctcaggaacaaatgcttcagataaaagtagaaaagccagataactcaaactacagaggaagaaatgagacctcaaacttttgctgccacttgggaacaacatttttttttttagatagggtctcactctgtcacccaggctggagtgcagtagagcagtctcggctcactgcagccttgacctcccaggcctaggtaacactcccacctcagctactcgggaaactgaggcaggngaatggcgtgaacccgagaggcggagcttgcagtgagccgagatcgctccactgcattccagcctgggccagagtatgagactccgtctc

SEQ ID NO: 156868 - DNA, 133 bp, Homo sapiens
aaccccaactctttcaatagtctaaatctcctgccaagatgctcagaggcattgggaattttatcaagttctttctgaagatgtctctcccgggacccactcccagctgggctggctgctggcctctctggag

SEQ ID NO: 156869 - DNA, 556 bp, Homo sapiens
caggtgatcatgtggcctcagaagccagagctagatgtgctcctgatcttgtagcccctcgtcctatgcctcatcaaaaccaggggtcattggaatggactgaagaaggagaaaactagaaaggatctgagggaagtggtctggctgaaagcttgacgtggacagagtcctggctctcaggcagacacttaaattctcctggtgctgcagacatcacagctgaatccatttaaaagaggatggcaaatatataaatcatgacctcaaaattccttcaatctctcacaggacaccagggaaatattttattatccctcaataacaaccagggtcaggaataaatttggaattctttaatttaggctccagttcatttgctaaattaaatgcttgaaataatttcctgctatgaaaatatgagactcttactattcagataaatagacttttcaaatcaaaggcttgaaatcttaagaattatctcaaaatgccttttgaaaaaccttttctgttttggatcataaaatgtcaaaggcacactatcatgaaccacagt

SEQ ID NO: 156870 - DNA, 528 bp, Homo sapiens
gcccaaggttcccagatttggcatagcctgtatcttatagaccagaagccagaggcccaggaagactaagggccagatactggtctaggcactggagaaaccaccatgaacacaacacccaggttccttctctcttagaggttaaagtcacttctttcctttcctcatgagaaaaggggaaatttcagtattggtattgaattcctaaaaatagggagatgttatgattccttggttttaaaaacaggcaggcagaaaactgttttcctgatgtaagtgtgtatattcaagaaggggaggggcatgtggtaggtgggaggcagtccagtaaacaatatttcgagagcaaacatagcctagtgaataaaactatctagcctaggtgaggtggcctgtaatcccagcactttgggaggcccaggtgggggggatcacctgaggtcaggagttcgagaccagccagggaaacatggtgaaagctcatctctactacaaaattacaaattaggcagcgatggaatccccggt

SEQ ID NO: 156871 - DNA, 661 bp, Homo sapiens
ggattccagcctccagtgtcttgagggcttgtgtggcctccccctttgccctacctctgacagctttccagtcatgttcgtatttgtgccttctggttcagtcatttctatttttcacacacacaacagaagaagttgaacagatcctgagctgagctcacctaaactaacccagtctcccaagaaaggccagctccttgttggaaacagtgagttcctcttcaaaggtcccgcttgtcctctattttcaaagcttaacttccttgcctccttgcccctagttacaataaacaactttccagccactcccaatctgtaacccacatccattcccaatctgtaacccacatcagttcccaatctgtaacaacccacatctgttccttatttgaggcccttagttccaaaactgctcttcccaccgctagagcccctgatccatttgaagtagccagtcgggatcagcttagattgtgctgtccaaccccagccaatggggaccggacacagtagtagggactgactgcattagggataaaaaccccttccctcctttgttgggtgtgctctcgcagtgaccagaagaatgagcagcagccttctgcggaagtaaatttgcctcgctgagaaatcctttatttgagtgctcgttttctttgtg

SEQ ID NO: 156872 - DNA, 136 bp, Homo sapiens
aggctaaagggacacagagtgattgggggctattttaagtagaatgataaggaagagcctgtctagagagctatttgaacaatgacctgactgaagggacaacagaaagcagtgctgacattacaggtagcaggat

SEQ ID NO: 156873 - DNA, 489 bp, Homo sapiens
agctactcagacaacaggggaatgcagccgaggcatggcgtagtcattgtgcttcccggacacgtaagttcttgaaggacagtggtggtaattctaggctaaggaaccagcatgcaaaggcatagtgtaacttaggttctgcattatacagtcaagagccacaaaaagttttagaatagagaaagaggccaagcgtgatggctcacacttgtaatctacagcattacgggaggctgaagcagggaggatagcttgcggccaggagtatgagaccagcctgggctacatagcgagacaccgtctgcacaaaaagtgaaaaaataagccagagtacccctgtggtcccagctacttgggaggctgacgcaggagaatcacttgagcctgggaggcagaggttgcagtgagccaagatcacaacacgccactgcactccatcctgggcaatagagtgagaccctgtctcaaaaaaaaagtttctctgaaaga

SEQ ID NO: 156874 - DNA, 242 bp, Homo sapiens
ccaaaatttatgctgcccaataaaatataaattaattaaaagtaactgaaattcaaaatgtattcctcatttacaccagactcattcaagtgctccatacccacatgcagctatcggctactgtcttggacagcagggattataggtttctatcatctcagaaaggtgtattgggcagcgccagtctaaggaaattaaacttgtttttcttgactgttacatactatttcatagtctgggtg

SEQ ID NO: 156875 - DNA, 367 bp, Homo sapiens
caacctgtcccagggcagcactcgagagggagggaggccctcggagtagccagagcccctggagagggctgatagatgccccacagggctggaggtttctgtatggagtcctgctgtaggtcactcatattaggcatgatgtgaatgtgctccactcagctactgtgatctgattgaaataaccttttaagaaaagagcttgcaactgtggaaagaccactgttttggatcaggttgacatggagtctgggctttgatgggactgtatgaaccgccttaacccctgtgtttacctgtctttaaagtggtctaataagccatgacagtgtcctctgcacaaatcctttgtgaaagaacaatttgtaat

SEQ ID NO: 156876 - DNA, 465 bp, Homo sapiens
tgattttgatcagatatctaggaaggtgcaggtttagaaatttggtgtctcgatatcaaaggacatttcagtaagaatagaatttctcatatgacaagagaggcgcttaaagactgggacggaaatgaaaaataaggttaaaaaaaccctaaaacacttatgctgaagaaatgaagtgttgaaggagtaatgtcacttatttactctcgcaacccaggtgttttttttttggagatggagtctcactctgtcgcccaggctggagggcaatgtgccaatctcggctcactgcaacctccgcctcccgggttcaagcgattctcctgcctcagcctcctgagtagctgggattataggcggctgccgccatgcctggctaatttttgtatttttagtagaggcggagtttcaccatgttggccaggctggtctcgaactcctgacctcaaatgatccaccagcctc

SEQ ID NO: 156877 - DNA, 713 bp, Homo sapiens
tctgatgccaggggactgaatagccagcattttttggatattgtgtttttgcacctcatgtttatgaagtgcccgttttccactttgtgatattttcacttgacggttgatgaggtgaagcgctgttgtgggttgagcatctgtgcacatgcatacacctgctgtgcacacgcatacacctgctgtgcacacacatacacctgctgtgcacacgcgtacacctgctgtgcacacgggtacacctgctgtgtacatggaggagccactgaaactgctctcagcgttttcagtgctttggttttaatctgcaaaatgtgttgatgacaaatctttctcctcttcctgtagatttttttaatagtgaagtttatttggaattaagtttagtgaattcattaataacctagttggtaatggtcttttggcaaaaatgagccatagttataaagtagtaacatgttactgtgtggtttagaactagattttgagagcagttccaaagcagattgtttcagaatttatttttactccctggattaagagaactatatttttaaaataattctgttatgtttacaagtatgtgttgtgtaatatagtaatgcccttctccgtaaaacttgtcttcctaaaactggtctttctgtctatagcgggaatattggtcaaacctgtcaaataatcatggatacctactagttgctcagctttga

SEQ ID NO: 156878 - DNA, 290 bp, Homo sapiens
gcagttatttattatgaattgtctatgtcagacactgtgcagggctctttatattctacataagcctcgtgcatgcatgctagatgttcatatcaccattttacaggggaggagatggaagcttaaaatgcagtatctcactgaaaacacaagccgatggatctctctggcgtcaaaacctgtgcttttcatttggagtgtgctttcagtatatagttataaaaataagtgctttgatgctcacaggagccttaggaaatagaaattgggagaaagataccccaagtgta

SEQ ID NO: 156879 - DNA, 204 bp, Homo sapiens
acaagaatgcatgggaggaatggaaagagaggaaatactgcttccaaggcgaaatgctttgaagaagtagagttatagggatggagagagacccttgtaggaagaggaaacatttcttgatcatagtggaaaaggacacaaacatgctaatccctgagccctcaaatgaaaaataaggttatgattggggtcccagcccagagt

SEQ ID NO: 156880 - DNA, 311 bp, Homo sapiens
gaggctgaggtaggagaatcgtgtgaatctgggaggcggaggttgcagtgagccgagatcacgccactgcactccagcctgggcaacaagagttgtctcaaaaaacaaaaaagaaagaaagaaaaaaacaaccacagtttcatcagcacagcaaaaaggtttttgtttttgctcttggattttgtcgtttggtttttgcttaatatcaaatatccagtcagtgtaaactcgtttataatttggtcctttgatttcaaggagctatgatgcagttcgttgtggggatgtgttgtctccatgtcatacatgtg

SEQ ID NO: 156881 - DNA, 286 bp, Homo sapiens
taagggattggtaggggccaagacctcctcccagcccagccgcaggttgggggagccagtatgggtgctggaagggtagaaggtgggcagcccaaggtcaccgtgcccctccccccggttccaggcactgttctctaatcctggccagctctaaggtaacagttctgcctctcctaggccttcgccctagcccccaacccgggtcaatgggagccattcctgtgccgcatctcccgttcctactctatgacacagccctttccaccgtccagaagggagaggcatc

SEQ ID NO: 156882 - DNA, 308 bp, Homo sapiens
cactggcactcaatcccttgctggaaacaagttacaatattattttgtcttttcttcaaaatattaatttgctaaatcagagttgtggtaaagcttggcacagtccagctaataggaattgttgccagactttggacaaacacatatgcatgtgctcgaattcagacaaccccctctgcctgggccacagggagggagggctgtgtccattcgtcttgttcttgcagttagggctctgggtcaggacgttcagcaaattgcccattcccctgtatgtgcactcagtaaatattaattgatgatgatga

SEQ ID NO: 156883 - DNA, 447 bp, Homo sapiens
  misc_feature (293)..(293): n is a, c, g, or t
gaggaaaggcagacagtgggagtatggttgaagggtttgtgccttttgtaatcagtttacttttggttttaccaagagatgatatcttgaattcattcaaactagtgtctattgcagtacactaggaacatttgaattacaaaaggagaggaggagcctccacttcccacagttgctagtttacctgcaatcctttgagggcagtggtaatctccatgtgagctttctggtaaattccacactaggaccacattcagaacttacctgtttcttggccgtttacctgctatggncaatataatggcatcggccatgcggttatcatgtaaacaaaggtcaacagcactctcaaaattgcccgtcagcaaagcctgagtaattaaaccatcaatgtgcccactgacagagatattaaatgttcctccagataagggtagaaattcagat

SEQ ID NO: 156884 - DNA, 464 bp, Homo sapiens
ggaattgaattagagaacacgcaggtggtgtctgctggagaactgattgtcaaaatgttgtgttgggtggtttgtgagaacaggaggaaacccttttttcccctttagccattaacctaataaacatgttgtccctacattgtcttctgacaggttctcctccagattggcatgatgatcacatgtcaccgatggcttggaaatgttgagtgacttgcccaaggtctcatagagccctgactctagaatcagagctgggattaatcatgggcatggcagatgctgaagctcatgtcgcggctgcctggccctggctgctcccagctacaggccctggggcctcttcttttagtctcagtgcactgatttgtgggctccactccttggggacctggaagagctgttcagtttctcctcacttgctttggacctttggcagggctgctaaggtccccccataactt

SEQ ID NO: 156885 - DNA, 376 bp, Homo sapiens
cacacggccgctgagctgagtgaggggtgtcccagaaagaaactcttgatgctgtcccttcctgtgatcatttcagcttaaaacagcaaagagcaaaacacaactcctccccagaggctctccaagcccagcaaccccttcctggcctccacaagctcagtcattccccagaacagacctcgagactcaaaggtctcaagcccgaccacctggctgggcacctgcctgaagaaacgctgcctggggccaggggcagccttgcagtgacacgggtcaaaagccagcatgagggatcagaaaacccccgtcgcggaccctccactgggaagcgcgcagagcttcccaaccaagcgaccctcaacccacagcccactga

SEQ ID NO: 156886 - DNA, 566 bp, Homo sapiens
aacaatatgttgggatgtcacaaatggacttagcctacagagatttatattcaacttttgaccagagagttccattttaatgtgacactgagagtaaaaaactatcttttcctccttacctatttctcttcctacattctcggccaggaggaaggcactgctacatacccagtcttccccagcagagcctgagcagctctgttttccttctacttcccctcttctttcacatctcatgaccaagcacttcctattctgtctcccaaatgatcacagattttttcctccacttttgtcactgccactgcccttagcattactctgcctttagagaaagtctcttaattggtttggttgcttccttcagtctttattatacagaccactacacgcacatctgacagagacttttcacctttttatggttgaatgactgaaattcccagaataaaattaaaaccaccccagcatcaaatttgaggtcaaacagaggtgggtttgtatcccaggttcatatactgtccagcagtatggtctcagaaaactgacctccttaggagcctttg

SEQ ID NO: 156887 - DNA, 209 bp, Homo sapiens
ttcacagctggggatactttccattgcataaggcacctacccctaaagctttcattgtttcactcttaggcagttatgtcattatttcacttacctcattggggaaatcattgtttaacaaccaaatataaatggggaaatagtcttctactttatcttctctaggataacagcttccctcccccacttccctccacagaaggattagt

SEQ ID NO: 156888 - DNA, 153 bp, Homo sapiens
actaaccatttttctatgcatacagagccacttagggtcattagaggcagtctcttggtgactctaaaacaatcagatgaagctcaattacacagttgtatttacaacggtaaagataaatttaaggatattacctagctccagaatgtctaa

SEQ ID NO: 156889 - DNA, 660 bp, Homo sapiens
atgagtcattcagacaaaatttttgatccatctgttggaacatcacaccagatcatgtgaactgtgtgaaatgaacagtgcaaagacaagacaggatccctgctctctgctcttggacagcttaaaaagacaaatataaaaagggaaggaataaaacttttaaacacgcacaactccaacctaataaagtctgcatggaatccaggatcgaggttttgttataatcttacacaaaggttatgtagtagacaaaatctcagggactaatctcacacttgtttctcctgtatttattcagtctgggttttgacattaagatgtaagatttacattgccctacattgttttttttctaaaatgtagatttcattctggtctttgcatgtgagattaagaggaatcaggaatataagtccatgaaaaactgggggaaaggtaaacaaaatgtaagggaaatttaagaatttttaagtggacagatgtaggtcattatgggatttcaaagaaagagacacacatacattgagaatagcatgtgaaagttgcccctcctacaaaaaataatgggggaaatacactttcaactaagtaatcaagctgagtgcaacttgcaaatccttcttaaattctgaaacacacacgcacatacacacacactta

SEQ ID NO: 156890 - DNA, 1119 bp, Homo sapiens
ctcagccagaggggagtttatcttccaggagacatttagcaatatctggagacacttttggttgtcacaactcctggaagggggtgctttttgcttctaatggtagaggtcggggtgctgctgaacataccaccatgcacagaacagcttctcacaataaagacttacttggcctaaaatgtcaatagtgctgaggttgagaaactctgtcttaagggtgcactctgttcatatgtgttctggggttttggaatcttatgtggtgaggcagggccacaggctgctgactgaactcagtaagtttaggggctcatactcacttgtgggactaatggggagaaatgttggttcttgaggtaggtacatagggtctcctctttgcctaggtgaccagcaggattcacagtaacccaggtgcccagtattataagagtacttgatttgactgcagaagggtggtgtttctgccttgggtgttgtcagcccatttagctttgtgggctttgacctcgggatcctccctcttgtgtaggcttatacacatcaatggaaagtatttgctttgaagatttcaacatggaagtagttcattgctgacacagcggcatcaaagcccagcgcctgctcacagctgagactccattccccctgagtttgtttggcaagggtgacagtgagcaggaggaagagaaggagggagactgggaaggatgagactggagggaagaagaaacactgtatgatccctgagtatccattgtttccatgctttcctgctctcttggacccaggcctggtcagagttctcagtagaaaagatacgctcctcattttggctagttgctatggacagacaactttcttgttctgagagtgatacggggctagggaggactgggtcttgatcatagttgtttcaagactccaaccctatatatagttcgaatgctttcataatgggactaaatgtatttgtgtaattaaaaacaaagacactggccaggctcagtggctcatgcctgtaatctcagcagtttgggaggccaaggcaggaggatcacttgagcccaggagttcatgaccagcctgggcaacatagcaagaactcgtctcttaaaa

SEQ ID NO: 156891 - DNA, 386 bp, Homo sapiens
gtttcatcacttacaggaaaaccacccgcttatctgaaatctgacctacttcgggctggagccagacagggctcctgcatcccacagggacactcaggctgtagttgtccagatccatgcatccagccaagacttcagcaaggagcttcaaccctaccatgctcccagtattcacagaggcagtgggggtcagggctgagatctgcccctctggggcgtcacaggtggtgaggtgtgctcagcagggcctaaaatcttaggttccaatgagtccagtgcttcctttcttatatccaatatgctacagatgcagcccggcccatacgagtcgccacactcctgggattcagtaattcaactttctcattttaggggctgtgtcatgt

SEQ ID NO: 156892 - DNA, 494 bp, Homo sapiens
ggaggtggaggttgcaatgagctgagatcacgccactgcaccccagtcagggggacagagcaaagtttcttttaagaagtttctagagccaggcatggtggctcatgcctgtaatcccagcactttgagaggctgaggaaggcggatcacttgaggccaggagttcgagaccagcctggccagcatggtgaaactccatctctactaaaaacacaaaaattagccgagcatggtggcacacgcctggagtcccagctgctctggaggctgaggcacaagaattgcttgaaccagggagacggtggttgcagtgagccaagatcctgccactgcactccagcctgggcaacagagcaagactctgtcttaaaaaataacaataaaaagtttctagaggaaaaaatattttaggtgaaactaaattactattctttattcaatgattttcacgttcttattttaggtgaatagttaaataagctaaaacactttcc

SEQ ID NO: 156893 - DNA, 460 bp, Homo sapiens
tcactgactcctactcatattttaagactcaacttagatactgctctttcccagaagcctttcctgacttccaaatctggattagctgtgccccttggtgccctgagcttcctcccttgtggtattgtcttatggtgcattgaagttgctggcttacatttcttctctgagttctagctttcagatggcgagattgtgtctgagtttcaccttacacccccagaatctggtacagagcctggaatccatgtcccttaatatttgatgaataataaatatactgggtgtgaggaacgaatgggaccttcctgagatatgtatctggaagtcattaatggggaaaagtgctctcaagagtggtctaaagattttagaattgttttcacagaaatagtgtttgaagtcattggaacgagacactatgggagaaagaagaaaaaaatgtcgacgcggccgcgaa

SEQ ID NO: 156894 - DNA, 434 bp, Homo sapiens
gtgaaaaaaattctggttggtgagattgcatgtcactggataagagcatgagctagacagacccagtaaagaccaaaatccacatagttaatttggagacatgcataacataattatttgaatcaatcaaaactgaattaggaaaaggggaattccagattaatgtgggtaaagaaacagctgtgttattgtggctttttaggcttttcatttgaaatacccatgagccccctagatatcataaagttagatttaataaattatgaatgatttataaacttagcttatgataagatcaaaccttatctctgactgagcaaggctactgaaactgcttaatttgtgctcctccatatcatgctttgaagaatgtgtaacccgttcctctaaaccttagttttaaacttgtagctaagaagaatactttaatttca

SEQ ID NO: 156895 - DNA, 332 bp, Homo sapiens
gtgatgggccaagtgaaagagatcatgaaaactgaacaaaaagcacagggagaaaaaaatttactttacatttgagtttctagataatatttcattttatttttacaactaataataaaaaatattttcaatcttggtacttgcataatcactggtagaaaagaaacagaaagagcggcaaatcttttttaaatggaagctcttcctacacagtttatgctgttatgtggccagtcaccacttacacgcaggtacccagctgaactgagtcagtcatgaccttttttttgtttttgtttgtttgttttttgtttttgagatggagtctcgct

SEQ ID NO: 156896 - DNA, 669 bp, Homo sapiens
atttgacttagacaatattatgttcatccatggttttaactatgatgaagtgataacatgaaattctggatttccagcccagacctctgataggaaatccaaaaccatatgccccacttgatagcccataattaaagttttccaaaacagaattatcattcctcttcctgatgccctctatacatatagactcctccactcttcaacatttcctaagccagaaatttgagtgtcctgctcctttctccttctttaaatcctattccacattgattctgtcttccaagtatactgatcccagcactttaggaggtcgaggcaggcagatcgcttgagtccaggagttcgagaccagcctgggcaacatggcaaaaccctgtctctactaaaaatacaaaaaaaaaaaaaaaaaataacaaacaaacaccttgtgcggccccgccggggccccgagaaaaaagcttctcaagaacactgtcctctggcgggccgcggcgccccagcatggtctaaagtcgaaactgtggccacacgctgcccagaggaacagcggcgccggactaagtgtgggcctccccaccataaaaaagccgcgggggaccacacgtctggaaacatccgaggcgtcggacgccacggcgcttacaacaggctcaggaccgataaatc

SEQ ID NO: 156897 - DNA, 403 bp, Homo sapiens
  misc_feature (54)..(54): n is a, c, g, or t
tgatcatagttcattgcagtctcaaactcataggctcaggcagcagcttctcanctctgcctcccaagtaactaggactacaggcatgcaccaacacacctggacacagtccccacctctcagccatcttcagagccccacctccacctcctcaggctacaatggacagaatgaagtagagaaatcagaaatgcgctttgagataaatagtgaatgaaaccagacaacaagtgggatcacgtccaccacaaaaccaagcatgactttgcctacactttcagggatatttttacagggtgctgcagtactagatccaaggacgcaagagctttgcaagaaccaaagaaaaatatcaaatcctggcttaccaaaacaaatttaaaaatagacagaggctgatgca

SEQ ID NO: 156898 - DNA, 629 bp, Homo sapiens
atcccagcactttgggaggccgaggcagatggatcacctgaggtcaggagctcgagaccagcctgacaaacatggtgaaaccccatctctactgaaaatacaaaaattagccagacatggcggctaacgcctgtaatacaaactacttgggaggctgaggcaggagaattgcttgaacccgggaggtggaggttgcagtgagccaagatcgtgccaccgcactccagcctaagcaacaagagcgaaaccctgtctcaaaaaataaataaataaaaaataaaaaaggtattctaatgttagctacccttacattcctgaaataaacttaatgtgaacataatgtattatctttttaatacattgctatattcagtttgctaatcctttgttaggatttctacatctatattcacttgcattattatgaaacataccggtaaaaccagctggcccagtgttttctttgtggattttgtttattaatgtctttaagtggactcttcagactctacttctgcttgagtcagttttggtaaattatgtttttctaggaatctgttccattttttctaaaaaatcatatttactgccataaaattgttggcagtattcaattcacgctttctttg

SEQ ID NO: 156899 - DNA, 127 bp, Homo sapiens
ccaagtctttgctattgtgaaaaatattcttctattaattgacttgaggatttcacagtctctcttgaaaatctatctacagggctaccaaggtttccattaccttgaacgctgacgttcacgcctt

SEQ ID NO: 156900 - DNA, 345 bp, Homo sapiens
agcctcagtttactcatctgtaaaatcatggcatcatccttgccctgcctgtatgctacagctgctgtggggatcaagggaggtaactcttaggaggccagaaagtttgcaccaatgggactgatgattataataaaactctgtaactttgaagcacctactggtgccacagcctgtctgaggagcttgcacagtggtggcaaaggctgacttggcatcagcctggccaggatttgggagaagaccttgaaatcattgttttcttcctagtcagcaaggctctgtttgctccagtcctcctgggcacccagtgaggccacagacatcagcagcagggcagaaaaa

SEQ ID NO: 156901 - DNA, 492 bp, Homo sapiens
caccacgcaggacgttgggccccaccaaggggatatgtaggatagggacagaggacacggggcgggatccacgggaaagggttagcacagcagggccctgggcgggcacggggcctgccctgtggctgcaggtatattaatagttcctgggccccaggcaggcagtgcccacatgcttccaagcccgtgtggcctgtaggaaggcagcctagcgtccacagggagagaaggcctccgagttcctgctgaaccactcaacagcttaaaatacaaccagcccctctccctgtccagccagctgctagtgggaggggtgaaatcgtaccctgctccccccaacctgggcaccaaaccagggcccaagagggagagtacggccatcggggtcccggctagctgctgggagaggacgccgggctgcggcaggagggggtagcgagagaggggccacgctcacagctgcagcagtggtgcccaggccagcctgaggcc

SEQ ID NO: 156902 - DNA, 567 bp, Homo sapiens
tcattcccactctaaagcctttgtatgtgttgttctctgcctagaatgttcttcctctttatcagcatcaccaccccaaagagggcatctctgaacttccaatctgaagtagccagccagtcaccagcacatcaccaacttgccattatcactgacctcttatttgtttgtttctcccagcaaaatctaagctctgtcaggacagggattttctctctcttgtccattaccatatccttagagctcagaaggggtgtctggcccaggtgctcaatgactgtttgttcaatgaaagaatgaacaaatgaatcacacaaaaggagagaggaaaatactatttcccattaaaatgaagaaagagtttttattagaagggaaggccacagcagccctctactaccctcttttgactaaacttccaggaaattcattactaagttttgggcttcagtaagtcagagtcaatttctgttacacacacccaaaaaactccgacagccaactaagaaaggaggaaaaggaaggaaaaacaaaccaataggagattcctttcattcttgtctgaag

SEQ ID NO: 156903 - DNA, 328 bp, Homo sapiens
ctccacccgacggggtgggtttcaatttaatcaaagatataaagctttttagtgttctgtctttttgagacattacaaaggcaagaacttgaggctgtaaaagaacaccccgcccagtgttttagaattggtctttaaatcctttatcgaagtataattcacagacaataaagtctatgtatttatacaacttggtgagcttttacagatgtaaaacctgtgaagccatcaccaccatcaagacgcagcatgtgtctgtcaccggaaagcacagttctctcacaagaccaatcattcaaactgccctcttacagccacacccacctct

SEQ ID NO: 156904 - DNA, 337 bp, Homo sapiens
ccagcgagagccaggtggaacttacatcccttttataacctagcctcagaagccatccagtgccatttccaccacattctatttgttgaggcaatcacatgagcaccacccaggctcaaggggaggggaaagtgacctcacctctagacaggaggcagcaagaggttgaaagagcacctgggaccaggaatatttggaaaattcaatgcctgccgcagacaataagtaagtgctggactcctctgggcactggggtacagagagaattggacatagtcccagccttaagcatctcatattccaaagggtaagatggatatacagctgggctacatgg

SEQ ID NO: 156905 - DNA, 449 bp, Homo sapiens
ctccaagctgaacagtagtcacactgagcaggtcctaaacataagtccgctcacccacaagaaccacaaaaaatacaaactgtattcactttgttggttggaccattattttcttcaagccttcagagacaattatcctaactaccattaaggatttcacctgtcacccacagtcttgttatactgagacattttcacacctggatatgatacaaggggcttaatggaatttttatggctaaaaattaaagttcatttgactcaacagaatagtcaaataaaacaaaggagaaaacccaaaggaacaggttgaaagtagaggcttttgacttcctgatgagccaattttgcccagaaattcaaaccatgggatgctatatagctcatatgtcttgagagtgcccaaatgtcaacttatcgccagagtatcagccagtgcaggcttacag

SEQ ID NO: 156906 - DNA, 576 bp, Homo sapiens
gacacgactctggattagttacaatgctggtacaatttaaacagcatgtaaatagttatactgtcatgttcagggcataatgacaaggcaaaacgtctgtatgtgtttaagcaacagcacaagaattttttgccaacatattgtcagtctcatcagttggttgaatccacagcatgcagaaccaaaagacatggagggccaatgatactttcaattctttcaaatacaattaaagcttgtttagtgggccagaataccatccatcttggtgaatactcccagatgaacttgaaaacatacacacagggccaggtgtggtggctcatagctgtaatcccagcattttgggaggccgaggtgggcagatcacctgaggtcaggaattcaagaccagcctagccaacatggtgaaaccctcatctctactaaaaatacaaaagttagctgagtgtggtggcatgcgcctgtaatcccagctacttggggggctgaggcaggagaatgtcttgatcccaagaggcggaggctgcagtgagccaagattgctccactgcactccagcctgggtgacagagc

SEQ ID NO: 156907 - DNA, 253 bp, Homo sapiens
tctcatacataacaaataattcagttctgtgccttacacatttggccttttttcattgtaaaaatacaagccaaataccatggcttctgtccaccatctatgcacattatttccctcttaagaaaaagtttgagtttttcgtccgtgaaaataatacacatatataaatacggaaaatacagagaggcaaaattagagaggaaaattcattcataatcctaccatcatccaaagacaaccactgttaaatctt

SEQ ID NO: 156908 - DNA, 592 bp, Homo sapiens
aagtttgggccaggacctatgattttgaaatatgctttaaaatgataaattgtaaggaattataaagcccaaattctgtccaataggtgaggattaatttctaatgattcaatgaagctgaaaatggtagagtggatagttttgaagaactgattgttagaatcactttagaccatatccttcaactattattaatttttctgggtttaaaagaaggtactttttaataatgaaaatgttaagacaaagctcataagcattagattcttatagaggagagggcatagttgatattttgttaggagaattgaaatatttacatacattctaggcccaccagaaaaccagttgcccctgcattgtagccatctgcaagagacactgaagggaaagccaaagtttttgtcttgattttttaaataatgaattaaaatctattgagtaaaacagaatatgagtccctgctcatataaaataaatgactaaattaaaagtttcataagaaatgcaaaatttaagtgctttcaaaactcctcctcatggaataccactttgtaccaattatgatggccaaaattaaaacttataatac

SEQ ID NO: 156909 - DNA, 450 bp, Homo sapiens
gtctaagtacagaaataattcttcatgtagaaaagctaaattttgggtggttggtttggagacagagtctgcttccagtgtccaggctagagtgcagtggcacgatctcagctcactgcaacctctgcctcctgttctcaagtgatccttctgcctcagcctcccagagtgctgggattacaggtgtgagtcactgcactccacccagaaatactcttaaaagtctaaaaaaggagttaagtgctattaagaaatacacaaagggagaaaggtatactatagcatatgaaatgtcacagctcagtcacgatcactaaaacatagattgaggtgtgaaggtaagttaaagcaagactgaacactgacatagaaggaggtagagaagtgtttcggaaaccagatttaggattgtcagaagctaggaaagcaaaagcaaggcatgagtgagca

SEQ ID NO: 156910 - DNA, 354 bp, Homo sapiens
tcccttcttcctcgttgccatttaatccatctccaggcaatgacattcagcatgattatctatcttttaatgcttttcataatcctatgcattaacttaatttctgatttcacattcactttcatacttcttcatgctctgatttgagttattgaagatgtgggttaaatggtgaatattcctctgtagtcacaagtagggatgtccaggacaacagcaccagataacatcacataagcaactagactctcaatttgaaatgcctagcttacatgtgagaacaaaagtgtaagaaatagcagtaaaccctggaacattcaggtgaatatacaatgtccttatttttataactcg

SEQ ID NO: 156911 - DNA, 477 bp, Homo sapiens
aagagcatagcaccactatttgttgagggccttcgtttttcatcttcccatggcagaaggtgaaagggcaagagagcacaaaagcaagagggagccaaacttgcttttataacaaggccattcttgtgatagctagcccactcctatggtaatgacataaatccattcaggaaggtagcaccctcataatttattaggtcccacctcccaatactgctgcattggaaattaggtttccaatgcatgaacttcaggaaacacattcagactatagcagggtgttcatagaaatatgattaaagtgttttgtgctcaaataagtttggaaaaggctcctcaaatgtgtaccagttgttgtattgtaggactgctcagagtctctcatatgcaaatgtatattgttgtttccagtagagggaagcagaaatggcaacatttgaacaaaatattagcaaacaaattaccatgctcttccta

SEQ ID NO: 156912 - DNA, 412 bp, Homo sapiens
gaagaaccctgacatgtacgtataatttatatattacggaattggaataaattaagcacgctgtggcccccttaggatgacttccccaagcttcacaaatgcaaggcaacctttctcattagcactttcttcaaatctccaaatgagaagaccctcagacaggagaaacacttgagaatctcccccaacccccatctgcagaggaatgaggtgacaaggtcctgctgcccaggtctctcttttttttttttttaagacaaggtctaactcccattgcccaggctgtagtgcagtggtgcaatcacaactcactgcagcctcgacctcccaaactcaagtgatcctcctgcctcagcctccagagtagctgggatcacaggcatgcaccatcacatccagctaatttttctgt

SEQ ID NO: 156913 - DNA, 597 bp, Homo sapiens
agtttctgccaggttcatgaaaagcgcctgtttagaaacacgccttatttttgataggaagcctaggagatacgggtaactggatttgccttctctcctaccttacacagttgtgctccgtgttctgctcccaggcctgtaactagatttctggtggattggaggcgcttttctcctttctgagctctccaactctcaaagagagtcttggagctgaaccgccatacctttgggccccagatagggggtacggaactgctggaccctcagtgaggagggtgggtaaaggaaaggacatactggtgttccttctagaatggcctattttcattgatatgctttgtcttttttcagttgaggtggtctattgcgttaccgagctgtggggatgcacccacttagctgaagttctcatctaaaaacaaagtatttattttgctttctccaatcagttatgaagttttccgtgtattgccagtttaaattttgtcctttgagttctgggtacagtgcaactgaacttgtctgtagcttgatttcattaagtactgctgaaactgcatcttagtttcaacagaacagtttcactttagggtt

SEQ ID NO: 156914 - DNA, 422 bp, Homo sapiens
tgaaaaaatactatgagaaagttggcggaagaatattctggtcaaagtaaactatattcaaaatctctgaggtaaaaattagcatatacaagaaactggtttggcatgaaattatacacacacacacatatataatatatacgaagtataaataatatatatatgaagaattaatcagagagcacatcatgtaggtctttgtagtccatgggaaggagctggtattagtctacttgtaaagaaagctgttgttgtattctgctcaatggaatgtatgatacagtttattttacaaagagcccaatctggttgccacagtagagtgtacagagaagtcagagtttaaataaccagacttgagtccatttccatgatcaagagtaaataataatgctgacctggactcccacgtaaagaaggaa

SEQ ID NO: 156915 - DNA, 287 bp, Homo sapiens
tgaccttgagcacaaacttacaacctggttcatgaggactgagtaactctgcacctcccacagcctcagaagtggcggaggtcccagaggacagaaggtaacaggctcccctctcttcaaagaactggaagaagctcaaggggtcgtcactcataaggcaggcatctcaccctgccacgggcctgagtgggcgtcagattggaagctgtatgttcacttcaccaagtgaggggaaaccaggtaggaagggaagaaagtacacaaatatgtagcagggagggcctcag

SEQ ID NO: 156916 - DNA, 489 bp, Homo sapiens
gctctcggttctttatttttgataaagtccaagttattttttttcttttgtcaattgtgttttttgatgttgtatctaataattctttgcccaatccaatatcatgaaggttttcctatgtttctaaaagttttatacttttacgtctttcgtttatgactctgattcattctgtgttattttgtgtatggtgtaaggtgaaggtcttcattaatctttttgcatatggatatccaactgtactatcatcatttgttgaaaaactaaccttttcctgttgaattgacttggaaccttttttgaaaaccaattgaccataaatataagggtttatatccgacctctcaattgtgttccattagtttatatttctattcttatgccagtccctactgtcttgactattgtggcattgtaatatgtatttaaattgagaaaggtgaatcctaaaattttgttcttctttttcaacattgttttgggtattct

SEQ ID NO: 156917 - DNA, 438 bp, Homo sapiens
ggcgtgtgtagctgctctagaggatcaactatagacgcactaggtcccttcttttataaaccaatgtactttttactagcttatcctgtgatgttatattaatgcaagaaataagatttataatgataaaaacatagataaaaggaagaaaaggtacatttgcacaaaagaatctgtgctaatgttagcaatgaagcaaaccctctgactaagtcaactttaaaactctaagtttattggatttagaacttaacacatatatagtcaatatcccatatcattcaaattactcaaggcactcagtatacagaatatgaagaaatatttagatcatcggaacttgcctattataaagcaagggttaaaaatactcttcttcaaagtttggtgagtgtgtgagtaagaaacacctgctgccaactccatacagatagcaaa

SEQ ID NO: 156918 - DNA, 488 bp, Homo sapiens
gatccctcatataatctcattccactctgtcctgcgatgcttccactgagaaatgtgtgatattcttatggaaagtctctgtatataccacattgcctttctcctgttgcccttaagatttttgtttttggaaagttgactagaatgtgtcttagtgtgaatttctttagtttcatcatgactgtagtcctttgagcttcttatatttggatatctatttcctttttcacatttggaaggttttggctattgtagtttgaaaaatattctgtccctcatttcctctatattcctcttctgaaattcatgtaatgcatatattgattcacttgatggcgccccataagtcccttaggctttcttcatttttcctttttctttttgttcctctgactcaataatttcaaatgacctgtctttgagtttgctgattctttctcttgcttaataaagtctgctgttgatcccctataattttttttttcaaa

SEQ ID NO: 156919 - DNA, 243 bp, Homo sapiens
gagggagggagggacagatgaaggaatggagggatggatgaatggattaagggatggatggatggatggatggatgaagggatggatggatgaatggagggatggatggatggaaggatagatgaaggaaggaatggagggacagatgaatggattaagggataaatggatggagggagggatggatggagggatagatggatgaaggaatggagggatggatgaatggattaagggatggat

SEQ ID NO: 156920 - DNA, 742 bp, Homo sapiens
cagcataatgtgaggcaaggtccagccgttccgcccagcatacaagcttatggagcagccccctttggagatctccaggtagacttcagagagatgccaaagtgtggagatctgattcctagatttcgactgcccttacggatcggctcacataacgggcctgcgtttttggctgccatggtacagaagacggcaaaggtgtccaagtcacacagagccacggaatctcacaggagcctgagaactcctcctcctgggactctcagaggatccagaactgcagcccatcctcgctgggctgtccctgtccatgtatctggtcacggtgctgaggaacctcctcatcagcctggctgtcagctctgactcccacctccacaccccaatgtgcttcttcctctccaacctgtgctgggctgacatcggtttcacctcggccacggttcccaagatgattgtggacatgcggtcgcatagcggagtcatctcttatgcggactgctgacacggatgtctttcttggtcctttttgcatgtgtagaagacatgctcctgactgtgatggcctatgactgttttgtagccatctgtcgccctctgcactacccagtcatcgtgaatcctcacctctgtgtcttcttagtttcggtgtccttttccttagcctgttggattcccagctgcgcagttggattgtgttgcaattcaccttcttcaagaatgtggaaatctctaattttgt

SEQ ID NO: 156921 - DNA, 799 bp, Homo sapiens
cagcataatgtgaggcaaggtccagccgttccgcccagcatacaagcttatggagcagccccctttggagatctccaggtagacttcagagagatgccaaagtgtggagatctgattcctagatttcgactgcccttacggatcggctcacataacgggcctgcgtttttggctgccatggtacagaagacggcaaaggtattggggatcacacggaaactgcatgccgcctcccagcctcagagttccggaaaggtgtccaagtcacacagagccacggaatctcacaggagcctgagaactcctcctcctgggactctcagaggatccagaactgcagcccatcctcgctgggctgtccctgtccatgtatctggtcacggtgctgaggaacctcctcatcagcctggctgtcagctctgactcccacctccacaccccaatgtgcttcttcctctccaacctgtgctgggctgacatcggtttcacctcggccacggttcccaagatgattgtggacatgcggtcgcatagcggagtcatctcttatgcggactgctgacacggatgtctttcttggtcctttttgcatgtgtagaagacatgctcctgactgtgatggcctatgactgttttgtagccatctgtcgccctctgcactacccagtcatcgtgaatcctcacctctgtgtcttcttagtttcggtgtccttttccttagcctgttggattcccagctgcgcagttggattgtgttgcaattcaccttcttcaagaatgtggaaatctctaattttgt

SEQ ID NO: 156922 - DNA, 397 bp, Homo sapiens
gcaagttctggagcacaggttcagacttgccccattggggaaaaggagaagggaagggcattctggctgaaggaacatgtgataaaggcagtggaggcctggaagggcacagccctgatgtgcttagaaatgaaaatatctcctgggggaggggtacaggagccagcattgtgtcgttgcgggtccgagtgccatgccaaggtgcctggcactcatcctgggggcagacggaagccattacatttttttcaggagagatgacatgtctcagcctgtgtttgacaaaactagatctgaaggcgtgaagacaagttagatggctgttacagtagtccggtaggagagcctgaggcctgcactaggatgcaggcggtgctggtaggatacagtagggaga

SEQ ID NO: 156923 - DNA, 468 bp, Homo sapiens
tgtttgaccttacctccactcgagctgctattcaacaattcctttaatcatcacttactgagtcacaggacaattcaaatagcagcctttcttcaggcctcagttcagtcctaatcacctcattcttggagaatggtatcacctgatatttaactcagactactgaggttctaattttctttatctcttcttcacattcattccttttttcttattagtctctcagaaatgatctttttcctttttccatctcccactttcctcccaatcttttccctgttttgttttaccctcttttctgtcacatttctggggtcttctaggcttaccagcttacctgcatctggatcagtaaattgtcactcttcacccccaatccctgccaccatgcagacacacacttccattcaacattccctgtcttcagactacttctaccatagaaatgttcaataactgccccatgtc

SEQ ID NO: 156924 - DNA, 247 bp, Homo sapiens
aggcacaaatgccttttctctccaataaaaacaacagcaacaaagctattattctctgcttattttctgctagatgtcatcattatctctccatatgtaaatgaggaaactgaagcacaaagaggttacataacttgcccaagatcacaccactagtaagtagcagagctgggatttgaacccgtgctctgagccaccatcctggattgctccttagcctctataaggtccccagatgcagttatgt

SEQ ID NO: 156925 - DNA, 577 bp, Homo sapiens
taagcttcatgtcagggggtgtggctgaccaactacaggaatttcacactagtatacaaagtgactcattcaaatattcagtcgtttaataataatctcttgcactctgccctcctgttttgtgccaggtatgccaagcagtgagaatataatctgagcagaaacaggcatgctctcagtccttgtggagattattggttttggttttgggttttttttgtttttttgtttttgtttttgcaggtgggtgggggatgtagaaataagcagcaaggacatctgctgagaaaattgggatggagtcaaagggatgtgatatgtagagaaaaggaatcacactggatccttcctcaaagtcagtcaagcaaggcttcctaaatagcctctaagtcccacctccgatggcagaaagaaaagaccagattaacagttgtatacatttgttttgttttctaatctttctgggtcagtggcgtttatctttggtcacttgcattcctcctcagagctctgcttttcctagacaaggactgactgaacgggtatctagctttcctgggctgccagcactttggga

SEQ ID NO: 156926 - DNA, 3478 bp, Homo sapiens
gcgggagtagcgcagtcgccaaagccgccgctgccaaagctgccgccactagccgggcatggccatggcgtccccggccatcgggcagcgcccgtacccgctactcttggaccccgagccgccgcgctatctacagagcctgagcggccccgagctaccgccgccgccccccgaccggtcctcgcgcctctgtgtcccggcgcccctctccactgcgcccggggcgcgcgaggggcgcagcgcccggagggctgcccgggggaacctggagcccccgccccgggcctcccgacccgctcgcccgctccggcctggtctgcagcagagactgcggcggcggcctggagcgccccgaccccgcgacgtgcggagcatcttcgagcagccgcaggatcccagagtcccggcggagcgaggcgaggggcactgcttcgccgagttggtgctgccgggcggccccggctggtgtgacctgtgcggacgagaggtgctgcggcaggcgctgcgctgcactaactgtaaattcacctgtcacccagaatgccgcagcctgatccagttggactgcagtcagcaggagggtttatcccgggacagaccctctccagaaagcaccctcaccgtgaccttcagccagaatgtctgtaaacctgtggaggagacacagcgcccgcccacactgcaggagatcaagcagaagatcgacagctacaacacgcgagagaagaactgcctgggcatgaaactgagtgaagacggcacctacacgggtttcatcaaagtgcatctgaaactccggcggcctgtgacggtgcctgctgggatccggccccagtccatctatgatgccatcaaggaggtgaacctggcggctaccacggacaagcggacatccttctacctgcccctagatgccatcaagcagctgcacatcagcagcaccaccaccgtcagtgaggtcatccaggggctgctcaagaagttcatggttgtggacaatccccagaagtttgcactttttaagcggatacacaaggacggacaagtgctcttccagaaactctccattgctgaccgccccctctacctgcgcctgcttgctgggcctgacacggaggtcctcagctttgtgctaaaggagaatgaaactggagaggtagagtgggatgccttctccatccctgaacttcagaattcctctcctcctggtgcattcagatttatttgtattattaattattattttgcaacagacactttttctcaggacatctctggcaggtgcatttgtgcctgcccagcagttccagctgtggcaaaagtctcttccatggacaagtgtttgcacgggggttcagctgtgcccgcccccaggctgtgccccaccacagattctgccaaggatcagaactcatgtgaaacaaacagctgacgtcctctctcgatctgcaagcctttcaccaaccaaatagttgcctctctcgtcaccaaactggaacctcacaccagccggcaaaggaaggaagaaaggttttagagctgtgtgttctttctctggcattgattcctctttgagttctcttacttgccacgtacaggaccattatttatgagtgaaaagttgtagcacattccttttgcaggtctgagctaagcccctgaaagcagggtaatgctcataaaaggactgttcccgcggccccaaggtgcctgttgttcacacttaagggaagtttataaagctactggccccagatgctcagggtaaggagcaccaaagctgaggctggctcagagatctccagagaagctgcagcctgccctggccctggctctggccctggcccacattgcacatggaaacccaaaggcatatatctgcgtatgtgtggtacttagtcacatctttgtcaacaaactgttcgtttttaagttacaaatttgaatttaatgttgtcatcatcgtcatgtgtttccccaaagggaagccagtcattgaccatttaaaaagtctcctgctaagtatggaaatcagacagtaagagaaagccaaaaagcaatgcagagaaaggtgtccaagctgtcttcagccttccccagctaaagagcagaggagggcctgggctacttgggttccccatcggcctccagcactgcctccctcctcccactgcgactctgggatctccaggtgctgcccaaggagttgccttgattacagagaggggagcctccaattcggccaacttggagtcctttctgttttgaagcatgggccagacccggcactgcgctcggagagccggtgggcctggcctccccgtcgacctcagtgcctttttgttttcagagagaaataggagtagggcgagtttgcctgaagctctgctgctggcttctcctgccaggaagtgaacaatggcggcggtgtgggagacaaggccaggagagcccgcgttcagtatgggttgagggtcacagacctccctcccatctgggtgcctgagttttgactccaatcagtgataccagaccacattgacagggaggatcaaattcctgacttacatttgcactggcttcttgtttaggctgaatcctaaaataaattagtcaaaaaattccaacaagtagccaggactgcagagacactccagtgcagagggagaaggacttgtaattttcaaagcagggctggttttccaacccagcctctgagaaaccatttctttgctatcctctgccttcccaagtccctcttgggtcggttcaagcccaagcttgttcgtgtagcttcagaagttccctctctgacccaggctgagtccatactgcccctgatcccagaaggaatgctgacccctcgtcgtatgaactgtgcatagtctccagagcttcaaaggcaacacaagctcgcaactctaagatttttttaaaccacaaaaaccctggttagccatctcatgctcagccttatcacttccctccctttagaaactctctccctgctgtatattaaagggagcaggtggagagtcattttccttcgtcctgcatgtctctaacattaatagaaggcatggctcctgctgcaaccgctgtgaatgctgctgagaacctccctctatggggatggctattttatttttgagaaggaaaaaaaaagtcatgtatatatacacataaaggcatatagctatatataaagagataagggtgtttatgaaatgagaaaattattggacaattcagactttactaaagcacagttagacccaaggcctatgctgaggtctaaacctctgaaaaaagtatagtatcgagtacccgttccctcccagaggtgggagtaactgctggtagtgccttctttggttgtgttgctcagtgtgtaagtgtttgtttccaggatattttctttttaaatgtctttcttatatgggttttaaaaaaaagtaataaaagcctgttgcaaaaa

SEQ ID NO: 156927 - DNA, 571 bp, Homo sapiens
attttatttttccttctcaaaaataaaatagccatccccatagagggaggtctcagcagcattcacagcggttgcagcaggagccatgccttctattaatgttagagacatgcaggacgaaggaaaatgactctccacctgctccctttaatatacagcagggagagagtttctaaagggagggaagtgataaggctgagcatgagatggctattttatttttgagaaggaaaaaaaaagtcatgtatatatacacataaaggcatatagctatatataaagagataagggtgtttatgaaatgagaaaattattggacaattcagactttactaaagcacagttagacccaaggcctatgctgaggtctaaacctctgaaaaaagtatagtatcgagtacccgttccctcccagaggtgggagtaactgctggtagtgccttctttggttgtgttgctcagtgtgtaagtgtttgtttccaggatattttctttttaaatgtctttcttatatgggttttaaaaaaaagtaataaaagcctgttgcaaaaatgaaaatcatgttagaaac

SEQ ID NO: 156928 - DNA, 375 bp, Homo sapiens
acccctgcttttttttttgctttccatttgcttagtagatcttctcccttccctttgttttgagcctatgtgtgtctctgcacgtgagattggtctcctgaatacagcacactgatgggtcttgactctttatccaatttgccagtctttgtcttttaattggggcatttagcccatttacatttaaggttaatattgttatgtgtgaatttgatcctgtcattatgatgttagctggttattttgcctgttagtggtagtgccttctttggttgtgttgctcagtgtgtaagtgtttgtttccaggatattttctttttaaatgtctttcttatatgggttttaaaaaaaagtaataaaagcctgttgcaaaaa

SEQ ID NO: 156929 - DNA, 405 bp, Homo sapiens
aaaaaccaaatggtccatacccttacacacatgaagtgtgtttctccactgctcagcacgcctcctaattaggggtagtgccttctttggttgtgttgctcagtgtgtaagtgtttgtttccaggatattttctttttaaatgtctttcttatatgggttttaaaaaaaagtaataaaagcctgttgcaaaaaaaaaaaaaaaaaaaaaaaacaaaaaaaaaaacaaaaaaacaaaaacaaaaaaaaaagaagagaggggggcgagcgaaaaaaaaagaaaaccaaacaagagagggagaccacacgaacaacgaccacacccacaaaacgggagacaacaggggcggcacaccacacaacggaggcagccaaatacaaacgagagggcggcggcacgcggcaat

SEQ ID NO: 156930 - DNA, 3457 bp, Homo sapiens
gcaggaaaggcgcgggaggcgggggaggtgcggagatggcgctctgcacggcggcggagggagggcgctggcgccggggacacgaaaccgcagagcccggacgagtcagggagtgaggcgcgagccgggcgcccggggctctgcaggcgcaggcggcgcggggacaggagcaggttaccgggccgcccgagcgctcgcaccccgctgaaagaaacgcaggcggcccgccggctctgcctggtccgctacccgaccagctcccggctcggggctcagagctaggggcttacgccaagcggagcccggggaggggtgcccacctccctccgccgcatcccaagcctcggccgggaactccggggtagatgaccgtggacagcagcatgagcagtgggtactgcagcctggacgaggaactggaagactgcttcttcactgctaagactacctttttcagaaatgcgcagagcaaacatctttcaaagaatgtctgtaaacctgtggaggagacacagcgcccgcccacactgcaggagatcaagcagaagatcgacagctacaacacgcgagagaagaactgcctgggcatgaaactgagtgaagacggcacctacacgggtttcatcaaagtgcatctgaaactccggcggcctgtgacggtgcctgctgggatccggccccagtccatctatgatgccatcaaggaggtgaacctggcggctaccacggacaagcggacatccttctacctgcccctagatgccatcaagcagctgcacatcagcagcaccaccaccgtcagtgaggtcatccaggggctgctcaagaagttcatggttgtggacaatccccagaagtttgcactttttaagcggatacacaaggacggacaagtgctcttccagaaactctccattgctgaccgccccctctacctgcgcctgcttgctgggcctgacacggaggtcctcagctttgtgctaaaggagaatgaaactggagaggtagagtgggatgccttctccatccctgaacttcagaacttcctaacaatcctggaaaaagaggagcaggacaaaatccaacaagtgcaaaagaagtatgacaagtttaggcagaaactggaggaggccttaagagaatcccagggcaaacctgggtaaccggtcctgcttcctctcctcctggtgcattcagatttatttgtattattaattattattttgcaacagacactttttctcaggacatctctggcaggtgcatttgtgcctgcccagcagttccagctgtggcaaaagtctcttccatggacaagtgtttgcacgggggttcagctgtgcccgcccccaggctgtgccccaccacagattctgccaaggatcagaactcatgtgaaacaaacagctgacgtcctctctcgatctgcaagcctttcaccaaccaaatagttgcctctctcgtcaccaaactggaacctcacaccagccggcaaaggaaggaagaaaggttttagagctgtgtgttctttctctggcattgattcctctttgagttctcttacttgccacgtacaggaccattatttatgagtgaaaagttgtagcacattccttttgcaggtctgagctaagcccctgaaagcagggtaatgctcataaaaggactgttcccgcggccccaaggtgcctgttgttcacacttaagggaagtttataaagctactggccccagatgctcagggtaaggagcaccaaagctgaggctggctcagagatctccagagaagctgcagcctgccctggccctggctctggccctggcccacattgcacatggaaacccaaaggcatatatctgcgtatgtgtggtacttagtcacatctttgtcaacaaactgttcgtttttaagttacaaatttgaatttaatgttgtcatcatcgtcatgtgtttccccaaagggaagccagtcattgaccatttaaaaagtctcctgctaagtatggaaatcagacagtaagagaaagccaaaaagcaatgcagagaaaggtgtccaagctgtcttcagccttccccagctaaagagcagaggagggcctgggctacttgggttccccatcggcctccagcactgcctccctcctcccactgcgactctgggatctccaggtgctgcccaaggagttgccttgattacagagaggggagcctccaattcggccaacttggagtcctttctgttttgaagcatgggccagacccggcactgcgctcggagagccggtgggcctggcctccccgtcgacctcagtgcctttttgttttcagagagaaataggagtagggcgagtttgcctgaagctctgctgctggcttctcctgccaggaagtgaacaatggcggcggtgtgggagacaaggccaggagagcccgcgttcagtatgggttgagggtcacagacctccctcccatctgggtgcctgagttttgactccaatcagtgataccagaccacattgacagggaggatcaaattcctgacttacatttgcactggcttcttgtttaggctgaatcctaaaataaattagtcaaaaaattccaacaagtagccaggactgcagagacactccagtgcagagggagaaggacttgtaattttcaaagcagggctggttttccaacccagcctctgagaaaccatttctttgctatcctctgccttcccaagtccctcttgggtcggttcaagcccaagcttgttcgtgtagcttcagaagttccctctctgacccaggctgagtccatactgcccctgatcccagaaggaatgctgacccctcgtcgtatgaactgtgcatagtctccagagcttcaaaggcaacacaagctcgcaactctaagatttttttaaaccacaaaaaccctggttagccatctcatgctcagccttatcacttccctccctttagaaactctctccctgctgtatattaaagggagcaggtggagagtcattttccttcgtcctgcatgtctctaacattaatagaaggcatggctcctgctgcaaccgctgtgaatgctgctgagaacctccctctatggggatggctattttatttttgagaaggaaaaaaaaagtcatgtatatatacacataaaggcatatagctatatataaagagataagggtgtttatgaaatgagaaaattattggacaattcagactttactaaagcacagttagacccaaggcctatgctgaggtctaaacctctgaaaaaagtatagtatcgagtacccgttccctcccagaggtgggagtaactgctggtagtgccttctttggttgtgttgctcagtgtgtaagtgtttgtttccaggatattttctttttaaatgtctttcttatatgggttttaaaaaaaagtaataaaagcctgttgcaaaaa

SEQ ID NO: 156931 - DNA, 3424 bp, Homo sapiens
gcaggaaaggcgcgggaggcgggggaggtgcggagatggcgctctgcacggcggcggagggagggcgctggcgccggggacacgaaaccgcagagcccggacgagtcagggagtgaggcgcgagccgggcgcccggggctctgcaggcgcaggcggcgcggggacaggagcaggttaccgggccgcccgagcgctcgcaccccgctgaaagaaacgcaggcggcccgccggctctgcctggtccgctacccgaccagctcccggctcggggctcagagctaggggcttacgccaagcggagcccggggaggggtgcccacctccctccgccgcatcccaagcccggcccccttgatgcgctggcggcctcggccgggaactccggggtagatgaccgtggacagcagcatgagcagtgggtactgcagcctggacgaggaactggaagactgcttcttcactgctaagactacctttttcagaaatgcgcagagcaaacatctttcaaagaatgtctgtaaacctgtggaggagacacagcgcccgcccacactgcaggagatcaagcagaagatcgacagctacaacacgcgagagaagaactgcctgggcatgaaactgagtgaagacggcacctacacgggtttcatcaaagtgcatctgaaactccggcggcctgtgacggtgcctgctgggatccggccccagtccatctatgatgccatcaaggaggtgaacctggcggctaccacggacaagcggacatccttctacctgcccctagatgccatcaagcagctgcacatcagcagcaccaccaccgtcagtgaggtcatccaggggctgctcaagaagttcatggttgtggacaatccccagaagtttgcactttttaagcggatacacaaggacggacaagtgctcttccagaaactctccattgctgaccgccccctctacctgcgcctgcttgctgggcctgacacggaggtcctcagctttgtgctaaaggagaatgaaactggagaggtagagtgggatgccttctccatccctgaacttcagaacttcctaacaatcctggaaaaagaggagcaggacaaaatccaacaagtgcaaaagaagtatgacaagtttaggcagaaactggaggaggccttaagagaatcccagggcaaacctgggtaaccggtcctgcttcctctcctcctggtgcattcagatttatttgtattattaattattattttgcaacagacactttttctcaggacatctctggcaggtgcatttgtgcctgcccagcagttccagctgtggcaaaagtctcttccatggacaagtgtttgcacgggggttcagctgtgcccgcccccaggctgtgccccaccacagattctgccaaggatcagaactcatgtgaaacaaacagctgacgtcctctctcgatctgcaagcctttcaccaaccaaatagttgcctctctcgtcaccaaactggaacctcacaccagccggcaaaggaaggaagaaaggttttagagctgtgtgttctttctctggcattgattcctctttgagttctcttacttgccacgtacaggaccattatttatgagtgaaaagttgtagcacattccttttgcaggtctgagctaagcccctgaaagcagggtaatgctcataaaaggactgttcccgcggccccaaggtgcctgttgttcacacttaagggaagtttataaagctactggccccagatgctcagggtaaggagcaccaaagctgaggctggctcagagatctccagagaagctgcagcctgccctggccctggctctggccctggcccacattgcacatggaaacccaaaggcatatatctgcgtatgtgtggtacttagtcacatctttgtcaacaaactgttcgtttttaagttacaaatttgaatttaatgttgtcatcatcgtcatgtgtttccccaaagggaagccagtcattgaccatttaaaaagtctcctgctaagtatggaaatcagacagtaagagaaaagcagaggagggcctgggctacttgggttccccatcggcctccagcactgcctccctcctcccactgcgactctgggatctccaggtgctgcccaaggagttgccttgattacagagaggggagcctccaattcggccaacttggagtcctttctgttttgaagcatgggccagacccggcactgcgctcggagagccggtgggcctggcctccccgtcgacctcagtgcctttttgttttcagagagaaataggagtagggcgagtttgcctgaagctctgctgctggcttctcctgccaggaagtgaacaatggcggcggtgtgggagacaaggccaggagagcccgcgttcagtatgggttgagggtcacagacctccctcccatctgggtgcctgagttttgactccaatcagtgataccagaccacattgacagggaggatcaaattcctgacttacatttgcactggcttcttgtttaggctgaatcctaaaataaattagtcaaaaaattccaacaagtagccaggactgcagagacactccagtgcagagggagaaggacttgtaattttcaaagcagggctggttttccaacccagcctctgagaaaccatttctttgctatcctctgccttcccaagtccctcttgggtcggttcaagcccaagcttgttcgtgtagcttcagaagttccctctctgacccaggctgagtccatactgcccctgatcccagaaggaatgctgacccctcgtcgtatgaactgtgcatagtctccagagcttcaaaggcaacacaagctcgcaactctaagatttttttaaaccacaaaaaccctggttagccatctcatgctcagccttatcacttccctccctttagaaactctctccctgctgtatattaaagggagcaggtggagagtcattttccttcgtcctgcatgtctctaacattaatagaaggcatggctcctgctgcaaccgctgtgaatgctgctgagaacctccctctatggggatggctattttatttttgagaaggaaaaaaaaagtcatgtatatatacacataaaggcatatagctatatataaagagataagggtgtttatgaaatgagaaaattattggacaattcagactttactaaagcacagttagacccaaggcctatgctgaggtctaaacctctgaaaaaagtatagtatcgagtacccgttccctcccagaggtgggagtaactgctggtagtgccttctttggttgtgttgctcagtgtgtaagtgtttgtttccaggatattttctttttaaatgtctttcttatatgggttttaaaaaaaagtaataaaagcctgttgcaaaaa

SEQ ID NO: 156932 - DNA, 3501 bp, Homo sapiens
gcaggaaaggcgcgggaggcgggggaggtgcggagatggcgctctgcacggcggcggagggagggcgctggcgccggggacacgaaaccgcagagcccggacgagtcagggagtgaggcgcgagccgggcgcccggggctctgcaggcgcaggcggcgcggggacaggagcaggttaccgggccgcccgagcgctcgcaccccgctgaaagaaacgcaggcggcccgccggctctgcctggtccgctacccgaccagctcccggctcggggctcagagctaggggcttacgccaagcggagcccggggaggggtgcccacctccctccgccgcatcccaagcccggcccccttgatgcgctggcggcctcggccgggaactccggggtagatgaccgtggacagcagcatgagcagtgggtactgcagcctggacgaggaactggaagactgcttcttcactgctaagactacctttttcagaaatgcgcagagcaaacatctttcaaagaatgtctgtaaacctgtggaggagacacagcgcccgcccacactgcaggagatcaagcagaagatcgacagctacaacacgcgagagaagaactgcctgggcatgaaactgagtgaagacggcacctacacgggtttcatcaaagtgcatctgaaactccggcggcctgtgacggtgcctgctgggatccggccccagtccatctatgatgccatcaaggaggtgaacctggcggctaccacggacaagcggacatccttctacctgcccctagatgccatcaagcagctgcacatcagcagcaccaccaccgtcagtgaggtcatccaggggctgctcaagaagttcatggttgtggacaatccccagaagtttgcactttttaagcggatacacaaggacggacaagtgctcttccagaaactctccattgctgaccgccccctctacctgcgcctgcttgctgggcctgacacggaggtcctcagctttgtgctaaaggagaatgaaactggagaggtagagtgggatgccttctccatccctgaacttcagaacttcctaacaatcctggaaaaagaggagcaggacaaaatccaacaagtgcaaaagaagtatgacaagtttaggcagaaactggaggaggccttaagagaatcccagggcaaacctgggtaaccggtcctgcttcctctcctcctggtgcattcagatttatttgtattattaattattattttgcaacagacactttttctcaggacatctctggcaggtgcatttgtgcctgcccagcagttccagctgtggcaaaagtctcttccatggacaagtgtttgcacgggggttcagctgtgcccgcccccaggctgtgccccaccacagattctgccaaggatcagaactcatgtgaaacaaacagctgacgtcctctctcgatctgcaagcctttcaccaaccaaatagttgcctctctcgtcaccaaactggaacctcacaccagccggcaaaggaaggaagaaaggttttagagctgtgtgttctttctctggcattgattcctctttgagttctcttacttgccacgtacaggaccattatttatgagtgaaaagttgtagcacattccttttgcaggtctgagctaagcccctgaaagcagggtaatgctcataaaaggactgttcccgcggccccaaggtgcctgttgttcacacttaagggaagtttataaagctactggccccagatgctcagggtaaggagcaccaaagctgaggctggctcagagatctccagagaagctgcagcctgccctggccctggctctggccctggcccacattgcacatggaaacccaaaggcatatatctgcgtatgtgtggtacttagtcacatctttgtcaacaaactgttcgtttttaagttacaaatttgaatttaatgttgtcatcatcgtcatgtgtttccccaaagggaagccagtcattgaccatttaaaaagtctcctgctaagtatggaaatcagacagtaagagaaagccaaaaagcaatgcagagaaaggtgtccaagctgtcttcagccttccccagctaaagagcagaggagggcctgggctacttgggttccccatcggcctccagcactgcctccctcctcccactgcgactctgggatctccaggtgctgcccaaggagttgccttgattacagagaggggagcctccaattcggccaacttggagtcctttctgttttgaagcatgggccagacccggcactgcgctcggagagccggtgggcctggcctccccgtcgacctcagtgcctttttgttttcagagagaaataggagtagggcgagtttgcctgaagctctgctgctggcttctcctgccaggaagtgaacaatggcggcggtgtgggagacaaggccaggagagcccgcgttcagtatgggttgagggtcacagacctccctcccatctgggtgcctgagttttgactccaatcagtgataccagaccacattgacagggaggatcaaattcctgacttacatttgcactggcttcttgtttaggctgaatcctaaaataaattagtcaaaaaattccaacaagtagccaggactgcagagacactccagtgcagagggagaaggacttgtaattttcaaagcagggctggttttccaacccagcctctgagaaaccatttctttgctatcctctgccttcccaagtccctcttgggtcggttcaagcccaagcttgttcgtgtagcttcagaagttccctctctgacccaggctgagtccatactgcccctgatcccagaaggaatgctgacccctcgtcgtatgaactgtgcatagtctccagagcttcaaaggcaacacaagctcgcaactctaagatttttttaaaccacaaaaaccctggttagccatctcatgctcagccttatcacttccctccctttagaaactctctccctgctgtatattaaagggagcaggtggagagtcattttccttcgtcctgcatgtctctaacattaatagaaggcatggctcctgctgcaaccgctgtgaatgctgctgagaacctccctctatggggatggctattttatttttgagaaggaaaaaaaaagtcatgtatatatacacataaaggcatatagctatatataaagagataagggtgtttatgaaatgagaaaattattggacaattcagactttactaaagcacagttagacccaaggcctatgctgaggtctaaacctctgaaaaaagtatagtatcgagtacccgttccctcccagaggtgggagtaactgctggtagtgccttctttggttgtgttgctcagtgtgtaagtgtttgtttccaggatattttctttttaaatgtctttcttatatgggttttaaaaaaaagtaataaaagcctgttgcaaaaatgaaaatcatgttagaaac

SEQ ID NO: 156933 - DNA, 3482 bp, Homo sapiens
gcaggaaaggcgcgggaggcgggggaggtgcggagatggcgctctgcacggcggcggagggagggcgctggcgccggggacacgaaaccgcagagcccggacgagtcagggagtgaggcgcgagccgggcgcccggggctctgcaggcgcaggcggcgcggggacaggagcaggttaccgggccgcccgagcgctcgcaccccgctgaaagaaacgcaggcggcccgccggctctgcctggtccgctacccgaccagctcccggctcggggctcagagctaggggcttacgccaagcggagcccggggaggggtgcccacctccctccgccgcatcccaagcccggcccccttgatgcgctggcggcctcggccgggaactccggggtagatgaccgtggacagcagcatgagcagtgggtactgcagcctggacgaggaactggaagactgcttcttcactgctaagactacctttttcagaaatgcgcagagcaaacatctttcaaagaatgtctgtaaacctgtggaggagacacagcgcccgcccacactgcaggagatcaagcagaagatcgacagctacaacacgcgagagaagaactgcctgggcatgaaactgagtgaagacggcacctacacgggtttcatcaaagtgcatctgaaactccggcggcctgtgacggtgcctgctgggatccggccccagtccatctatgatgccatcaaggaggtgaacctggcggctaccacggacaagcggacatccttctacctgcccctagatgccatcaagcagctgcacatcagcagcaccaccaccgtcagtgaggtcatccaggggctgctcaagaagttcatggttgtggacaatccccagaagtttgcactttttaagcggatacacaaggacggacaagtgctcttccagaaactctccattgctgaccgccccctctacctgcgcctgcttgctgggcctgacacggaggtcctcagctttgtgctaaaggagaatgaaactggagaggtagagtgggatgccttctccatccctgaacttcagaacttcctaacaatcctggaaaaagaggagcaggacaaaatccaacaagtgcaaaagaagtatgacaagtttaggcagaaactggaggaggccttaagagaatcccagggcaaacctgggtaaccggtcctgcttcctctcctcctggtgcattcagatttatttgtattattaattattattttgcaacagacactttttctcaggacatctctggcaggtgcatttgtgcctgcccagcagttccagctgtggcaaaagtctcttccatggacaagtgtttgcacgggggttcagctgtgcccgcccccaggctgtgccccaccacagattctgccaaggatcagaactcatgtgaaacaaacagctgacgtcctctctcgatctgcaagcctttcaccaaccaaatagttgcctctctcgtcaccaaactggaacctcacaccagccggcaaaggaaggaagaaaggttttagagctgtgtgttctttctctggcattgattcctctttgagttctcttacttgccacgtacaggaccattatttatgagtgaaaagttgtagcacattccttttgcaggtctgagctaagcccctgaaagcagggtaatgctcataaaaggactgttcccgcggccccaaggtgcctgttgttcacacttaagggaagtttataaagctactggccccagatgctcagggtaaggagcaccaaagctgaggctggctcagagatctccagagaagctgcagcctgccctggccctggctctggccctggcccacattgcacatggaaacccaaaggcatatatctgcgtatgtgtggtacttagtcacatctttgtcaacaaactgttcgtttttaagttacaaatttgaatttaatgttgtcatcatcgtcatgtgtttccccaaagggaagccagtcattgaccatttaaaaagtctcctgctaagtatggaaatcagacagtaagagaaagccaaaaagcaatgcagagaaaggtgtccaagctgtcttcagccttccccagctaaagagcagaggagggcctgggctacttgggttccccatcggcctccagcactgcctccctcctcccactgcgactctgggatctccaggtgctgcccaaggagttgccttgattacagagaggggagcctccaattcggccaacttggagtcctttctgttttgaagcatgggccagacccggcactgcgctcggagagccggtgggcctggcctccccgtcgacctcagtgcctttttgttttcagagagaaataggagtagggcgagtttgcctgaagctctgctgctggcttctcctgccaggaagtgaacaatggcggcggtgtgggagacaaggccaggagagcccgcgttcagtatgggttgagggtcacagacctccctcccatctgggtgcctgagttttgactccaatcagtgataccagaccacattgacagggaggatcaaattcctgacttacatttgcactggcttcttgtttaggctgaatcctaaaataaattagtcaaaaaattccaacaagtagccaggactgcagagacactccagtgcagagggagaaggacttgtaattttcaaagcagggctggttttccaacccagcctctgagaaaccatttctttgctatcctctgccttcccaagtccctcttgggtcggttcaagcccaagcttgttcgtgtagcttcagaagttccctctctgacccaggctgagtccatactgcccctgatcccagaaggaatgctgacccctcgtcgtatgaactgtgcatagtctccagagcttcaaaggcaacacaagctcgcaactctaagatttttttaaaccacaaaaaccctggttagccatctcatgctcagccttatcacttccctccctttagaaactctctccctgctgtatattaaagggagcaggtggagagtcattttccttcgtcctgcatgtctctaacattaatagaaggcatggctcctgctgcaaccgctgtgaatgctgctgagaacctccctctatggggatggctattttatttttgagaaggaaaaaaaaagtcatgtatatatacacataaaggcatatagctatatataaagagataagggtgtttatgaaatgagaaaattattggacaattcagactttactaaagcacagttagacccaaggcctatgctgaggtctaaacctctgaaaaaagtatagtatcgagtacccgttccctcccagaggtgggagtaactgctggtagtgccttctttggttgtgttgctcagtgtgtaagtgtttgtttccaggatattttctttttaaatgtctttcttatatgggttttaaaaaaaagtaataaaagcctgttgcaaaaa

SEQ ID NO: 156934 - DNA, 3428 bp, Homo sapiens
gcaggaaaggcgcgggaggcgggggaggtgcggagatggcgctctgcacggcggcggagggagggcgctggcgccggggacacgaaaccgcagagcccggacgagtcagggagtgaggcgcgagccgggcgcccggggctctgcaggcgcaggcggcgcggggacaggagcaggttaccgggccgcccgagcgctcgcaccccgctgaaagaaacgcaggcggcccgccggctctgcctggtccgctacccgaccagctcccggctcggggctcagagctaggggcttacgccaagcggagcccggggaggggtgcccacctccctccgccgcatcccaagcccggcccccttgatgcgctggcggcctcggccgggaactccggggtagatgaccgtggacagcagcatgagcagtgggtactgcagcctggacgaggaactggaagactgcttcttcactgctaagactacctttttcagaaatgcgcagagcaaacatctttcaaagaatgtctgtaaacctgtggaggagacacagcgcccgcccacactgcaggagatcaagcagaagatcgacagctacaacacgcgagagaagaactgcctgggcatgaaactgagtgaagacggcacctacacgggtttcatcaaagtgcatctgaaactccggcggcctgtgacggtgcctgctgggatccggccccagtccatctatgatgccatcaaggaggtgaacctggcggctaccacggacaagcggacatccttctacctgcccctagatgccatcaagcagctgcacatcagcagcaccaccaccgtcagtgaggtcatccaggggctgctcaagaagttcatggttgtggacaatccccagaagtttgcactttttaagcggatacacaaggacggacaagtgctcttccagaaactctccattgctgaccgccccctctacctgcgcctgcttgctgggcctgacacggaggtcctcagctttgtgctaaaggagaatgaaactggagaggtagagtgggatgccttctccatccctgaacttcagaacttcctaacaatcctggaaaaagaggagcaggacaaaatccaacaagtgcaaaagaagtatgacaagtttaggcagaaactggaggaggccttaagagaatcccagggcaaacctgggtaaccggtcctgcttcctctcctcctggtgcattcagatttatttgtattattaattattattttgcaacagacactttttctcaggacatctctggcaggtgcatttgtgcctgcccagcagttccagctgtggcaaaagtctcttccatggacaagtgtttgcacgggggttcagctgtgcccgcccccaggctgtgccccaccacagattctgccaaggatcagaactcatgtgaaacaaacagctgacgtcctctctcgatctgcaagcctttcaccaaccaaatagttgcctctctcgtcaccaaactggaacctcacaccagccggcaaaggaaggaagaaaggttttagagctgtgtgttctttctctggcattgattcctctttgagttctcttacttgccacgtacaggaccattatttatgagtgaaaagttgtagcacattccttttgcaggtctgagctaagcccctgaaagcagggtaatgctcatttataaagctactggccccagatgctcagggtaaggagcaccaaagctgaggctggctcagagatctccagagaagctgcagcctgccctggccctggctctggccctggcccacattgcacatggaaacccaaaggcatatatctgcgtatgtgtggtacttagtcacatctttgtcaacaaactgttcgtttttaagttacaaatttgaatttaatgttgtcatcatcgtcatgtgtttccccaaagggaagccagtcattgaccatttaaaaagtctcctgctaagtatggaaatcagacagtaagagaaagccaaaaagcaatgcagagaaaggtgtccaagctgtcttcagccttccccagctaaagagcagaggagggcctgggctacttgggttccccatcggcctccagcactgcctccctcctcccactgcgactctgggatctccaggtgctgcccaaggagttgccttgattacagagaggggagcctccaattcggccaacttggagtcctttctgttttgaagcatgggccagacccggcactgcgctcggagagccggtgggcctggcctccccgtcgacctcagtgcctttttgttttcagagagaaataggagtagggcgagtttgcctgaagctctgctgctggcttctcctgccaggaagtgaacaatggcggcggtgtgggagacaaggccaggagagcccgcgttcagtatgggttgagggtcacagacctccctcccatctgggtgcctgagttttgactccaatcagtgataccagaccacattgacagggaggatcaaattcctgacttacatttgcactggcttcttgtttaggctgaatcctaaaataaattagtcaaaaaattccaacaagtagccaggactgcagagacactccagtgcagagggagaaggacttgtaattttcaaagcagggctggttttccaacccagcctctgagaaaccatttctttgctatcctctgccttcccaagtccctcttgggtcggttcaagcccaagcttgttcgtgtagcttcagaagttccctctctgacccaggctgagtccatactgcccctgatcccagaaggaatgctgacccctcgtcgtatgaactgtgcatagtctccagagcttcaaaggcaacacaagctcgcaactctaagatttttttaaaccacaaaaaccctggttagccatctcatgctcagccttatcacttccctccctttagaaactctctccctgctgtatattaaagggagcaggtggagagtcattttccttcgtcctgcatgtctctaacattaatagaaggcatggctcctgctgcaaccgctgtgaatgctgctgagaacctccctctatggggatggctattttatttttgagaaggaaaaaaaaagtcatgtatatatacacataaaggcatatagctatatataaagagataagggtgtttatgaaatgagaaaattattggacaattcagactttactaaagcacagttagacccaaggcctatgctgaggtctaaacctctgaaaaaagtatagtatcgagtacccgttccctcccagaggtgggagtaactgctggtagtgccttctttggttgtgttgctcagtgtgtaagtgtttgtttccaggatattttctttttaaatgtctttcttatatgggttttaaaaaaaagtaataaaagcctgttgcaaaaa

SEQ ID NO: 156935 - DNA, 1920 bp, Homo sapiens
gcaggaaaggcgcgggaggcgggggaggtgcggagatggcgctctgcacggcggcggagggagggcgctggcgccggggacacgaaaccgcagagcccggacgagtcagggagtgaggcgcgagccgggcgcccggggctctgcaggcgcaggcggcgcggggacaggagcaggttaccgggccgcccgagcgctcgcaccccgctgaaagaaacgcaggcggcccgccggctctgcctggtccgctacccgaccagctcccggctcggggctcagagctaggggcttacgccaagcggagcccggggaggggtgcccacctccctccgccgcatcccaagcccggcccccttgatgcgctggcggcctcggccgggaactccggggtagatgaccgtggacagcagcatgagcagtgggtactgcagcctggacgaggaactggaagactgcttcttcactgctaagactacctttttcagaaatgcgcagagcaaacatctttcaaagaatgtctgtaaacctgtggaggagacacagcgcccgcccacactgcaggagatcaagcagaagatcgacagctacaacacgcgagagaagaactgcctgggcatgaaactgagtgaagacggcacctacacgggtttcatcaaagtgcatctgaaactccggcggcctgtgacggtgcctgctgggatccggccccagtccatctatgatgccatcaaggaggtgaacctggcggctaccacggacaagcggacatccttctacctgcccctagatgccatcaagcagctgcacatcagcagcaccaccaccgtcagtgaggtcatccaggggctgctcaagaagttcatggttgtggacaatccccagaagtttgcactttttaagcggatacacaaggacggacaagtgctcttccagaaactctccattgctgaccgccccctctacctgcgcctgcttgctgggcctgacacggaggtcctcagctttgtgctaaaggagaatgaaactggagaggtagagtgggatgccttctccatccctgaacttcagaacttcctaacaatcctggaaaaagaggagcaggacaaaatccaacaagtgcaaaagaagtatgacaagtttaggcagaaactggaggaggccttaagagaatcccagggcaaacctgggtaaccggtcctgcttcctctcctcctggtgcattcagatttatttgtattattaattattattttgcaacagacactttttctcaggacatctctggcaggtgcatttgtgcctgcccagcagttccagctgtggcaaaagtctcttccatggacaagtgtttgcacgggggttcagctgtgcccgcccccaggctgtgccccaccacagattctgccaaggatcagaactcatgtgaaacaaacagctgacgtcctctctcgatctgcaagcctttcaccaaccaaatagttgcctctctcgtcaccaaactggaacctcacaccagccggcaaaggaaggaagaaaggttttagagctgtgtgttctttctctggcattgattcctctttgagttctcttacttgccacgtacaggaccattatttatgagtgaaaagttgtagcaaaataataattaataatacaaataaatctgaatgcaccaggaggagaggaagcaggaccggttacccaggtttgccctgggattctcttaaggcctcctccagtttctgcctaaacttgtcatacttcttttgcacttgttggattttgtcctgctcctctttttccaggattgttaggaagttctgaagttcagggatggagaaggcatcccactctacctctccagtttcattctcctttagcacaaagctgaggacctccgtctcagcgcaacagtattcgcaa

SEQ ID NO: 156936 - DNA, 264 bp, Homo sapiens
tctgggaccttagatgtgtattggggccctgtatgtgggtgtgtaggatcatgtgtgtgttttgtgtatgtgcctctgtgtgtgtgtgtgtgtgtgtgttgagatctctggtgtatgtctgatactctgggtatgtgagtgttggggtctgtgtgtgtttctatgcctggattcatacatgctccagtgtccctgggtgagtacatatctaggatcttggagtggctgtccttgggtgtgtgtgtgtgtctgggcctctaactg

SEQ ID NO: 156937 - DNA, 278 bp, Homo sapiens
tcccgagtagctgggattacaggtgcctgccactgcacccagctaatttttgtatttttagtagagatggggtttgccatcttgaccaggctggtctcgaactcctgacctcgtgatccacccgcattggcctcccaaagggctgggattacagacatgagccaccgcacccagcccgagcccaggaatcttaatgagcatgttaagcgactattgaggaaggtcacaaagggagtcgcagataatggagactcagtcttggggttttttctggctct

SEQ ID NO: 156938 - DNA, 402 bp, Homo sapiens
cacctgtagtctcagctactcgggaggctgaggctgaagctaggaatgggctggatgtggtgtctgaaccatagctggctgacctcagctcttcaccatggagccaggccctgtccaggagggttctgaccatctgcaaatctaagtcagacattctcagctgggaagagtgaacgggtaagtgcatctgaaaaaccccttagctctttcacatatgcttttttcttctttgggaagctcctcaccgaatctagaaatatgaattcatataaaccttgcaaccaccactgcaagtaggagaaaacatcccgattttagaaatggggaagcccaggcttaggaccaagctcttcagtagagatctgagaagttctctcaaggctgggcatggtggctcgtgtc

SEQ ID NO: 156939 - DNA, 161 bp, Homo sapiens
actcctgctgctcccaactcgccaagcattgttgaacaaatgtatatcattattctgagagactagattacgctttcacttattatggggaaacctagggggagaaatcccacaaatagcctaaaatcccctaaccgacatgccatttgggcgtacgggga

SEQ ID NO: 156940 - DNA, 167 bp, Homo sapiens
taccataaggcatgtagaacacacagatggccaattgtacattggcgtcctgtaaggccactcatttcttacatttagggcagttcaacaaacaggctgacgtactatgatctttcagacagcccacccacccagccaggagccatacatgttatcactcccctctg

SEQ ID NO: 156941 - DNA, 246 bp, Homo sapiens
aatctgcctttggcatcccacctccccatgcctacataatccctacattatcaaaggaaagacccctagaaggaactttggcagcagtagtgagatcagcgcggtgtaagctcattttctaacaaagcagcgggaggagtcggcaaactgactttatttctcaaaaagaatttatgcattgaaattaacaagtgagtgatcaggagtgtgggaaaattcaggaaaagtggctcagtgctgtgagag

SEQ ID NO: 156942 - DNA, 645 bp, Homo sapiens
catgccattgtcctgcctcagcctcccgggtacctgggactataggcgcccgccaccacgcccggctaattttttgtatttttagtagagacggggtttcactgtgttagccagggtggtctcgatctcctgaccccgtgatccgcccacctcagcctcccaaagtgctgggattacaggcgtgagccaccacgcccggccaccatttagtttttaggttatcagacatctgagtccatagccaatttggattctgcttaaggtgcaggtaattgctttgatgggtttaggtattgggagagttgtcagctgcctatttcccatttgacccctcgagtgaatccctgaatctgtctcaggttggtgattgattgctcagcttgagcagacagtacagggccactgtgtgggtgaacctggagcatctcagactggtctgttaggggctgttgtctgaggtaagcacagaagagaaggcacagtgacccttgtcagctccttaatacttggatcctgatgagctccagccagctcttcacctttccagaaagtccagtgtacaggtgcatagaagcagtcaaatgccggatcatttgttttcctgattctttgatttgaacatactgaaatgttgactagagaata

SEQ ID NO: 156943 - DNA, 416 bp, Homo sapiens
ttaagcaatctacccacctcagcctcccaaagtgctggaattacaggcgtgagccaccacacccagcctcctcctttttctttttttcccccattgagacataataattgtacctatttagagggtgtgatattttgatacatatctgcaatgcataatgatcagattgaagtgattagcatattcatcacctcaaacacatttattatttgtttatgctgggaggtctgaggaattcttgattcaaacacccagcccaatgtgcctgtcaactttcttccaggtgtcagttgtgagacgggacagatcttgtgtttcttcatggacttcatgtgagtggctgccctgtgttttcacatttttattaagcagcttaatttgccctttgaattccggtgatgagttggcgccagagt

SEQ ID NO: 156944 - DNA, 145 bp, Homo sapiens
tctgtgttgcttgtcctcctgtgagctggtgttttccccacagcctacatcacaggtagtctcggagggtgggggggtcactgcatttgtttatgaagggatgggctggcccgtatggcagaatagttgtgaagggacagtgctc

SEQ ID NO: 156945 - DNA, 300 bp, Homo sapiens
cacaattcagattccagttccttctctgctgaccatgccagtagtctccatcccactcccagaatagcccaaaagtccctccacccctcacacttaaaactttcccacgagatcacagggttctttctcactgcactgagacgtgctcctgcctcctgcccctgcctcgggctttgccccagccattcctctcctgaattctcgtccactcttccttttggtgctttaagacgctccttatgctagagacctatgtgagcagcgcccccacgtcactcccaggtttcccgacagcatttc

SEQ ID NO: 156946 - DNA, 626 bp, Homo sapiens
tttctatgttggttgggaaagagtgatgtctccacatgtaatttgtagagggtcccatcagtttccaaaagaggaagtgggtgtttgtcttgcttttgagacattttgggagacttagacacaatataatttctattgagaacaaagtagggttaggatttggagaaggaagacagatatttccttctctctgctaaagagatggtctggagtagaaaacttgtggactgtgtttacaattgtggagtactactcttggtaaaaacaataaagcagaatcgatgtctgtagaacagagctggaaggggcctcatggttggttttcaaggtaaactaaccacagacatcagttttccactcctcagcctttttagcatctgggttcatcttccaggaaggccataacaaagctccacaatctgaggatcttaacaactgaaattgattgcctggaagttctggaggatgaaagttcaaggtcagcttgggcagcgtaggtttcttccgggtgccatgagggagaatcattcgtgcttctggtgtttgctggcagccgctggtgttccttggctggcagaagcaccaccccaaccggtctctgcatcatctgggtattctccctgtct

SEQ ID NO: 156947 - DNA, 355 bp, Homo sapiens
ggtgatctagaggatcccgggaggtatggtgatcggaggaggggagtgcgtggcactgcgcaggagctgggcatcgtgggggctggggggagggagagcttttctgtagaaaagcagttcaaagaagctgaccccaaagttgcttaaggaggagcagatgagagagaacatcaaagaaaagtttaaactgatgcttgctgataggacgggagtacagggccaaatcagtgcttcagaacagatctaaatgtaccagtaaagtggatcactaccaccaagcctccacaggttcctgactccttgggaggaaattattcaaataaacacctggagtcaccaaaaagagacagagtga

SEQ ID NO: 156948 - DNA, 239 bp, Homo sapiens
aggtgcaatttatagaacccttgtccctagttctattaaactagacactggtaagtgctgggaatacaaaaacaaattccatttggtctctgccttcaagaagcatatttctggctgggcacggtggctcacacctataatcccagcactctgggtggccgaagtgggtggattgcttgagcctaggagttccagaccagcctgggcaacatggcaaaaccacatctctgcaaaaaaat

SEQ ID NO: 156949 - DNA, 502 bp, Homo sapiens
ttaactagctagcaagtggcagagctgtgatctaatcaaagtctagagtccatgtctcatctccatgaaggaagatgaagccctagaagtcatataacagcaatagagaaggagggatatttgggaggtggcttggacaggagcgagtgacttaccactggctgaggggaggagatggtgagttaggagggatttgagaaggatgctgaggttgctggcttgagtacctgaggacagttggtcctttcctctaccccaaggtccatggaaagaggaggagagatccaagcctctgagagagagttcacgagctcagtgacatacatggacagtccctaggtgtctatgggccacctgtgggcacaggctctatggtgagcagaatctgcaggtctagagcttaagagggaatttggtgctgctgcagtaggactcacccacgtgcagggagccaatcttctactctagcacacttgaggaacacaataggctcactacacaa

SEQ ID NO: 156950 - DNA, 356 bp, Homo sapiens
aggctgaggctgcagcgagttgtggtcgcaccactgcactccagcctgagcaacagagaccttgtctcgaaaaaagcaaaaaagaaatgactagagttttaggagctctgtgccaagaagaccacgaccagatatatttctttttacatcacaatatcacacaccaccttcttatccaagaagaaaaaggaaaaagaggaagagctatgagccagcaaataggaaaaaagtcagacttctctcacatgattttgcctctcacctccacctgtctatctgcactttaggaagtcaaaaatttccttagtcatggaactctccagaacccagagaaagcagattaaaaacaaagccaa

SEQ ID NO: 156951 - DNA, 499 bp, Homo sapiens
agccggcacctattggacttctgctggggatgttaagtaatttgcataaggtcacagctcaggtattctaacatcttctaaatcgtataaatacgtggcatctggttcataggagatgctctctacatgctgagtgaataagctagggttagtgaagcattgactgatatgcaagtttaggaggaaaaaaatgaaggattcatgatgaattataaagtgattattagtattagggtaaaatagaaaaggagtattacagtattaattatgagtaaaagtaaaataatttgttactatgaaatttctcaatagtttcagcgtaacttctccagaatactaactaaagagagctctatggactttggagaggattcttaagaaaactaggaaagaatcaaagaaatcaatatatttccccatttaaattgaaatactattctgagcaacttgagttactccaaaagaagaatctctacttcagattattaggaaagcctta

SEQ ID NO: 156952 - DNA, 415 bp, Homo sapiens
tctgtatactaatggagatgatccagtagaaaagaaaagactgatgatgcaggagacacctgccggaatgatatcccagagtaggtgagggggatgggatcagaaacacaagccgagggctggccttatgtgaaagcagtgacagctaatccatacagcaggagggaaggtagaagataccgagagagatgctgacaggtgggtagcttgcatgagttgtgttactaataaaaaatcaagacacatgggataaagtgtttgaaaggtgggaaagtcccagaaaatctaagctgatggccattataccaacattacaacatttgccatctggggagtcaggattatactctgtcagggaaaaaaaaaacaacttcacttgtaatattcacaaaagtcatgtgcttcacttttcctg

SEQ ID NO: 156953 - DNA, 595 bp, Homo sapiens
gcacaagactctgtttaaaaacaaaaaagatgaagaagaaggaaaaacgagctcagtttattcaagaggctccatgaaaacagaagtctgtagacaataaacttggatgctatattatagatcagcactggacaacagaaatataatacgcaccacaaatgtaagccatgcacgtaattttgaatttgctagtggccacatgaaaaagaagtaaagagaaataagtaaaattaactttaataatacattttatttcacccagtatatccaaaatattcattcaacatgtaatcaaataaaaaatttattgagctcttttatgggtttttggtaccaagccttcgaattccagcatgtgtaagtatacacaaagcacatctcattttggactagtcacatttcaagtgctcaaaagccacacgtggccagtggctaccataatgaacagtgcagatgtaaagcagaggttggcaaatgttttccgtaaagggccagatagtaaatattttaggccctgcagacccagaggcaaaatcaaagatattctgtaggtacttaaatagcactgtttgcctagggcgggctgcccagggtt

SEQ ID NO: 156954 - DNA, 532 bp, Homo sapiens
gccaagatggccgaataggaacagctcctgtctacagctcccagcgtgaccgatgcagaagacgggtgatttctgcatttccacctgaggtaccgggttcatctcactggggagtgccagacagtgggcgcagttaaaagaaagaaatacttctgaatcactgaatatggactcaccataatgaatctgctaattcccgattatgtgtcttgtggtttagttaaatgacaactgcatatttttgaagatcaactactaattagttctcagcggattcacaggaatactgctttccctcaatttggaaaagatcattataatactgaaatttctcattttcatttgtatattgtaccctgtaagctgtactatttttgtttctcattttcatttgtatattgtaccctgtaagctgtactatttttgtttctcattttcatttgtatattgtaccctgtaagctgtactatttttgtttctcattttcatttgtatattgtaccctgtaagctgtactatttttgtttctcat

SEQ ID NO: 156955 - DNA, 265 bp, Homo sapiens
atcacatgctacttctttcaggaatcctttcctcttccacttccagactgggctagagcaatcactaactctagtgctctcacagattcccacatacaggttaatctaaaacccaaaatgctcacaaaaagctgaaactttctgagtcccaacattctgagcaccaacatgacgctcaaaggaaatgctcattggggcatttcaaattttggattagggatgctgaacctgtaagtataatgaaaatatttcaaggctgggcacg

SEQ ID NO: 156956 - DNA, 612 bp, Homo sapiens
gcagagagaggaatgagggaaaatataatgatacaaagttgtccagatgtgataaaaagcatataaccacagagctaacaagctcaacaaagccaaagtaagatcaaaaacaaaggaaaccacaccaaggcacttcttcatcaaatttctaaaaaccattgatacaaataagtttttttaaatggctaaagaacagaggatacattaaatataggaaaacaaaaataaaactggctccaaaattgatgtcagaaacaacgtaagcctgaagacagtggaataaatctttaaggtgctaaaaaataagcaagccgggctggcgcagtggctcacgcctgtaatcccagcactttgggagacagaggagggtggatcacatgaggtcaggagttcaagaccagcctggctaacatggtgaaaccctgtttctactaaaaatacaaaaaattagccaggtgtggtggcgcacacctgtaatcccagctactcgggaggctgaggcaggagaatcgcttgaacccaggaggcggaggttgcagtaagccgagattgtgttactgcactccagcttgggcaacaagagcaaacctccgtcaaaaaaaaaaaaaaaaa

SEQ ID NO: 156957 - DNA, 267 bp, Homo sapiens
cacacactccgtatacacaaattcacaaagccatgctcactgcctgtgactgacaaggaatgggggcaggtactagccctctggcgcttttatcaattgatagatatcaattggccaatatcaataattgatcaattatcagtattatccaccctatctgtctgtaattagtataaaacttcttttctctttcccttccctaagactctaccactggagctaccaatactaaatcagaccgtgtgaatgtgccctttctattccttc

SEQ ID NO: 156958 - DNA, 570 bp, Homo sapiens
cgcttgaactcaggaggcggaggctgcagtgagccaagatcacactactgcactccagcctgggtgacagagcgagactccatctcaaaacaaaacaaacaaaaaaaagttgatggaagtaaaattcaaagtccctatcatagttcaaggaactctaaatgccctggcactgcccatgactccaactcaatctcatgcctccacccttactcacaatgctctgccatgtctgtgtttctcaagctcacccacctcccactctactcccccacctgagggtctttgcatgtactttctttttctctccctggaaccctcgtctccagaccctcatggcactggttctttcttactattcaggtctcaggtgacacagcagctcttcgactcctgcctggcataacccctctctcccttctctttgcggtgattctttgaacatagaggagaaattctaagcccaagggcagatgtggcgtagcttcaatataaaaatatcttacatggaaatggcttgatatcttctggattgtcactgagatctttccttctgcctgaccctccaaaacg

SEQ ID NO: 156959 - DNA, 189 bp, Homo sapiens
tgctgggattacaggcgtgagccaccgtgcccggccacgattgtcaggatttttgagaccttactacaacccctgacacctgacccacagtatagaattttccaggtgaaaaagacatgtagagaaagtcatcaatgccattcttttttttccccattcatgaaaatgattagattttcctttgagctg

SEQ ID NO: 156960 - DNA, 193 bp, Homo sapiens
aattacgcccagattcagtcaactgcaaactcaaactcaacaatttccagcatggacaactctccatgaactctgaccatcatttcattgcagctgaatccttgtctatctggaggggatacgtggggaaccaaccttgtttcaggttctactgagggatatttatgtcctgaggtgctgtggccacaattag

SEQ ID NO: 156961 - DNA, 182 bp, Homo sapiens
gctcggtcccctgaagatggcagagtggaaagctgggaaggacctgaggctttgatggagtcctactgctgaatcatccaaccctcagaactaccctgcctctctatgttatatgtgtgcattgctgaagcctttttatttatttatttatttttttgctatttctggttgggtcttctttg

SEQ ID NO: 156962 - DNA, 512 bp, Homo sapiens
ggagcctgaagtgggaagattgcatgagccagggaggttgaggcggtactgagctgtgatcgcaccactggactccagcttgggtgacagagcgagattctgcctcaaaacaaaaaaaagtataaaactgacatcaatgaacgtacttagaattttgaagctgtttctaaatctttagaaaatgtagggatagtgctaaactctacatgagatactgtgctaagccttcccatcatgtttttacaaacattcataagagtgcagtcaatctgacaggtgagctagtagtcatgaggcaggatttatgcccagcataaaaacgtgcttaacaaaaatgtaaaaaactgataggaaaattctttagtcttacgaaaaggagagcaaaagtctgtatctaatattctagacagggccttttataaaggcaaatagcaagaattaatgaactttttcagttcctatacttctatgttagataaatgttaaggaaaaaaaaaaggctccagttacat

SEQ ID NO: 156963 - DNA, 735 bp, Homo sapiens
tctcagcactttgggaagctgaggcaggcagatcgcttgaggtcaggagttcaagactagcctggccaacatggtgaaacctcgtctttactaaaaatatgaaaattagccgggcaaggtggcaggtgcctgtaatcccagctattcaggaggctgaggcaggagaatatcttgaacccaggaggtggagtttgcagtgagctgagattgtgccattgcactccaacctgggcaactgagcaaaacaccatctcataaaaaaactgctaaaaaaaacccccagtaccctgtttttatgtgttctgggctgttaattacaaatacaaatgtggttttccaaaatgttttttttaaaaaacaaaaacagcaaaattttagcataaacaaaatatagttttagaaactccaggatatgttaatgttaaaactgctaaaaaaaaaaaaaagtaccttgtttttatgtgttctgggctcttatttataaatggatttaccttcatgaatatccaatgaggtagtaaaagtgacacagaacataggtcagttctttactgtgcttgactgtcccatgctttgcagacatctggcatatttgcctctgcccactaaatgacagtgtgtctccaccccacctgatgacaacaaaaaaatgctcctacaggttctaacatgcaccctgggaaccaattttacattctcagtaactactgtgctaacaaaatcttcttccatgtc

SEQ ID NO: 156964 - DNA, 628 bp, Homo sapiens
ttcaaggtcaaattactctctaacttaaaaaactaattttttaggcactactagtctctttccaccatctgcctcagcctctcctactggttgccactctctgttcctagacttaggttgtaattatatcactaccctgctcaaaaagttctgatttcccaccaacaatacgacaggatttaaattcctcagtctaagagacaagaaataagcctttcccccacccctcaaaaaccagtctaaaaagtctcctttaatactctgtctggaagtaatccctgcctctgaaaatgaaatcttcaaacactttttttttttagacggagtcttctgtcacccaggctggtcttgaactcctaggttcaagcaatcctcctgctttggcctctcaaagtgctgggattatagtgtgagccaccacgcccggccatctttcatcttttttaacagttctatgaggccaggtgctgggattacaagtgtgagccaccgcgcttggccaacttttccatctttatgttctccttggatttcacctattcccaaactttaaatgttgtctaccaaatactgacaatttggaacattctaccagtagaacacacctcccctttgaacttcagcctca

SEQ ID NO: 156965 - DNA, 312 bp, Homo sapiens
atttgctatccagagaagtcagaaacagcataagaaattgtgaatcctagttaagatgggaagcaaaggccatagaaggtctggaattggggtcagggggacaaatcctaatagagaaaataagtcctagcggatgggaagcaagacagaatgttggacatgaaccaggtaagggcctttgggtcagggccagggctgcaggcagcaggacagtggaaaccccgctgttgtgtgaggccatataatgtagtagaaaggggccagccttagcacctggctagatttgaatcccaagttcaccacttcgtagtc

SEQ ID NO: 156966 - DNA, 313 bp, Homo sapiens
caagctcaatacagatgtggacagtagtgttcaaggagtcatctacgccagcagtaaccaatattttggcactgggaacaggtttgtggaagacacgggtgggattgggggatggtttcaggatgaaactgtctcacctcagatcatcaggcattaggatctcataaagatcatgcaacctagatccctcgcatgtacaggtcacgatagggtttgagctcctacaagaatctaatgccgcggcggatctgacaggaggcggagctcaggtggtcacgctggctggcccacccctcacatccgtactggcccg

SEQ ID NO: 156967 - DNA, 470 bp, Homo sapiens
gagtcccatgggtgcctcggtagcatctggattgtgggtgtggtttctagaaattgctgtatttggcaataggccaaagtgttgtatttccaaatacatttttcttatcagtgtgggcatataatttcagtcggagcctggatgactttgggctcacagagtgacttgcttcctagccctttgtatctgtgatgttcaccacaatgaagcttcagtgttcttaggatacatttagattaaaacccactggcgttataccattctttggctttagtctggtaccaaccagtttacatgttaaacccaaactagaaagtacaaagataggatatgtttggaattagcttctttccttttaaacaatgcattccaagattctgatacaaatcagatgcattttagagagtacacatggaaaatcaagacttaagaaaaatgtgagcatgcattttttatgttctgataagctg

SEQ ID NO: 156968 - DNA, 325 bp, Homo sapiens
atgtgaactcgttagcacttgttacttttaattatcttaatacttccttacgaggaaggaaagcaacaggctttttaacaacaggtaagattaaaaggcaaaaacaaggccaggcacggtggttaatgcctgtatatccaccactcagattctaccattaacatttcacttgtacttgcatttttatttgctatacaattatctacccctgtatccatcactaaaaactttctcctaagtactttagcatgcatatcattagttcattatttgacacattttcttttgagccaaaatacacatacaatgaaatacacagatttga

SEQ ID NO: 156969 - DNA, 298 bp, Homo sapiens
caacccacttgcacgccaccgtgtggacaccttaaagcgaccttctagctctgaaccccgctgagggaatggtcaccttcgctcctattagatggcttggcccaaaggacctagcgacggcccagacaaaaatttcttcctacaagctccatgtgtctgtggtctctaagactcaaaaacaaacccaaaacgccgccaacccacctttcacgagaggagtccttgagaagagcctctccagccaggaccaggtaagggaatctgtgcacttggccagacccagaacacacagtggcag

SEQ ID NO: 156970 - DNA, 299 bp, Homo sapiens
tatttgaagagaagaaatggcaaaattggtctgcaaaagaacaatctgtaatctaaactgattgaacagtaattctcgggttgaaaagtagagttcggctgggtgccgtggctcctgtaatcccagcactttgggaggccgaggcgagtggatcacctgaggtcaggagttcgaggccagtctgaccaacattgcagaaaccccctctctactaaaaatacaaaattagctgggcatggtggtgtgttcctgtaatcccagctactcgggaggctgaggcaggagaatcacttgaaccc

SEQ ID NO: 156971 - DNA, 121 bp, Homo sapiens
tggtgtgtctgagattactgcatgtgtcttctattctgtttgtgccttcccttcctagaatgtccagactctgtctccacctttgcttatagggagggaattcacgtttaaagaccctagt

SEQ ID NO: 156972 - DNA, 258 bp, Homo sapiens
aattttttgtatttttagtagaaatggggtttcaccatgttggccaggctggtctcgaactcctgacctcaggtggtccacccaccttggcctcctaaagtgctgggattacaggcatgagcaaccacacccagccccagattatccttcttaatttgtgcttcttgcctttcgtatatatctttttcattttgagtttccttgaattaaaactttttaattcaactcttggattgcttagttttgaataatttgaga

SEQ ID NO: 156973 - DNA, 624 bp, Homo sapiens
ccatctctcttaaattcagtctttattagagttctgatctttctgttagatgtctaaataagagaaaaaattatacagtggtctattaaaagggatgctattgatggttattttatattgtatatcaaagcctcttcatctataaggagctcttaccaattaataagaaaaaggaatgacatccagaaaaaaaaataggcaaaagacagaaatagataattcacaaaattagaaataaatacatgttgggtggcagggggaggtgaagggagggtgtctgttttttagccctctagtgaccaaaaactggaaattaaagcatgataaaaaaagaatcctgaataaatggggactttctgttggtggaaagaaatatagattagttacaatctttctttctgagggaattatttggaaatatatatctatctttaaaataggtatatcctctaacatagcaattgcacttcaaacacttatggatataattagataaattggcaaatctgtagatataaagaagtgttcatttcaatattgctcataataataaaaaactggaaacaacccgaaagtccatctatagggagcatgggttaaaataagcatagggcatatagctgg

SEQ ID NO: 156974 - DNA, 251 bp, Homo sapiens
cctttggctccccactgcgcaaacccaaagtttaccaaacttttcaactctacctccacttcagctttacactttactctccacttacttttggcaaatcaatataaaaaaaaccaacccatttcaaatgcagctacctcccagccatcaactttcctcttcagaactcaaaatttccttttgttttcatctaacttctttcttcctccatgccacatctgtattttgtattcttcgcgattagggttagt

SEQ ID NO: 156975 - DNA, 431 bp, Homo sapiens
aggccctctgtgtactctgcgttgcactaggagccagtctacaatgataagcaaactgtggttcctgtctcatggaccctcatagcctagaccatcatcaaagagtcatgtagataataaactttaaagcaacagagatgtgcattccactggaatatttttgctgctgtgaaagtggagggtgaggttctgacctcctgtgggggtacaaataggcttccccagaggtgtagctttggggccgagtcctgaagaatgaactggtgattactgagcaaaatgggctgcagttggggtcccctgccaaggaaaggacagatggggcatggtaagagggaggaacttagaggccggggacagttggaatcagagagtggggacatgtggctgaggaggaggctgaggacaaaggaaggcccatagctgaggag

SEQ ID NO: 156976 - DNA, 502 bp, Homo sapiens
atatggacaaggtagagccatggtcaacaagggaagaaagtatttcaagaagtagggcgatataaaatgttacaattgctgcagaaaagtcaagtaagatgaggctagaggaaggacatggagcttggcaacctaaaagtcatcagaatcctttcaagaattgtctcagtgtaatgacagggctagaagccagattggagtaggctgaggagtgagcaggagtcttacccgttactatcaaccctctgtactctaatagaacttatctcactacgctgaatccatatccttttcaacttttcaaatgaagtgtgagttcattaggaccataaattatttatttttgcattctagtcttatcacaatagtcagagtcgtcctcccaaatcagatcagctctctactctgcctaaaatcctccagtgactctcaagaatcctcatatgaccttccatatcagccattccctttatctctctggcttaatcttctacctctcgcc
